United States Patent Application Publication US 2007/0054278 A1 - sequence listing, part 60

SEQ ID NO: 95339 - DNA, 217628 bp, Homo sapiens
aaagcacatttaaacacaaagtccctatcctcggagcccacaggctcagcctcatggggtttctgatgaaggcaacttcttccccttctggctcctggaggccctagtcttctcctcactcccttggagcacccatgaagactcaaggcaccagacccaagagaaagtggtctaaggctgtcttccaaatccctgactccttcctgcccttgtatgattgaagttgggattggccactcactcagggaagaccccattccagcttctgccaactagagggtaacaaaacaccttggtatcaaaagatcaatcacatcacagcagaagagtccaataagcatagaaaatatacatagatggtttctgattcagggttacccttagaaagcaggggtggtgggtgaagtaacaataagtggaatggaaaaaaagttaaagcagtttattttttggtgcattttgtgaagtagaatcctaggacaactgctgatattgagaactagtgggttagttgggatttgaagagtaacagtttggagaataaagatttatggcaattagcaaacggtaaaatattgctcaatataccagaggctctgctgaagacggaaatcatacacatgtaacacagcctagctatatgattttttttccacagcagagtggcacctgggggcatgcacggagaaagccatagttagatttatgaaaagctatatattgtcaaggtgggcacagcagaaggacaagaatgtgagggatctaggatgctagtgagaatgtggtttaattgaaggtcttggtcatgaggcccaggctaggtcgggggaaaaaggataaaaagggtgctgatagactaagggattgggaaggggtggagaaagtacaggtcttgctaagactggcaggtgggtttgggggaagtaagagaatgggactgatgaaagggcagagtttctggctagacaatgagtctctgagtttcagatttcagagatgaaatattcctggggttgggatttgggagtgggtagatgaagggaaataggttggtagcaacccatcacatattgggatgtgtaaaatgatgtggtcatcagatattctgacttcttaaaactcatgaaaataaacctgtcaataaaaaacagattgacaagacccaaagaaatgcagactttggaaggcatttgctaaactttgcttatcatgcggtttggaggtgggataggaaaaaaataggtctctctgtagacttcataaaaaacaatacgtgaagacctcaatttgtggatgtccttcccttaagagaatgaactaactaactaaataacaagttttatgttccagatttttggcttctctagaaaaacaagatggtcttggcagcactgagccaagattccctcaaggtagccaaaagatttctcaccagagtacctgagtctaacattctgtgttgccatactacacctggctgggtgtcagttgctatttatcagtatgctcacacatcttttttagagttaagaggaaagtgaaatatttcttgtatcaaggccctatcaaaattagaaagccagaagtgaatcaggaagagtattactctgatatgcaaagtatatcgttgttggaaaaacaagaattatgatgctattatgaaacaaatccctccaacttcactcattacattacctacctggcccccatacacatctgagtttgcaatgactcctgtaataaaatggtggtagacatacaatcatatacatgagacagcatttataaaaccagtgtaataagtaacagttattacactaattgagggactcatattagtctatcatattgtatccttttgctgatagaatgatcttatcaaattcccattgattaatagattccctcaaagtgctaccaatagmcactgaaaaaacttaatgaactcgcaaagtagctcctcagtggctgaaaagcatrgctgtaattcccygagtgcctaacttcttggcagccatatacacttgyggaagayggatccaaggaaaatgggtgaaggatcttttgtgtcagaagagaggaaaatatggaaatgaaagcttttggcaggtctaacttgccacattactgctcaggaaaaaaggcaatcaatcgctacatatttcttgttgttgaggatcatgataaaataaatataatttaagctgtaggagcataatagattaaaatcaaccccttggattgactcaggaagcaaatgagttgccagtgtggactagtacattgatataatctactatttccttaaagcattttggtcatctactttctgctctagttagcatttatgttaagcatatgaacagcagttgactatgaaggctcagaggttgaactgcatctttggagaaatagaggaaataacatgtgattgaggtttgggaaatgaaaattgtcataatacattaacgaagaaaataatctgaaggccaagtactcactgaatcagaaaaaaagttggagagtcctaatattggagcctgtgaactggaaactagatatgaattcataacctacgagggtataaatgatggcaagaagtcagtaaactgagtcagtgttatttttgagactgaaggaaggttcttatggaacagggagtctgaatagttcaagttctgggcattaaattgatgatgcaaatagaagacagtttgatgaagagtgacaatgattaaaatctgagatggattgaaatacgaagaaaatttaaaagagataaagccttgtattgctggcatgatagaatgagattttaaaggtatctactttaaatatgagcaggttactcaccagaatccaaccgtttgcatacagacaaaataaattggcataagcatcatggagctatttagaatgggcattttattaatgtcttgcctatcttttattgccctgctctgaaatgtaatctgagggaaccattagacaatattcgctgaggaatgactatgatattttggctctttttctaactccaactactacgaatttcacaatgccatgaaaacagcaagaattttggcaaaatatttacaatttcttcaataatattgcttgtggaatatgaggaatggacrgcaaccacttagtgactgcagagagacaagcaggaatgaggaaaaacaattacttactacgctatttgtgatgaaaaaatctgagtttagcttattataaaaagcctgttgggagccaagcatcgcacatgtcagaggaacatgctgcttcccttcaccatgtctgagatakggtacctacagttgggctgtttgtgggatgaagaagtgcttctataacatcagcaggcrtgtgaccagtggcttgtrggagacaagcacttatgggaataaaagggaayctggcacaggccttgggcctctggcatcattagttacaggtctgccaagatgctttgggaaacattttaatttaaatgccaagtctatttcaacgaagctccctggtatgacctgttgggagtccagagtgagatggataggtgctcactttggagggcactggtgaatcagctggtgcttctataaaaagcatactgggggttaaacatcactaagtccctactcagcccaggaaaatcacagtgagagccatgggatctatggctttcatagcattttactagtgactcgtaaatgcaggaaagattagatactaacacacaaaaggcagagacacctctgggtgtttattcaaaatatcaaacttagagaacttgaagaataaagaccccagcattcttttttcctcccccgaagcatactcacaggctactatgactataaatttaataaagcagagttaagagcctgatttgaattatttcaatatttttcctccaaaactatcacaagacagaaaaaataaacattttgaaacacaacgagaaaaaagaaagaaaagagttgagactgaataaaacactaagcattgtccttcgatgtaaaaaactatttctgttagtgtgtaggcccaggttggaaagagatgtacaaaaacacgaattcagaggatcggaagaattaaaacgcccccaagaataacatgaaagtatttgatgttgcttcaggggcaagggcgagtatgtatatgtacgtaaatccatttcctyagaggctccttggcagtctgttacaacaccacgctaatgaaagccaggtctttaagttcaccccgcctctggactattagtttctcctttgcgccctgcggggactgcattcctggaaatgaaagcacacgagttggggaagggctggggtgccagagagggtaggaagctggagcccacggagcctgggatggagaggtgggtgggcccaggcctggggcgtggggtggcggtggaaggtctggggtctcacccttcggagttttgagtcttgtctggctccagggagggagatccaggggagatatttacgaacggaagccacacgatcagcttggacttttaggccagtcactccgccttaagtgggtgcgtgagaaccagaagagggactggctgtagcgctgcaagtgagatcctgtcccaaaagatgagcctgacttaggctgggccccgcaggccggcagggccagccggcatccctggtaggggaatcgggaaggtctcaatgataaatctgtgtgtggagactcagagggcacgaaataggctctgctgatgtcctctgcccctcatagcctgccagccaccccagccttcacccctgcctcagcatccttccaactagttgaatcaatcaggagcccaagggaaaggaattggtcccagtgtatgaaatgggtctgacctactggggaagtcagagaggagtgtcccgaactgggtgggaaggaaacgagttccgtgcgcggggctggggcaggagtgaggcgcagcggccgagatcctgagccccgggacccttgttccgggccccgaggcctacttggtagttgcccctcggggttccgggtgggtgactgacagttgcagcagctctggggaggcgaaggataggcaatgacttggggctcccgtccactcggctttgaggtccccgcggcccgatgacccggcctcggtgacagcagccgcgacggcggcaatctcgacagggagctaggcggctcatggtgggtcagggggcgaccgaggagggaccacgcggcctgtagggggcagcgccgagctcgggaggagacagcagccggcgggtggggtgggtctgggctgccccctccgggagctgccccggggccgcacggcgattgtcatacccggccgcccctgcccgccgtgggcttcctctcggcgccgcgggccttaacggggctctgaggggacgtgacagagctcggcacgcggcagcctctggggagttagggtccggagagacccacgcgtcgccccccgcccgcccggggccgggagatcctcgggagccgcctccgcgtgtccagagagtgtcggggcggccgccacttcccctcgcccttcgccggaggtgggcgccttttcctgcgtggcgggtgctccgaccccagttgctctgagccccggggaagcgcgccccgagcccctgacgtgggcgccccgttacctcggggtgggtgcctggggcccctgaggtgggcgcgggttgccccggggtgggcgcccggcccgcgcgggttatttttggcgcccgcagaggcgcgtgtgttggggcgtgttttccttccccaggtgccgagagccggggctccgccggcgccggagctgactcgtctctctcttctttcccctgcaggaatcttccgataattctgccgccgcgactttaaccgtgcgcaaggcgagagctcgaaacaaacatcacatctaaattaaaaaaaaaaaaaaagcggaagaagcggccgaggcggcggcgggaggagaggaggaggggccgcgcgcggcggcccgaggcggcggcggggacgcggggacgcgaggacgcggctttgtgcaggcgggtcgcggggcgcccatggcggagtgcggccgggggggcgccgccggcggggccctgcccacctccccgggcccggccctcggcgccaagggcgccctgaaagccggagtgggggaaggcggtggcgggggaggtcgcctcggccacgggcgggcgcgctatgacagcggcggggtttccaacggagactgcagcctcggcgtgtccggggacgaagcccgggctagccctaccaggggaccccgcggcgttgcgctcgccccgacccccagcgcggtcgtctgtaccctcccccgggagagcaagccgggcggcctgccccgccggagcagcatcatcaaggtaggtgggagaagggcgctcatcgcccaccctcagccgtccttggattctattttctccctgggggagtggtggtggaaggaggaagcccactgctaacaggaaccactggagcatgggtgcttggggtggttgagcggggattggatgcaaatggcatgtggaaagaatggagaggtgatccctaatgtgcagggggagctgtgctcagacatcctcagttgaacttggggctgtcacctcttccaggattggtctggcattagggccttgtacctgccggggtagggcatactattatgtgtagcctagtctggttaacagactccctgtaagatttctattgtatcttaaacacagatagggattatgtgaaatgtgagaacattttcttaaaaatcccaggcggcgaacagagggtgaacagagattatttaatagggttcttctgatccgtatacagttagttggctcttacaaatgtttacacttcgagggtgcaaaatctcctaatatccggtcactcagtcacaaagaaaaatagagtagatttctgaacataaatgcagatttccgctttcttaggctcaaaagctcagagattacagttccacacgatttaatctttttccttgctgcagtaggcaggcctcgagtactgtggaagttcttttgggcagtttgcttggttttgcttgcacagtgttagcggaagaaagccagcgattgttttgagcattttaaactcaagaagtaatattaggaactcccgagtttgtgttagtttcattctaatgttacattttggttcgcaatgtaaaaatatttttcatgacatgaagtgcaaaaaaaaatagttgatgagctaagaagagcagagccttaggcaagaccagctcattcggctcgctcaagtttggagcaaatgaaaacattgctttctgaaaatcaaggagttatcaggacagggagcagcaaagcaaattgacaggctgcacccacccttcctgtggctgataactggtgggagggcagaacgtgccacagtaaagagagttggcagtggtggtatctgaaattttattggacctacagaaatcttccaagtactgtgaaaatgtctgatggtgttatcaacttatgcagtaatctagtgaaatataccatcttgctactctatgtaagaggcaattgtgaaacwgcatttccctttgtcatctgtttgcrcagtttatgtctgggcaaggacacaatttgaagggtttggagatsaagtgtattaactacctgcagcacacacgtagagataaactaaggaaagtaaagtgtctttttgctgcatacatagcttttagtgacttacgttttcttttactctgtagcttatgtttccatggaagttgctttcaactgtgcatgataatcaatcctattgacagagttaggtgacatttctgtttttatttgtcataaaatatttgtggtgattttgcattgtggtgttaataaaatttgaggtgaaaattccaaagaagataccagcctacctaattttaacccctttcttttaattgttttgaatacttgtttttgcattaaaaaatcaaactttattagtgtccatagtgagattcatagtgtaacttactgaattacaaaaacatttgttttaattttacattactgggcgataagcaagaaggatgatttgttagtatttctgatatatggaattgggaacttgtcaatagataccatttcttaattgaaggctctagaagcacatgggggaaatgattaatgttcaaaaatcactgattttagaaatgatattgatacttatgttgaattctgaaacttttaaggatattttgtcatttttcttctttgtaaagaaagcatttggcttcttgttcaccagtgtaaccctagatataaagtgccaggaatgtagtagcagctcaataaattgcttattgaatgaatggagaaagtacatgttttctctgagttctgttaatttataaaacaattggttttggatttaccagtcccatattttgttcattgtattgtacctccaaagaaggcttgacatactcctttttcttgcctctgttttcactttgcattttcttaaaactttcgaaaattatggaagtagtgttgaaagttgatcaatactgggttataggaaagagaggatgctatatttaaataggtaactacttggtatatttccctttgaattggtgccttgaagcatcaagatttttggaatgtattgtggtattttctaaagataacttccagcatcaggacaatatcctaatagaaaacaaagtctttaacatcaaatttcataaagcaacaaatactgcacagatagttttgtcatgtgaatggcagaaattatgtttcacttttgtttaaaaaaaaaaagaataaaaagctaaagcagaagcccatgtgaaaaagcaatagtgacatctttccttggtttccttattttttttaatataagggatgaatgcagtcaggtggtctctgagtagaggcaggagtagattagtaagcaaggtgataattggggacttgagggaatagcagggagtgaatgctrcctggggaactgaggccggtatttatggggttgtattagttgaaatgctgggcttctgaactgtgcctctctcctagctttcatcttcattacagtcttgacagccctctttgttggagatccttaaatcagagggagaataatggcctaaatgtgctataaggtgggcaaagaaagggggactattgctaaagtgcagggcatatgcagaaatacactgtaggctgacccgaatcttattcctcatttaaaataatttatttggtactccatctgttttgtaaatgtggtgttgagtaagaaattgttgtaaaacaatattttctgccaaaatagatgcacagatctatactaaaagaactctttggttatgttaacagtgttgattaaaattcagagtgagcagctttgtagaaccttttacaaataccttgagatgataaataaatcatggaaatcatcaccagacttttctacttttccttagcttattgaaaataacggtcgacttttgagattatttacaaaggctcattactggattttagagaagaagccrttatgtttgtcatcttaagtaatctagtaaatgaaaacatcactttcattttctctttccataattcatttcatcactctattcaatataatctatgctttattttgaaacagttaatttggttaattgttcagatggcatcccttatttgcaaatagctcaatcttttaattcaagagcctggtctaaaaatatgaagtagcattttaggccttagatttctgtttaagtttagaaagaaatgaagttaaaatgtctattgctgtggatgatttagtcagaactagttaaatactttggttgatactttaaaaaatgaggtatgatttacatacagtaaaattcacactggtttgtgtcgagttctgtgaactttgaccaatacattcagtcatttaatcaccaccatcatgaagatatagggcactaacatcacctcaaaaaactcccaggtctctgtgatctttcgctcccctcatccccagacaatggcaatcttcggttcttttttaatcagtaggaaattcggccattaccttatcttggtatttagaagtaataacggtagccaacacttattaaacactcactgcatgcaaaacacgtgaaaagtgcttaccgtaattctctgacttggtcctgtgctaaccacagagacaggaggaaatcagagttcagagaggttaaccctgtgccccaggtgctggagctacttgtatcccgcttgggtatatggctgcactccattgcttccccacattacagtggcagtttgaattttttgtggttaaggcagcatcagtggtttcagacattggatttgattgccctctttaaatgtaggagatattggaagaaggaaaagaatctctgtttctgctggtggaagaagttggcagataacatagccaggaggcttttagtcacccgttgtggctgcttgaccagggcttgcagcttcacagggaccaatgatctgaccttgcccaaggtggcagcccttatttttcttagtatcattattgccattgtcatagtgtcatgtggtgtaggagaaacacttttactgtctttatactactatgttcacctatgtcttgacactgagctctccaacatggacaacaagcagccttttcacatctattatacacatttaaatgaaataaaacttttatgtgtgtcttggcccatggtttaaataaactaggctccttgcaggcagaagttggactgtatttaccagttctgcacaggtaacaaacactcagtaaccattttttaattggatcttaaaaataatatctgcgtttgactttagacatttttttttgaatgggggaaacaaagataccgcatgcccagcaaacctgtgggcacatcataaataattaaacagacagtagctggataacaaagtgaatttgtctggatagataggaaacctggatcattaaggtcagaaaaatctaatggccaatcagcaactccccactttactttgtgctaatacattttagaccacacaagttaactgttgaaaggccaaagcatggttgcttgttttagcctgctcaaagagcttttgtcacaattcagtttaggttttcaaaagcagagtatattaattttcatgccctaaaatctacttgctcccttttgctttcctcctcctccattttccagcctcccccaaatggttgtatttgatttgcattgtttttcatcaaatccaaataggcaactgacaggaaattgtttattttattaattgctgatattggccacaagttattttcttagaatgttctatcccagaatctgttcacttccttttatagttctttgtgctctgcaaggagcctaaactagaatgttatttactttatttttttatgcttaagttacccaggcttcaatattcaacaaaatagggcaacattatttacagcctaaatgcagatataaatgaagtatgaacatttatagtttttcttcagactttatacttatgtgttcaagaatagatgctttcttccttcttaatactaagttttggatgccagttatttacttatctaccagacttctggattactttaacttcttttctgttctatattggtgggattcaaatacttttaccagtggaccacaggatctgcgactgttatgtttgtaagctgcctgctgagcttttttctactgataagattggtaaattgagagggttgtgcttagcatgagtgtcgtttgtgactcaaactgaagtcagagccgctagagccagccactattctttgtatcagagtaattccatagctttagggtgcccaaagtatataactcattgcattgagcttcagcaacaattatgtgaatggtccagccttctggcaggacacttggcacccacccattccagaatggcaaaccagggcaggttgttaggccctcttaccactagcacttggtcccatggcaggggtaattaggtgaaccatattttagctagtaatctcagctgggctgcatcctgtggtcgagggctgcccccaggccacatgttgcgtatctggattattcaggaggcagaattgtggtgggaacaatagaaagtctgtagttaggggcttggattagatcctggcttccctggttcctttctttatggccttgggcaagatactgaagtctgtatgtccagttactccatctctaaaacaggtagaataaaacctcctctcatagcattgttgtaaagattaaaggagatgattgatgtgtgagcagtgtgtggcacctaataagcattagtgtgtttttctgatttttagttgagcagactcctttagagaggtgagcagactaacatggccatgctcgttttgaaagttttgtcttttgaaatatgcagaatgtgcctagggaaatttctcaggcatgttccataaatgctttcaataattgttttggtgtctttctaaatctgatacctcagtacaactgcacacacatgtaaatagccccaactatgggatcaaagggtattgaacatacaatttcattgtgccaagcacccacatgtcttgctttgcccaggacaatccaggtttacatcttttgctgtgmcaagattattaatagtgcctcctttaactctcaaaggcatctcagcttggacgataaataatatggtcatcttacttgtaatcttcttttcacaaactgccttacaacctatgctggagccccatgagattcccctctgtgcctaaacttagcctttatggtgacacctctgtttcctcaggtttccttctctcttagtaatctttaaggttttcctcagttaaccacttcccagttagaatgaattatttctctgtcttccagccaccactctccctgtatctccatacagtccttctgcctcttaggcaactacatctttttcatcctgaatttatgaaaacacctagtttaatgtcttgtgaaaagtatttgtttaagtatgtatttgttgaataaatgtgtgaatggataaataaggggacaagaatgagtcttaggagttggatgaagatgttatttagacttaactccaactggttttgattggaatataaaactcagtgggatgtgtgcttcaaagaagaaatttattcatgtacataattttgaaaacaaaggaaataccttcatttaaagatggatctaggaatttggttaattctataactgttctggaagatgttaatataaatgattgctcccttttgtgccctgaaataagaataggcctttgaaattttcttttgatttatattctgctgtcaaagtttaaaaaggatggcaagagaacattattgtttgctaagggatttaatcgttttttggtatttggtttctttaagtgatatctgtagtttttgctcagttgttgtttatttttgaggaactgaattacttaaactcctattgtcattaatatttgctagtcacatggtattcattggaagtgctataaaattaataattaaaaataaaatacataaggaatctggagtactgataagagttgtaggagtgcgatctctaattcctcagcatgttttgtcatgtaatggtagaaattctgccctttgttgcagtgcaaggattgggtgaagaagagatactaggagatgctttgtatgcatcgtctcatgcaagtctcaccagaacctgtaaggagacattatcattccccttacagacaagggaacccattctacaaggtttgggaatttccaagcaaggttagagaggctgtaagaggcaaagccagcattctgaccaggtttgactgtccatgttttgaactgctccatcaccctctcccactccatcctctggatgactttgattttttctttcttctcctacttgcccaagccattctgacttcttgatcttagcagtttctaccagtactaaaatagacaactaatttttaatgagaaaagtttggctttttgtggctgaatcttatgatgaaaccaatgtgtacctaaccaacatgaagccataaccatagtcctgcccatcgtgcctcaagtttctgtctgatctgcaaaccaggaccttgtccttttcctctctgctctcctttgatggattagaaattcttttaggggggttagtttccatttttatttcttttttaacaaaaagttgatttatagttctatgcatttttagggtcctggaaggtaaagcaggtaacaactagtaatggtttgtttttttaggtgggcttcttctattattgtttcggaattgtcaactaattatagaattttagaatacaataatacaacacattactgtgtagtcaatattcagtatatttttggagtgtgctaaatgtactgatttggatattgcagatattaacatcccagaaaccaagcagctgggtttaaaagtgattaatcatggagattcatgagattttcacagcggaaagagatcatgtaaaattcttttgtagttagagatacacaaggccatactgattagtacatttagctcctagctatggttgaattcatttatttgcatattagcataacagaattggaaaaatttgttatgtaatactgcagtatgtgagtattaatagaacaagatgtggtcttctagattaaaaaaatagctattttttgtgaatttgttttttgctatagatagctgcatgtgtacacatgctatacttgtgtatgcatataccctgaagactgtttataaatcgtaaagattaagagcaaaccaaataatgtagtgctaggttgacacaaatcctgtgtctctctctcagagactgatggactgatgggtagcaggtgyatgctctttaaattgaaaatgcccaggaagggataggctgttccctatgagcattgctgatgaagcctctgttgcttttgaccaattagtgtggtcacagagggttaagtgacctcatttgcagctaccatcagaattacaagccatatgactctctccatatggtttcctgctaccttttattttttattctaaactctgatattctgtagtcatagtaaatgtattttttcaagttatttatatgatttaatgtttattattgaataaaggatattgcttagatttttatttctatcaatccatgctaatatattaaatgccaatataattattcagatgttttcatattgaagctaataaaattcctattgaaatactggttttgagaatgtcttcatctgtggagtatttgatgatttgttgaaagagatctgtatgctcttccaaagctttccctggtttatgtatatttccagaaataattttctatacattaaaaataatattagcagtagaattactatatcataggacagacatgtgtacattcagctttagtagatactattaggtgattttcctaactggtccagccaatttacacacctaccaggttatatgaatgctaggtgctctaaatgcacacatttggtattatcagtgtttctttgtctttttgctttttgattgtaactattgtgacggttatgtaatggtacttcactgtggctttttggctgaatttctctcatggctaatgatgttgaacatcttttcatatgtttcttggccatttggatattctcttttgtgaaaatgcttgttcaagtcttttgcccatttaaaaagtcaggttgtttttattttaaaaaaaatggtatgtaggacttaatttacattttctgaatatgtcttttgtgatatatatatatattcaagttgtttatatggtttaatgtttattattgaagaaaataaaggatatcgcttagatttttatttctatcaatccgtgctaatagcttatattaaatgccaatgtaattattcagatgatatatatgttttgtgatatatcacaaaagacattttcaacatatatagatatgttgaaacacgtatctatatagatatagatatatgttgaaacatgtatctatatcgatatagatatatgttgaaacatgtatctatatcgatatagatatatgttgaaaatgtcttctagtatgtgacttgctttttcactgtcttaaagggtatattttaatgaaaattcttaattttagagaagttcagtgtatcagtatttttctttatggttattatttttgagtcctgtttcagaaatgtttacttagcctaattctatgaagatagtcatttatttaaccactggagtcttattgttctatttttcatgtttagatctggatttcattttgtgtgtgtggtgtgaggtagggttaaagattttctttccatataaatatccaattaattcagcaccatttatttgaaaatagaatctctttcccactgcactgcattggtcttcgatcctagatcaagtggccatttatgtatgggtctgtttttggagtctattttgttacatacacataaagtccttatatacttaccacactgtctttctggctaggtatatacctaacaggagttactccatatgtatattgaaagacatttccaagagtccttaaagcagcattaattctaacagtcccaaattgaaagcaacaactcaaatgcctatcttataaaatagcgtatcatacagtggaatcctatgaggaaaaggaagaaagaacagaaacagcagatgactgccctatgcactgcttgagtctcccaagcataatgctaagggaaataaaccagccacaaaagaatacatatttttgattataattatataaagttcaaaagcagctaaactaatttggagtggtagaagttataatagtggttacacttggggataataattgagggaggaagcaagggtcctactgggtgccagtgatgtttggtttctgcatctggttggtgattccaaatgtgggtttactttgtaaaaatccattaggttttacacttaggattttttttctggaagtctatcatactgcaacaaattaagtttattcaaacaattaaattgtgaacattaatcaaactcagataccaattggttacttcctcctgcactatttagggccgtgccttttacagttttttgctgtctgtggatcagcatgtgaaacatttctgctgctgtggacacttgtacgtggtgagacctgctaaagccctgcactagttgatggcctggagagggggtgggtggagagaggggcagcttgctggaagagcctgaggactggatcttccttggaatatactgaaagcacaaaaggagctgggcctgggtggaaagttgacacattagtgaagagtgtgttggtcactgcagtcatcttacactgcagtcgtgattgcttggagtttttatgatttgtttagtgtagttttgagcttcaggtgcactcgaaagttttaatatttgaaaatgtgctgctcataataaaactttgagaaccactcgtttgtggagcacctgctcttcacataacagttttctagatagagctttttggtctcaaaagcagttaacagagcaaaaccagttatccagatatacggacaaaatggagagttgtttgatcactgctaagtaatagcatacctaggatctcaggtggtcggtcaacagagagttttagctctactgaacacttattctgcctaatctaaatattcttttgggtaggaaaggacgaaggggaaataatcttcagatgggtcattttaagacacattggaattacctggattctaaaacatactaatgtgaagaccccacctggctgcaattgaatcagaacctctgggggtttcctaaagtgccctgggagattttaaagtatagccagggttaacaacagctgtgaaacctttcttatatgttgggttctcgacttccctgtgtagctctgttagatatgagagaacaaacagctcccggaatcctgcagatgatagttggtgagcatgtggctggtggggtgtagggggcaggattaaaccttaacttgccgcggtggagtttttctttaagggagtcgagctgcccttttttggaggggatataaaatgtcaatgaaggggaataattccttagtaaaatttggagaaatagattttatatgtgaaaatgacagtctgccctatgtgtctttttttgatctaggtaaaggtaaaaattatgtcaattaaaaaaaaaaaaggccctgggttggttatttggagccttaatcccccttgattaatcattactgtgcagctcctagtccctgtagttcctggcgagtccctgggctcttgtccatccctcacaagagaaactatataggtgtacccatggcattctgcagcatgaaggaggagcctccctaggaaaaattgtctttagaaagaattagtttggcagaggcactagcactatttctagagagaggtgattggatgtttcactttgctaaatgagtgtagtaaaaacgctgtttactcacagaagattataaatcggcacttgccagacaggtgtctgtttgtaagggtgatttatgcggggaggatgtgaaccatctggtgatgctccagtgctccgcccgagggtgggctgacatctgggttggcacgtcatgacctttgcgtgaatgtgtactttctgaatgctagagcattttcctcttgccatgctgaccttcgcggtaaagaggaatgaacattgaactcctgaggcatctataaaacatattttattggctgcaaagcagtaacatgaagatttcagtcgttacttgtttgtaaccttagttatgcagtgtgtactcattttctcctcaactggactgcamaaattattagaggttgtcattcccatttatttttttaggtcattttttttttctcttccacattgacaaggatgagtcttctagccaagaagcttgtgcccctcacttgtcttgagtaggcaccaaggaagagtagtgacctgaggggaaggccaagtccttggagacccctgtttagaggccggagaggcaccaacagtttggcagcagcaaagttttctcaagctgtccctatcttgattgtgacacaattgttaacacatatacctttgacaggcagttttatttacgtattctaaatgggaggygtagtagaaatgaactttaatattctttggggagagaaaatctacagccttttttttttggaacattcagtactcagtaatatttaccaagtgaagaataagagaggtttcctttcctacagcataattagccagatcttacccatcttcattgttaggaaaaaaagtattgttgaaaaagattttaaaatagttaaatagcccttttgtcctaaggaatagctgccgggtatgaatgctacccggaggggtctggaagcaagagagtgaaatagtgcgagagaaacaggcacatagccacatagcaagcgttctactgggctccttactgggaagttggtgagatgtgtggcctctgtggcagtggccctgacctgtcctcatcattactggttgccagacagtaaagtaagacaaggtggaggatggcttagaagataccaccaaaataacagggcttgataaagctgtccccagatacagtttggcaactctcagggccgtcattcctgggaacaacagggaccacgggatctattagttatgttccaaaatggcacttaaaacctttccacaccaggtcacacatggaaaatgatataattgtctagataacatgaggagattgcttggggccagaggccccagccagctgtggcaggggttggagggtggagggggagggggttgcggggacccacgccttggcaggccatttggcagtaatacttggcagtaaccattagtgctgtgctggggcgtgtttgtcaggaggttgtgcttcaaaaggtggtagagagaagaatggaggaacaaggaaaggtacagtaagctgcagagtgctgtgtatctgtcactatcgaggggatgccctttgcaccatgattctcactttagtggtgagttgaatcttggcctcaaggcatgtcatggagctgtggccactgtggaaacaacaccagcagacagcttagcctgtatatggatggagcgtctcagcagggagaggaacagttgagcatctaccttcacaagagggctgcttttctacatagagaggactgttagtccagccttaggcttttctgctgtatctaaacagagcagcccattggggtcatgtttgaaaacagcaacaacagagtatcaagtaggtacagaggctgaattccctgaatttctgtgcagaagttcacaccagagacctggacactagttggggagctggcctgtggagaccaagagctgcaacttgagagtcatgagttctgattcgggtctgcacctctgcttggttgaagtgttaaatgtgtccagaagactgtgttttctcctcttttttctgtaaaaagtgcgtgaaatcttgtctgcttgatttcttgtatgtcttttcgggaccagggcaagtacttttcgcatgactgacatggtaagtaaaacctgtatggatcttgggaagagctcttggtctgaatgattcagtttttgctattttgctgttgatttgattatttatgtgagaaagatctgtgctgttcctgaaaatttgctaataaatccattaaaatatcccccccgccgccccccgtcaaaacaccctaacaagaaactatcctattttagagggcacgtttactttttcccatctcttatttgaaatgttcttttcaacattccctgctttgcttttttgaatatcatgttttagttttttatttttattttggttcactctggctttggtttaattacccttttaaatggaaacatgtaactgcaggcccagtccatcatttgtattagttttcagcactctgaacttgggtgggttgggcacgattgttttagttgctacctggataagactgttgagatcttaatctcagagtcttgaagaattctgttactgaggtagcagtgactgtttactaaagaaaataaccttcattttttcttcttgacagaggtaaaaattcagagaagaatttaagaagtcagggcaataagattaatttaaacagttatttctgtgtgtttagtattgtcactagacttaaaaagacaataaaaattttaactgataaaattacaaatcatccttgttttcctcatagagcatatcaaattcagaagaaagaagctataaactttatatctagcatgcattttgacttttaagaaaatcagttaaactctgtatctcaccgtattctctctacagtatattgaaataaagctatatgttgatttgctcatttcattaggattattatcctgatgttttaaaaggtttttaaagctcctgaagcaagatgttataaaaatgcaaaaaacttcataaccaaaaaagtctgggaaagttagtttgtatgctaataacacctcatatttgcatagctctttcatccctgcaagaccacctttaacatcagcttagtgggctctcacaatgctcccgttcggtggacatcatcagtggcctccattttgcaggtgaaaaagttgaggcccatgtaaaatacacgtggtcacactagactttggcaaggttgggctttggactcagatctgctggttactctccacgccacttgggtaccttctcacattttatacgtgtaaattgggaaggtagcaattcatttctctctcacttcaaaaatagaaactcagtatcatcaaaagataatcttggagtggcactgtttgaggtggtgaattgtttgctagttgagaaaccaaagagttgtttttcttctgtgaaaggaactgaagtttaacgccttgattgtgtgttgctggcccactgttacttagaaaaattaactgctccactgcttattttgataaggcagagcagctgtttgtccttgaagtttcaaaaaattatatttatgcactaaatttatttggcaagtcagacctgtttgttccaataaagcaacagtatctcccctggccattctggaagccacctgttgctttcaagagttacatggaaggggctgctcctgagatattaaagactcttcasaatgtgggggccacatactggagccatgtgacccagtggggagctggtgctgatgaggtcaaggtctcaggctgtcctcctttgtgtagggagctttgcagagagcaggactccactccatagtccaagtctgcatcctcgacttgggcagtgcccacacaaatgggcaactgttggcaagggcatctatgtatgtccatcctgtcaccaccccctcaccgtccttagcatatagtcttaccacttgtgtcttagagaaaccctttagcctttgtcttgagacctgtacactggtcctcctctgttaattaacaggcagggagctgcctctcctccagttgtccctgtactctggatcgcatcctctccctcctgtgtctttaacttctctgtctgtgccgtgtttcccccatcagcctgtaagcattctcacgttctaaaaaacaagaaaggtagcagtagcctctctctagccttctcagctctctcttcagctacctcctaaactctcttctccctgttttcagctgtatctaaagagtgtctgtgatctctttctgcatttgctttccttccattcacccctccaccctgccccgcttgtgaagatcatcagggctgtctgtgccacacagtgaataggtctccttctctcattccatgcctcattctggacaacttgttccatagccatagctgcagttacccatggattcactggtgactctcacattgatgtttccagctcagatttgccctctgagcccagacactgctgtctgctctgcatcccctctagcatgcccccagccatctcactacaatgtattcacatccaaccttccctgtcttatcctgccccctcctcctatctggtccttttctgaagttatttagtttggcagatgacaccactatccattctcctttatggccattgaatcggactggatgaaagagagagtattttttttaaggagttggcaaggttaagaaattacagcaaggtcttctttcataagagagtgcatttacctttttgaagagaaatgatcagttctgataggggctgctattaaaattaaacaattgygtgatttccatgcatttacctttttctaagagaaatgatcagttctgatacatgctgctattaaaattaaacaagtgcatgatttctatagcaagaacatgggctgaactgaattaaagtgatttaactcttaagtgtaactttctctctaaaatgctttggggccaggcacggtggctcatgcctgtaatcccagcactttaggatgccaaggcaggtagatcactgaaggtcaggggtttgagaccagcctggccaacatggtgaaaccctgtctctattagaaatacaaaagttagctgggcatggtgatgcgtgcctgtaatcccagctactcaggaggctgaggcaggagaatcgcttgaacccaggaggcagaggttatagtgagctgagatcatgccactgcactccagcctggtaaacagagctacactscatctcaaaaaaaaaaaaaaaaaaatgcagtgcgkgtgtgtgtgtgtgtgtgtgtgtgtgcgcatgtgcatgctttggaaggaatcatacaagtatgtaggtgttagtctgcctctaccctcaaccttcattaatctttgagtctcttaccatcatttgccatgcactggttcatttgaaatacaaagcaaatgtaattgggatctggctcagaagcatttgtttttcgtaggaaaggtcttataagttaggaattgggcatatttgcatgccagagagggacgatttttaagtattttgaaaaggagtattcaggtgaagcaattattttcttttaaggtttaatttcaactgtgatcatctttagactgggatatcagttcttatcctggtatccatgattaataattttttcccattgacttttcttgttattttgaagtttatttgaaaaaaattattttttatgccaaagatgttactaaggtattttgctgcaggcgaatattgggtaggatgcattgatactatgcgtggtctgtaagttgctatgggggtgactttcatgttatggaactgatttagttcctgttcgacaggcactgaaacaggcctgtcctgccatgtggtcacagatatctgtctcttatattggaaaaatactaagaaagcaaagtacactggagctcctgcccttaaattttactttcattgctcaatatgataaggcacaaaagcccctgtgctggttttacagcaaggttcttgccagtgaaagtgtggaatcggtaggagttctgatgtgcccagcagtgggtgctcagatgtatgacaggacagagccccaacggttcagcaaagtcatgtgttatatggtcaagtgggagaagtcacacctaactggagaaaccctgtgaagctttatttttgggaaatgatcaggttggttttgtggctgagtgtagaaggaaaggtttgaagcagtttctggaacatggtatcatacacactcaaggttgctgacatttcttctaatattcttaagcaggttttggcagacaggtcccttcagcctgcacctgggtgagcccactggcattcttcattacaatcacatgttagttttcgttgattatgtgcatgtggagactatcaaaaaaattcagcttttgtgatcttttttcagaagtacagtggcaatggatatctttgaactctaacattgtgatggtaagaaaactttagtcctgtgaaggaggagcacctagatgttgggtagctaatctggctttgctgttttggtgaaaaaagtcccatgtgttgtgggaacttggagctttctacatccctgcttagttttgtcaagtctgctggccagtaatcctgaaaaacatttgatgcgttgactgcccgcacagttgtcaatttggccagagtcagaaacatgaatttcactccttaaccttttcaagagatcttgacaaaaaaaaaaagcaaactttggagttcattttgttaacacttacgtttactggttttctagagaaccggtttggggtatgtgtgtgtggcgggggtgtggagagaatgcttgtgttttaaaaaagggaaaactgttttcacagggaggagtttactggtgggttggcttatttggtggctctcagccctttgaatgaggcctgtctttcaattcaaggctttgccatcaacatgatgtgtatgctgctgaaaaagtaggaatgcttttacccagctgccatcctggaagcacagcctggaagcagacaaccaagtgcatctgctggccagtcaggaattgatatggtttggctgtgtccccacccaaatttcatcttgaattgtagttcccgtaatccctacatgtcatgggagggacctggtgggaggtaattgaatcatgggggcggttacctccatgctgttctcatgatagtgagtgagttctcatgagatctgatggttttataaggggctttccctcaccttagctctgtacttctccttgctgctgccatgtaaagaagaatgtgtttgcttccccttctgccatgattgtaagtttcctgaggccttcccagccctgcagaactgtgagtcaattaaacctctttcttttatgaattatctagtctcaggtatttcttcatagcagcgtgggaaaagactaatacaggaatggtacagctctggcagtctttttgcaagcagaagcctgtatactccaggagaaactagagaatgcttttgaggattatttttgttgtgacagtcccattaaaatgtggactgaatcctctccttcatgacacagacagcatcagtggtgctgtccttgccacagaaggccccagggtgtgtgggcacagcgagtgatgcaagtgatgtaaccagaagaggttttgggggattttcacacttctttacacatgctatcctagcctggcagagtggtctgtgattccccactcagtactacctctctgtcttttatccttaaaagaaaaactggaagtcaaagctgattggctgtcaaacaccaggctccagtttcaacctctgtatcaaaccaaaatagcagccttctaatggaaattttcttttagtataaaatgtactttcttttttatctgtgcaatttacattcattttaattttttggaaagcagccagttgatttttgcatttaaatgagagtgagaagtataattatttacacaaatttaaaattttctatgtaaaggaaataaatttccaatgatgaaattgtataccaaaaaattaattgcaaaattttgtaggcatgtgcatatgtttctgagaggttttcatcaaattttcaaagggatctgaaattaaacaaacagccaaacaactgattcagagcaagcttctgctgttgcagcagctctagctcactgtttagacctcctcagaatagcgacagcatacagggagcctattagttgtgtaccccaatctttggtgagcctggagggaggtaattgagagggaggcaggggccctgaaaatggagtaggtgttgatgagtgcccataactctccaggcccagccagggcaccattaaccatcttctgctttggcaagaatartccagatccacctggagaggcttttgggctagggaggactttatatgcagcaggactgcattaatgactttcargcccttttcctttgtaggctccttcctccataaaaaaaaaaaattgaaaattatattttatgactgtgttggtcagatctgttaatattatatattaaaacgttttatctgagctaaaggtccttttttcccttctgattttaaaagaaattaaaacatttgtgtgagcccctaaaaatattgtggggctgtaagcattgtgcctgttgtacccagtgaataagttggccctgaggtgtgcagatcatctcttgattttttttctaaaatgtataaggaagatgtggaatatacaagcgaatatgttctttttactctcaatctattatttttgaataaagttgagagaaggcattaagcatattattaatttacatttcaaagaaacaattttgaattcgttaatgtggaacttatatttttgatatagatttcttgtattgttaatttttgcaaagataataattttcaaaattttaatcaaatttcagtttttaaaactaaaattttactgtattaatatcagtaatgaatattctacagagtttgaaaagatttactcttctgagtgtattygcaatgaaaaatattttaagcattctttccagtttattttgtgaatatatgtaatactttttacataataaattattttctaaaataaagcttcataaattagttttatgtaataacttgtatgtcttttcctgattctgagaagttttctatgaattctttgagtaaaaatctattttaaaagataacaggcaataatttgtgactaggaaatttcagagtggccaggaaaaacatgctaaaaatagaaactgtttgtttactctgtgctccacccagtctaaaacacagccatgtggttgcagacttggggaaggccctgtggtaacttggaaggtgttttttccccsctgagttgcagagtttaagagatcattcttataacttctgaatcctgtttcctttctttagcaactcagataaattatttttgcaagctgttatctgaaaatgagtttgaccatgttcgtttagtttttagtgtcttatcatcctcctttctacttatatatttaatttaagccctgtttcatgaaaggaaattttgagattggaggttttactaataacttatacctcaaaatttgtcagtttatagtttaaactttccggtgtttttcatgatagtctaaaaaaatagccacttatttgttcattttgttacaaaaggggctagattatgaatttagttcttgggtaggcttatcacctaggaacaacacaactttataggactgaatgttaaccagacaagcctgtgatttgtgwgcacagataacagaaaccataaccaccagaaaggcagcccagtgataccagtgttgggtcagccacacattttattagtcagatgcttggagcacctaccactattcaggactccttgcccaaatgctgttgctttgttaactctgtgctaaggtgttagggcattatgatgcccagttccccagagcactccattaggggcttaggctttggagtaagctggctggtgtgagtcagactggggggtcacctattggccttagtttccttatctctaaaatgtatataatgatgagattagtttcattgggtttttgagagaattaattgaagtcatgcaagtaaagcacagctttcaataattattagcaattttttttttggtattaaygtacagcataacaaaagtctagatttacttcaggagttgtgcccttgaagtagaatttggttgtttgctttacctgccttcataatgactgcacgaaagaaataaatatcaattcatttcattgtattcaatttgttttatttcaaaacaagttaaatgaatctttaatttttttttattccaatgatatgtattcatgtcaatattttattccagatgatgtttaagcaaatataagtgaaaatactgtgtgrgctgatttgatactgtttgtcattcctattgtatgtttgactccctacctccctttcgtgggttttctgtctctctatttaaactttttattatgggaaatggacacaaatagagagaatagtatgataaactcttatatacccatctcccaccttcagcagttatcagctcatggctaatattgtttcctctgcattcctatccacttatccccatcctgtgttattttaaagcaaattccagacaccgtattatccataaacatatttttaccatccacaatattattatatctgtaaaataataataattcctcaatatcatcaactatcaacagtgttccaattatttttaagaggcatagctttaaaaaaattagtttgtttaatttagggtccagttaagatcccatacgtttcaatggttgacgtgtctcttttttcttttaatgtaccctagtcagttcctcattgtctgtgggcaggaggatataacatccctggattagctgagagctattagtagctaacactaagggcagttgcagggatttggacagggcacccaccacatccactgcttgggggaggtggtggataatcttcaggcacagggaacagcataagccgggacccgtgaatgcacagcacagcatgtttggtggagtgacaaaggttggcagtctgggaggtgggcagctcaggttggggtgttggggattgaggctgtgttccaggtggtttattatacatttttggtgctgggcttaaaaatagcttgtttattcagatgaagatgaaattaataaaagtgtgatatgagtagagactattggaaatatataatgtatcaacatacatttattttctgaagatgtgtaatttggaaaattatggtagtatgtgagaagcatcgtgacatcttaagttaactagatatctggaacaaagtatgcttcagccttctttctattttttcccgtattataaaagtagtgttagtatatgatgacatcccagagggcagaccatggttatcagtgtgtctcaggagtaatatagaagagcttatgttatctgcctgctgcacatatgtaaaagaaatattttgcttattcaagagagcagtgttttaatgttttttctagtacatttaaaatatttgaaattgttatccttgttttgagtttcagttcttggtgtggtaacttaaaatgtacactctcaatatacaggtttttgctgttacttaatagcaaggacctgtgttcaaattttagctctgccacttactgtttgttgagcagattgcatatcttcttgtagcttcctcatctaggaaaaggaaataataatagtgttcctacagaggactgctgtgctgattaaatgagagtgaatctattacatttagcacagggtttggcacaccaaagcacccaatggttttagatatcgctatttttactattagtgttttcttattaaatatatttcaggatcattgatttaaggtacactaagcagataatgactaaggtatcaagaggattgggaacaagaatattaacttgtatgtgtcctgggattgaaatttgcacactgcaacccagatattcttttattaatatattctgtaacttcctttctattctataactgatataatatttctctggagtcctatttctgttcagcaaaagccagagagatatcaaaaataattctgtcttttttggtttaaaacaacctccattagcttaaacgccatcttttttgaataattcagaaatttaaagatcgggatggtttcttcctacgttaaaggctcttcccttcccattcctaggaaacaatattggtctgactgattaccattattgttatttggctatggcccactatgatcacatcacacacacagattctgccttctgtcaccttaccaagatgaactcgcctggatcctgcccaaagctgatctctccatccacacaaaagatctcaatccttcttccctcctcagctaattcataagcagctctccccacctctcctgtagcaccagttttcactctctactggattattcccatcagcatcaaacattctgagatttctttcatattttcttgwtgcaacttctcctgctggctactgcacaatttctttgccccctttgcagcaaaaacaatttgaagagttgtcagtgctcactgtcttcaattccttgctcctgtttttttttaaagccgctcccttcaggtcctcactgtcacttttctccaaagccactcttgtcaaggtcaccaataccctccaagttcctaaatccctcaagtcagtttgcagtcctccccttacttcacccgtcagtagtgtttggcatggctgatcattccccttcttggcacacttacttcgcttggcttccagggctccctactctcccagttctcctcctgtctcacgcatcagtcttttcagtccccttttctgtttgcttctcttctgtttgcttgcagcattggagtgatcccagccttctttctatctgttcacactatcctgatattctcatcccgtcttgtggctttaagtgtcatttatatgccaaccactcccaaatatacatctctaccccgactctcttctatgatccaagcatatatgtcctactagatttttccactatatcctactagatctttcacttttcatatctgaaacacaacccccccttttccccacccagcctgctccatctgtagccttctttcttagtttgataatatcctttcagttgctcaggccttggagtcatccttgactcctttcttatctcatgtactacatcaagtctatcaacaaacactttggttttatcttcgagatataactagtgatagtgtgctgtaagtattattcccaatgtagaatttgtaatggggccaggcacggtggctcaccctgtaatcccagcactttgggaggcgaaggtgggtggatcacttgaggccaggagttcgagaccaacctggccaacatggtgaaaccccatctcaacccaaaatacaaaaattagctgggcgtggtggcatgtgcctataatcccagctactccggaggctgaggcaggagaatcacttgaacccggggggcggaggttgtagtgagccgagatagcgccactgtattccagcctgggccacagagcaagactctgtctcaaaaaaaaaaaaaaaaaaaaagtaatgagcacagctctgatttgaatacaggtctgtcaggctccaaagttttctccatagttttgcattaatatattcttaattttatatttgcaaagttatttttattttaatatcatagcttagtgggagagtagggacactatttaaaactaaggagcagacaaagaatactccagagtatctttagaatttacttagtttgtctccctagttctaggaaatctgaatctaactcatatattagattatattttctttggaacaaacccagatctttaagaaagaggagttcagtgcctcctttcccaattagctaatcatctataagcttcacttttgtcatacaaaggtgctggactcccagagttcatgcagtcacaactcaaatggtgaagaggaaacctgaactgtctctagttatttttaggtgttcctgataatcaattttcatgcaaaatacaaatgatcatttatttgtccctttgttttcatgaatacaggctgagcatctgtaattcaaatatccaaaatgttccaaaatctgaaactttttgggtaccaacatgatrccacaagtggaaaattccataccctaacagcacctttgctttcagtgtacataaactttgtttcgtacacaaaattattaacaatattgtataaaattaccttcaggctatatgtataagatgtatatgaaacataaatgaatttcttgtatagacttggattctatccctaagatgtctcattaggtatatgcaaatattccaaaatcccaaaaaaatctgaaacgcttctggttccaagcattccagagaagggatacttaatatgtagtagtatatggatgccttgcctcatagtcaccctccccagtggtttaatgcaaccattaaattatttttgttttaaaatatttgatctgggtttgaatttatggaaatacttcacgtcagtttttttttttaaatagccaaatagtgtttcaaaattttatcaagattgtgattggtctttaaccttagaagcaaaactgacatggaaggatgaaacaagtaggtagaatggtgaattttggtattcatgtgtttggacatctgtgtccttatcaaaagaaagaatgtatatagttggacaaaattgaaggtccatgtggtatatttagaaaatattacttgttagtggtttaacatgtgtatagtggttttacttcaagcactttcaaagatttgagtttgtttctgcccttgtaacacttcaacagtcatattagtttgctttaccatttttctttgaagggaactgagactgattcagttgtgcaaggtgatgagcaacattgctcaaaaagccagaaatagatttgtgggcttctgactgtgagaccaggtgctctctccactgaattattctgctttctttgactgttttctttgctttaaaaaatattaatgcacaattctgaattgctgttgactgtgagataaattcatgttagatctataaataatgcactttccaaccaaaccagccaatggaacaaaacgctttttgagacattggtgttggaagatggcctcctcccaccagctgactgtattctcatcatcccccacatctgtcccattgtttctgatgctggtaccaggctcctgtctccaacacatgcttagataattacaagaattaacctcccttccttctgttcttctccctttcccccaaatcctttttcacagtttccagattagttctcctacagcactactttgtgaaattctctcaacatgttctatgataccctttgctctgaggctgaagccctaaccttcctcttggtttccaggacctcccatgtatcatcagtactactctagcatcttcttctgcttctcaccaacctccgtcttggccagactgggcctcgcaaactgacattacttcacctctcttgtagtcttgtaatctgtaccctattccagaattactctccctctccttttggttagcaagcccagctttcctctagggacttttcttacccattcgctggaaatttggttgtaggtgtgccctgtatcttttatctagtaagactcttctgtgggtttactaattttcatttagaaagaggatcactacctaatgatgtaaggtgtggtgtaaaatttttctcaattatattttcagattattgctgggattctgttatgattagtaagcaaacgaattaatattttaatggttgactgccttctgatatgtttacctcaaattatatcattttaaattatagatttaaattttaagaaaaacaaatatttacatttagtcaaagattttgtgaaatgaccttgttttgagaaagagaaatgaagtccaattactgaatagaatatgaatatataaatatatttatgtatgtgtatatatgtaaaaaatagctgtyatgtagtcattatttttgtgacagtgtattgctaaaaaratcttcataataattttgaatagaacactgggggtgctagatttagaaattaatgattttatggaagaaagatctgcctgtaaattttgctcctattatgaataaaagggagacccttatttcagattatcgaaatacagggactgtagcattaatgtaacacccactataatgtgtttcttttaaaaatgttttcttcaacaccctgtgatatatgacttgccagattctctgatcctggggccctttagcagccatgctatgtgttgtcataatgttttaaatttgtggctctaaaatgcaattcagttgtgtttagccagtgttgatctttttctttyttcttaatttgggactttcagtgtatgccattacttatgagaagtgctttagttatgagttgtggagagagaaagtagttggagagaaaattaaggtaactctaacatagatcttaatatagtctataaagttttcatgaggataatacagtgagttttatatgtggagaaatatatagaacagtgagtggaggaattagggagcaacatattcaatttaattgtcttaaacactaatatgatctaagagaaagatcataagaaagttgtcaagttttctaaaagaaagaaagttttcaaaagatgtatttctcaaattcatctgtcattaaaattagtatgttgaattggattctcagcttataaattaaaatataagtgttcttacatgataaactgaatttaaatttccaggtttttttttttctcttggtggtccaatttcattgtattaaaatatgtaggtatctatctttttgcgtagatttggtaaactttggttttcatgaagttaaaatgaatgattaaaaatttgtatagaatttgttagcgtcttcttgttacaggatttagggggtatgtgtgatttaaagattaattcataaaatatttctttatttattttatgtattttttattgtttttagagacagggtctcactctgtcacccaggctggagtgcagtggcatgaacatagcagcctcagcctcctagactcaagtgaccctccctcctcagcctcctgagttgctgagacatacagtcaaatgccacaatgtccagctaatttttaaatttttctgtagacaagagatcttgcagtgttgcccaggctggtcttgaacacctatcctcaagtgatccttccacctcagctacccaaagtgctgggattataggcatgagccactgcctctggcctaaaatatttgtataaattgaaagacaatacttttgagtttaaggaaatgaagatttgatctgctttaaagctgtcttagtagacggatgttggaacaaatcaattaaaacatatcttttataatgtggtaaaacaaaattaacataagctgagcaatgcataacattagtgaacattcttctcgctatgaggttcatgcttttgataaaggtmtagaagttgcttcagacgtcattgaaatttttatatttattctcaccttgcctatttatttatttaccttgcagtcttttttatttttaaggtgagagattctgggtactaatatacacacattcactgtacactgatatttagccaaaccatgaaatagaaaaagctggcatatatttactgttagaatctttgaaatttttcagtgtatatttcctgttatagttattcatgctccataattcatgggttttcttggcactggcaacagttacttccctgtggtttagatatatttttttgtagtataggtaggtttctttgctgctctcatatttttccttttaattttattatttttttcctcttcttattcagatagtgtttcatctctgtcattaggaaactacttctcattgatttattctgtttatgcagtttttccttccaaattcatcaactgaactatgggaaactttgtttcttaaaaggttattttgacattatttgggtcaggccaggtttcacatagggaaaaggacaatgcttctgctttgccttcccatccaccactaacagctttgtgaaaggagakagaagtagaaggaaaggatagagagagaaggagggacgcctcattcagcttacatttcagaagcagggaatgcaataaataacatgaagaaagtccaggctcaactcgctcacacctcaggaggtgattcacgagcatgtaacacagcctgctaaggtttccattattcataattaattaaatcaaagcatgcttagtaagggcccataatcttaaaaagcattctgtgttttcatctgactaaaagtttttccttcgcttgttgcagacgacagccgactttaatattatagcaccagcacggtacagttgactcagtaaacctgccacactgtggaacagaggtttggggaagaatgtggaatgtgaaatataagaytattcagccccttaaaacaatgactatccaaatatgttgcttttgagctggtagtttctcacttattttgtttaaaaaaatataacatcctttgttgggttataggtttcactgaggcagatgggtttctgtagtgaattagtccctgcatctactgagagtatcctccctccagcattaaagaaggaaaataagaaaatggcccatagcatagaggaatggtcaggtgggaagtagcttctccttaaattatttctgatggaaaaaatatattctggagcttggcatttgagttcaatattgccaaaactccaggaataactttctgccaagagcacccagtatgtcaaagaaaatattctaaaagaagtaaattaataccatccatgtaaagaatcagtggcattgtggcatcaaatgagtgtgcttcatataatgctatsatctttttaattaagaggaaaagtccaaataattgatgatgaacatttacaattactttgatatcaattacttaaagagacctaaaccataaatatattacagaattttgaaagataaaagataaagatagttaaaatccttgatttttcctctttggtattcaaggctgtatggttacttatatctttggcttccttctctcttttgtgatygtacattatccatgtgtcatcctgtacctcaaagggtggaggaacaacttatgtgttctttatctccccacctccccttgcctgtgttctttgtcrtacgagcccctgggagactcatagtttcctcagtrggttgcctggcagtaactggagaatgagatagctatgctataaaaggctcttccttccctggcccagccttttcctggtacttagcccctttctgtccttcacatccggatgtacataggacacggtcccattttgttaaggacacacatcctctgtgtaacagtgtattcctcttcctttcaattagagtcatgtctgaaggatctttttagctttctgggctatctggttacctaaccaataaattagaataattagtcctattactaggttcagcagtaatgtagagtcttaacagcttttgttttaggtcaaaacatgctcatttggttacctacaaactatataacaaaccacctcaaacttagtggcatagaacagtgaccattttattatgatcatgaattctgtgggttgacagtttgaacaggacacatcagaaatgtcttgtctctgctctctgatgtctggggcttcaactagctgtggggattctgatgactagaagctggagggttcacttccaggatggcttccatactcacatgttgggtacctttgcagggatagcaggamtgttgggctcagctgagagtgtcagccagagtgtctatgtgtagcctctccactcatgatagttccagatagttggatgttccccagagtaagcctcccaggagaactagataaaagctgcatggcctcttctgacctaagcttagaagttacactgagtcactttgactgcattcttttagttacaagtgattcatagaccagcactgattcagagagatggaaatgagaccccactccttgrtgggggagtggcaggtgcacactgaagaggatcatgtaggatgcaatattgtggtggtcatcttgggaacttatgcaaaagggaaactcagtcatcttgatgttttgattccataatgccagacttctattttcttatgtgaatcattcaaatgtctcattatttgaaaatttgatattatgtagaaaaaatttggatgagtacgtgaatatycccctttttacctatgtatattaccatctgacagataacttttgcatgactgaatcaaaggagcactgttcaacacagtcttggttcatacccttaatctgagaaactaaagtaaggctrtaagattgtgccaggttattataaggaagaacagattatcactgtgaactttacagtcagcaaggcatttaaaccaggaagacaaaaggagagagatgttaaaacaatagatagtttttgtgctttatatgaaaatctcattttttaagtagctggttattgaaaaattatatatttatgacagagaagactttaactattaatcacaaaattcaatttgtgtctcagtgataaagcgatttcctccttttctcctatttatgatagatttttatgtatgaaaatgcaattaatttcaaagaataataggtgagtctgggaaccaaataggaaaatagtctctttatgcaatgtatggaaagtcccctaatgttaatggctatactggctctaaatagtatgccacagagagatgcattttggggtttgaacaatagcttcatattaccgtaatagttaaggtgatgggaaagaattatgttccacaggatgtagaattaccataactttatgtgttgaaggaaaaaggctaagccagtataatgacctgggcaaggacttgactttgctgggtctcagtttcttcatctataaagggctgaaacctcacctagttatataattctttgattttgttgctctttgtgctcacatagcactggaataaagcagtcaaagttaatgttaaatataggagtacaaaggtcattcagctaagtttcagaaagttaataaatcctaatcactttacacttgacagcatgtataaacttgtatccactaatcccaaaagttaaatagaagtacttcaggaaaactctggattaaataaattatttaaaaatatatggacatcattcttaaacttagagcagttgttaaccataatacttcgttgtgaaatagtttaattaaaatttttagttttatttgtttgaaccaaaaaactgaattcactcatttggagccaaaatttaaattactaaataataatttaataggaaatagtacagttgaatttctgaaacttgttcttctgagtttaatagtgcctttatatactagctagtttgaagtctaggcactgcattatttttgtactatttagttataaggtattaggaatttgtccatttcgcctacattttcaaatttattagcataatgttcatcaaattatctcgcctttttacaacccactgcatatgtagttttgttcctcttttccttactagaattgtttgtccttttttactgatcaggtatgccagagatttatcagtttcataatctttttaagcattaatttgtggctttgttgattttatgtattgttctattgtatcccttttcggtttcattaatttctgatgttatctttattatttccattatccttatttctttactttttctttctttgggtttattctttttgctatttttctgacttttaaagttgtgtgcttagctctttaatatttagccttccactagcttgtgaattctgcagcctatatagttggcctacagaaaaagtatactccttatgactggccttttttggagtctggttgaggggacacctgttttcttggaggtgcttccctcaragtgaggaagagtcacctgaggtattggcacatgcataagtgttcttcttgggaatcctcattgcaaagattctgtgaacatggacttctgaaatggtattttctgtaagctgtggggtcagaattaacaaagcaattgaaaattcactcaggcaaattatagaataatgaatatccatatatataccacatatatggcatctgtctaaaacttaatcaccagagtataatcttgtcaaccccaattttattttcctgactgcctctgagagtagaaatcagtgaggcaaatatcctgtgtgtttttacacaaattgaaattatttttccataatattttgttaatggtactgtttgtgtttgtagttgagttactttgacctctgaagcatcttccacactgttgcatgtaaatggaacaataggtacttgagtcacttgatcatggattccagattctggaacagcctctttagaaggcaacagaggatattatttactgatttgagtggctttagaatatcatttaactttttaaaattatatttattagatatgatcttaatctttatatatttttcttttatagatgatataataaggcattattagtattgtataattctcaagggtattccacataaatatttaaagttaatttataaaagttaattttattgcttactatgattatatgataaattctcacttattgagaatctgaactggaaaggtcaaccaaaaatttaaaagcagatatataaattagggcgagagataacgagagcaagtgctttgagccctgtgagtggctattacacactagcatggctattgatgaggatggagagggcctttagggagggcatacttaaagaatgcaggagtgaaaatgcttgtatggtgttttaattcattttaaaactatattttcttctcatttaaccataggccactcagttcctcaaatactgtgaataaataggattttattggattgataaccactgtattacaaccactactacgtgagaatacaagaaaacagtttgaatactaatttctcgcaccaaatcataatctataaatgtgttttggtaattccacatttatagctttcctttatttttgtcctttaaaggaagtttggtgtggtaatggccattaaaattatttctcatttcaatgaaagtttgaattaggaattttatgcagatgaacaaaacagattaaggccattttttgaaaaggtgcttaacattttgactgaaaagcatctttaaacattacaagttttattttatttgtgggcctagctcatatggtaagttttcctaagggcatggagcaaagctctcagcttcttaagtgtgtttatagcaacaaatacatgctacatggtagggagagagctagtcagatattttagtcatatatttttaaaatggactgttccagaataaggttgcctttgaaaagagtctttcaaataattagtgtcaagtagattattttagttttaatttaatcatctgtttcatcatataagaaagctttcaatatcgtgaccaagggattggggcggtctgatgtattggaaatgtgacttacttgctccagacactttgagaaagtgtgaattggtgaatctcacatccattcttggcaagctgatagagtatctaggaaagggtaagattattgaacacatgagctgagaataatcttttgaggaaaacagtatctggattttcctaaaaggggatcttatttcaacagaccttcagcattcttcaaaagctaggtgaggatgtgaatgagaaaaacaggagatgtactgctccctgtatattgcaacaatgtgaaatagaagtatggcagactttgagggaacaagattctaaattcccagaatatcactaatttattttcatataccagtgcagaatttttttctgaagacaggtgtaaatcattttaacatgatctttataaccaccacctttctattaatcaggcaatcatcaagaaagaatttgattgtgaagggtccagattgaactgttctttaagtaaggacacaggaaatattaagataactgtatggaaaaatctcatccaagaaactggaagctatgggaaaaagaaaattaaagattctttgattttagtaggttggttgagttatacatatttttagcagagcaaaaaaagagagaaaaaagttgcatgcaactatttaaaaagaatgtgatacaacaaaagctatttttaatctatgtcagggtaggaggaaaatttatactttttaatagttatgaacttttaaaattcgtatgaagcagaatctttactgctagaagaatttggctctgcagtttttgttatgttaaaacttattcaggaagaatttcagtattcagaattcagcactctgatttagagttttaataggaatgctaagtcaaacctattttaagcatattacctccctcaaagctttaaaacaattctgaaattttataaaggtctaaaattggtaactttaaagatttaaaatcacttcatgcttttctaactggatggaactttctttgatgcattgtgtctcaactctcatgaaagattacttcctttctcaaaagaaatcattcctaagatctcgtaattccaccatatatagctatggaggaggccaaattagggaaatatgtcttcctatgcatgtatgcatttgtactcttcctatgcatgtatgcatttatactcttcctatgcatgtatgcatttttaacagagggcttagaaacaatattaggtgctgttgaagatatcctgtatgggatatttctgtcagtattgtaccaaatatcataattgggaatgagcaaatgaaactctacctgtgaatgggcatagaatactttcctagcccatagtaataaaaataaaaatattattaagaaaaaatatattaagaaaaaaataatgttagagacagctaaatataccacctcaaaagagggtaaagtacagggtttaataaaagacaacccttccctcacccaccctccatcaaggcatccattaataccttggagaaacagaaaagcttctgaaggcaaaatagtgcatatgaaaccttgatttccctatcaatacttactgtaaaggtgaaaaaaaggattcatttgagaaaacaataacccctctataatacatatttaaaatatagcaacctctttctaagaatgaatttaaaagatcactaagtataataaaatatttttaagtgtcaaaataagctcggctcccccacaaccaccaaccagccattaaaatgtgatttgtgttggaatacctgaccagagtgactcagactctacaacatctagggtaggggtctcagtcttttgtctcctgttggagggataagggagagctcagtccataacagtggctgttcaccaccctggtgatttgagagtggaggtgggggcaggcagctggttagctggagggcaggtatcacatcaggtgatctagcagtgaggagaggggaagacgagggaggttgcagcacagctgcaaaaggagcaagagagcaatgacagcagaaggctgaagaccagtgagagtggccagggttgcacaggcagaggcttggatttctgcctgccatttcctcttgccctcttcagggtctttagcacagcgcccacctctcaatggacttttattgataaggaattctaytctttcagactttcactcttcttgtgtcagaaacacctgggggcatggggcttggttcatttgaccttcatacactcacataaccacttctgttagtaccacccttaattaaacattatttttcatttgtcatcagatttggggagttttcagccattatttcttcaaatattctttctgtgccttcctctcctytcattgtggaactcctattatgcatatattggcataattaatggtgtcctaccagtttcttagactactcattttccttcatttctttttctttctgctcctcagattgggtaatctcaagtgacctatcttcaagtttgctgattccttctgctgttgagcccttctagtgaaattttcttttaagttattatacttctcaactccagaatttctgtttggctccctttaaaaagtcattttgatctatttgttgatcttctctgtttggtaagacatcattctcatgatttcctttagttctttgtgcacgattccctttagctctttgagtgtatttaacatggttgattaaaaatctttgattagtacatccaatgtgtgggtttcctcaggcagtttttactagttgccttttttcctgtgtatgggcaatacttcatccctttgcataccatgtagttttgttgaaaactgtaatttttaatattataatgtggcaactctggaaatgagatttcccccactccccagggtttgttgctgcttattgtagttgttgtttttgatttggttagtgacatttctatactaattttataaagtctatattctttatcatatatgtccattgaagcttctgttccattagcttagcagtcagttagtgattgacagaaatttcctcaaacacctgggacaaaataccagaaacaactctagtctttgtacttggcttctgtgtatatgtcgaaacatattttaatactgaaccagcagtttacaactctgtcttagccttcacttcctatttgcacagaccctggaggtcagccagaggtgagagtttaggggtatctcaggtctttcctgagcatgcactcggccctagcaagttaaccttttctatatcctacagtcactctctgttggactataccagttaaaggtcattggcagagaaaatgcagagtgatagatttctcctttcactctataagggccactgccctgtttccagcagcaccatggagggtagtttaccagcattgttcagtataagtcagtgattgcaaataaccacgatagtcttaaagcaatgatttttactaggtattagagtatacctctaggtcaggattttagattttattcagcttgattccatgtgtatggaatttaaatctacagaatacaagtttgtttgttttttttttgagatggagtctcgctctgtcacccaggctggagtgcagtggcacaatctcggctcactgcaacctctgcctcacgggttcacaccattctcctgcctcagcctcccgtgtagctgggactacaggtgcctgccatcatgccccgctaattttttgtatttttagtagagacagggtttcaccatgttagccaggatggtctcaatctcctgacctcgtgatccgcccacctcagcctcccaaagtgctgggattacaggcgtgagccaccgcgcccggccagggttttttttttttttaatgtaaaatgatttaggccagtatggttaaccagcatgtacacttagaattccaaaattctgtttgcacatatatttatcttagccagttcaagttataaacatgagctctattgctcattttctttattgctgctatctaatgtttttaattttttgagatgcaattctcataccatacaatctattttttaagggcatacaatccattagttttattgtatttatagttatgcaaccattaccactatctaattgcagaacaytttcatgtctcttttcataccttgcccaatcacagttactcccagtccctggcaaccactaaattactgtctctctgaatttgccttccctaaacattttatataaatggaatcatacaatatatggccttttccaactggcttctttcacttagcataatattttaaaggttcatccatgttgcagcatgtatcaatacttcattcctttttatgtctgaawaatattccattgtatggatatgccacagtttatccattcatcagttaaagaacatgtgagttatttctaccttttggctattatggactatgctgctatgatcattagtatacaagtttttgtgtggatgtatattttaatttctctttgggtatatatctagaagtggaattgatgggttctatggtaactctatatttagttttttgaaaaactgtgagattgttttctaaagcagcccaatttgcttttaggtgacaagttcaagttcacaaagaaaaggagtgggccatattgacttatacttctataaatgaaatgtttcaaatgctgacaatttgcaaggagaatgtctgcatgaaaacagttaaaattattattttttttgatcagcctcaccagagcttctgagtattactgccatgcccatcagaattaagtcttttgctgattcttcatgataattgacatttctatttaatcagctttaagttgctctcaaacaaacaaaaaaagcccattattcataatcaaatgctccagaatcagacagatgcaagggctggctttactacttcctagcagtgtcactttgaggaataatgccttttcttgaagaaaaacttcattttcctcctctgtaaagtgggattaacagtatctacctctagatgttcctgtattagaatgaggtcatgtatgcaaaacagttgcctggcatttcctaagtgctaaataaatgttaactattgttattattattactgttatgtcattatttaaatgtaattttttgaaagataaataatgtcttaaaatactctctgaaactacttagagacaaagcctattttaatatagtgatcagatttttcatctagcaaacaaaatcatttataatcaaaaccttttttttttttgagacagagtctccctctgtctcccacgctggagtgcagtggtgcaatcttggctcactgcaggctctgcctcctggattcacgccattctcctgcttcagcctcccgagtagctgagactacaggcacccgccaccatggttggctaattttttgtatttttagtagagacggtttcactgtgttagccaggatggtctcggtctcctgaccttgtgatccacctgccttggcctcccaaagtgctaggattacagatgtaagccaccgcgcccggccacatttttttttaaggctaaggaagaacgggaagtgggtggctgaaaaaaatcaattaaaaatatttatttgctagttattcattttgtccttgatatgtatttaatttaaagcaatttatttttcttttctttcttccctgaagcaaatgtaatttgaacacagactaattttttttatagctaaagtgaaatgttaaacaaaatcgtcatcccttttagcactacctttaagttattctttacggaagaactgggtaaacccttcacagaatgtttgcaaaacacctgatgcacaatatggtgtaaactgtcacatttctctttaattttttaatagtgaccaaagtgaatatttttccagtgattgctccataatattatgctacaaatgtgttgtaaataaaagattgataataaaatacaaaaaaaaatgaaataaacaatagaagacaaatatgacaataggcaagaatggttagcaaacattctgatcaaaccttttttgttagtttaaaaggaatgcatcattgcttagtctttgttctaaatgagatgtcccattatctgtatctggggcatgaacaagtttttatggcttggtggcatcagaagtttaagagctggaagggactttggttgtaaaggttggtctagcacagggtttctcagcctgggcaccattgacaattttgcattgataattatttgttgtgggggctgttctgtgcattgtaggatgtaggctctacccactagatgtcagtagtgcagggttccccctacctgcctgtttcccccgcccccaccacacacaatgagaaccactgatctggggtttgccaaagtgtacactccatggagcaccactcatgttggaggggctgggatactccaggaaaatattctgttgtcaaataagtttgggaaacccttatttagacaacagcaaaaaattgtcagagctttcaatgtgatatctaaagtgaattgccaagaggcgaacatgcagcatgtttcagcttatttgacagcagcccgtttttcaaaggcagcttgcaggatggaacatactcccattcctgtgctccaactctcattttccaggtgaggaaattgaggtctagggaggttacatgaccagccaaaggctctgcattacctaatttcataattgctgtgtgagcatgtactgcatgctagctcctatgttaggcactggggaggcaatggtgatacacaggataggcagatggacccagtaactacaacacaatgtggttagtgctaggagggaggccctccaagaggctgagagagcatctcagaatgggcacttcattcacattgagtagatgagctgagtccatgttgtacatgttttagctgagacatctgtggaggtagaccagtttgggagaccaggcagtagaatgcctacagaggccgattttgcatttctgtgtataataattgaggcaagggactgtatgagagtcctccagggatgagaagcttagggtagaaccttggggaaatccatgtttaagggtgcaccgaggaagagcagccccagatagagaccaagaaggacataggagaaagtacagagccaggcaaagggtgcagtctgatgctgcagagaggaagctgcaacctgcagggttgagggcctgggctctggagctgagctagagtttgaatcctaactgcctagcttgcaggttgtgtgatatttgtcacctgttgtattactttgcaaaggctcaatttataaaagcagtataattgtaaagcctacttcatctacttgttgtgaagcctagctaaagtatgagaagtatggagtaccatgcttggcatataagaaatgcttagtaaatattcggtgatgctatccttattattatcaaatgacatgaggactcagaaacattcatgaatttgcttcttggaggttgtgggtgaccttggcaaaaatccatttcagcggagggacagatggtttgagagtgagtgggaagtgaaacagtagaggctgtgagtttagaaattttctcaaggttagttgtgaatgggattgggcaggggggtggtggtgattgctgcacaagagacttggaatttgagtgctggcttaaaagaacgccacaggagaggcttgagaagtttaaatgctgagggtaagatgccaggagagatgaagatggtgatgctaagcaaggagtgagagacaactaggaaagcaaggagcttgggagagaggggaggagggaatggggctcagggaggaggaaagaaactgctctgcactaggacttgtctcagagcctatagaggctaccagagttaagatttgtaggttcctgaaaatgagagtttagtggaccattttgaccttctctccataatgacaacatatttttaaatcctgaaaggcaagaaaagaggtttcccaaaaagacttctgggaaggcgggcaggaatcagagcttcctggtgaagttatcagacactctgggagttggcttggaatgcatactcaactcactttgcaatcattcttaacttttagagaaagcctcccaaatctaactttattgaacagcagccattggctctcttcctgatttctctgtgcacagatagaacttccagcatctcctccttttctgctgaccgttgatgtgctgtttttctgaccaggaatagcaaactttcctctttcccagtctcctgtactgggcaggaggatttctcaccatctccaaatcttggaggcctggggaagttgagtccttctgaaacttgaagaaaggagaatkctctctgtatcctgacataggaactatttgagtatgaagaaggtgctgcatgcatacattcaaaggaactagtgaatagctggcatgcattttgatactgtgctaattggtagccctgaggtctttgggctttgtttatagacttctcccaagaccctccaagtaaggcctgcatgttacttctcacaggctctcagagagtcttgggaagacagaggcctctcttttagacatggagaagtatcgtgggaggtgagttgcccaaggacacacaagactcctgtgactttcaagttagagtggtattgtgcagccagaattcgcctggcatggcttctgtctcagaacctagaacagtgctcttctgcagtaaagattcctagtttattcccttttctcttagtataaaacatttaatgtgggttagagtatgttttttattatttctccatttaacttgagaaagcaacctcatgggttcatatttttgtttccctcattttaaagacaggcgagatttcacgagtagatgaaagaacacccaaatttgagggagcgttccaagttcataaatacttgtggctgagagaaaacaatggccctccctcaaatactgcagggaagaaccagtattgggaacagctgtgtttgaaagtctcctaattgttatttattctatctgtagatctatagtccaaccaatgtatgaataggacctttgctgattatatctctgttttgatcagaactgctataaatgaaagagttgtagtgtactgttttcttaaactcctagggttttaccacaaatcagagttgtttcttgtgatacagccttcttcagcctctgttcgtctctaagaaattgaacctagagtagtaaacaagtgatacttctgtaaactccctaagggatgactcctcagttctgtgaaccccatcatccctcctaatctcaagtcrcttattttcttatgctttgtggagctctcctacaagcacctgaactccagcatgtcccaaatgttattcatgattttctccttaagtctgctgctcctgcatgagttcctatgtccattaatgacattctttatgacacaagcaagaaatcttggcaccatctttatctcccgttttgctaactcccgtgtacatttgactactccattttccaagatgatattctaggcatgtcagtcttctattttttcctctgtaaaggcaggtagtagggtaggatccatatctgtaactccaatgccttctgcttggaagataatgcttcctgctggccagttcccattcctcagcccaaatactacatccttggcaagccattcctctctgaacctccttcccaggaagatgcattcacttcttcctctggattgccatttatttttttttttaactctaatgctcatgaaactttgtggtaaaattttatttgaaggtctggctcttctgctacattctgagatctttgagagtaggaacccagattgtacttagatccgtgtctggcacatatgtaagcacaaaagctattgactatatttaagtgacttgaattagaaaaagatgtatgaaatagaagaggaacaattaaatgcttatttgtatttgatctcattttagtctttttctcttcccatttcattctctcctctcccttagaaaaaaagcacgtaaatgttctgttcctataaaaacaatttaaatagagactttctttatcagcagacagaataacctggttgcattgtcaatgttctgtctaaatgaagtttaactaacaactgttgcctttaagggatagaaaagaaaacctcacaaatattatttatagagaacatgcattggtcttagagtctgagggtccaggttccagttcggttgctgccatttattacgtgaatgaccccaggcaagtctctttttttaaggttcagttttctcccttgcaatgagaataacacctccctgacaaggttattttaagaacttgatgagatgttggatatgaaagcatcttgtataggtaagacactaagttctgacatagaataaacttatgattgcatgtttgtatccctgcaaaattcatacattgagatacaatccccagtgtgatgatttgagataattaggtcatgaaggaggagccctcatgaatgggattagtgcccttataagaagaggccagagagctagctcactgtctttctgccatgtgaagatataaggaaaaggtggccatctgcagcctggagagggccctcaccagaacccgaccacactggcaccctgatctcacacttccagccttcagaactgtgagaaacaaatttatgttgttttaagctaccagtctatggtaattcgttatggctgccagaattaggatagctcttaatttttagttgaatctgaatttatatgtatttcttaggyctggatttgaaaaccattctgctatgtggtttaggtagtatcagctgttagcatacrcattgtctcaaggactaacttttcaatatctatctttatttcaggttagtaacatcctttgtttgggaataacatgcatattatttcatctgatgttttcctaagacaattagattgaatttttttcttctcacttaagcattttggagtaccattagtcctcttccatgtcttagataatattgaattcagggtgtacttttaaaaatcttggtagttaaatttagcagttttgtttggaggtatttattttcatcttggtaataagacaagaagtaagatgtttcataattaccatattttgtttgggatttctgctgaattttctctctctccattgcagttctctttttggagaggtccttctctctacagccatatgctggtagataatgcacggtagctgatcagtgctagaaaatacaggagatccagagcatattactcccttgaacgtatcttttagctgcagggaaaacagatctaaggcatgaattacaacttattagttgtagatggactctgtagcccagtactgattaagaagaaacagcctcactctgtcttgccatgatggctgttccaagtcaaaggaaaaggagaagtctgttggagaagattttctttcttttttccttcttcttcttttctttagttcatccattcatttattttctaatattatgggacacaaaagcagaatttgtagttagtactcttggctgtagaaattcgtagttttgcttttcctttaaggttgattccagcaccactttgtgagaagaaactgtcatagtttcacattgcctctaagaaaatgaaacgtacctaagtattattggacagcmggagtattttacagtggytgctgctcaggaaatttgagtgaaggactgcaaaagaggagcaaagcagacccgagagagaaggcagcagtgctcccctgtgacgtgctccatcaccgggcagggaagacaccgctgccacctctccacagccttgttcaagagcactggaaattgtaaggtgtttgttttgtttcattttgggagtggtggaagattagcctttgtgtttctcctctaaagagttttgtctaaaacgcttacgactacttagttaaacaaaaatccaaagtaagctatcattgaaatatgaaatatactaacaaagccaaacagtaaaagattatacagggaaagtcctttctccccattttgacttcacccactcagtttcccttcccagtgtccttccagagagatatttgactcatgaatcagcacatatattcatatgcctgctttttcatacactgtagcagcatactagaatattgttcagcatttttatttcttttttttttaaccttacactatttcctgatgttttccaagtaaatgttttattttttttcttatggttgtgtagtatacatccattgtgtagatggatgtgtaaagtacacatccattgtatagatgtgtaatttatttagccagtttcttgaggaatatttaggtgtggtggctcatgtctgtaatcccagctctcttggaggctgaggggggcagatcacctgaggtcaggagttcgagaccagcttggccaacatggtgaaacctgtctctactaaaaatacagaaattagccgggcatgatggtgggtgcctgtaatcccagctactcaggaggcggaggcaggagaatcgcttgaacccaggaggcggaggttgcagtgagcccagattgcaccactgcactccagcctgaacgacagagtgagactgtctcaaaaacaaacgaacaaaaaagtcttggtgtatgaataaggaaaggagccctagatattgggcatgcaaaggcttttgtgttctctgaaaaggtcatgcaatgatagaagtgacccgagacacctgtaaactgatgacccacagttaaatccacataatgtggccagtgctgtggttttgggtaagtgcaggatgctgtggacagtgggtgcctaagagctacatttcactcaagtgctggagaagcaggagagattgaccctaaggaagttcctgctaagctgagccctggagaatgtgaggaacataggttaggaaagggtagaatagtgtgaggaactgtgttctaggagagggaacaccagcatgcccagagatcatcatggcccgtttgagcttcagaagtgtatctgttggcagtctggagaggagactggcaaggtaatcaggcattggaatcaccgtagctctccataagtgtcaaggaggttggacataaggctatgggaggccagtgaagacctttatcaggagtgggaggttatttgatttgtgtttaaaaatctcatcctgcctgccaggtggagagtaaaccggaaagggatgggatgctatgtaggaagctgttgcagtaatccaagtgaaaggtgatggtggcctgaactaggaaatggcagtgcaactaggaagaagtagacacagaagagctcttcagacagtggaatcaacaggagttagcaattttgagacgtgggcatggaggcagagaccctcagccctctggttgttcacttttaacaaaaagattatgtgcaatgcatttaacatattattcttgcatctttatgaaaccatcctcattatttcttttggacaaatcctggaagtagacttgctgagtcaaaggaaagatcttgaaatatttcaataatgtagtcaaattgcctccagaaaggctaatacgccaattgtccattaccaattagggcactagcttcagcctcactgagtattatcgctttgaattgacaccaatctgataggaagaaaatacataccttttctttattttaatttgcatttctgtgagtactggcaaagttgaagtttttttcatgcttatcaactaattatatttccacaaattacatattcatatctttgcttattttccccctgaggtgtttatctttgtcttttttatttctaagagctctattactctttagttgcttaaccctttgtcttttctatttgttgcaggatttctctcatttatttatgcttttgtttatattttgttgatcrgaaagttttttaatgtaataaaatattttgttcatgctttatgcctgtagttcagtgtgaagaaaattcttcctcaaccccaggttgaggtataaatagtgggatttttataaatattcacatttattttcattttttaccttcgggtctttaattcatccggaattttcggatatgtgttgtaggaatctatctctttttgatcggaataataatttttttttctgaaccaaaaatcgggacaacctagtctatgtaacaaataatttttatgcatttgtgtggcagaagcagttttagagagtaataatattggaatttctgggacatttgatgttatatatgttgatagattatagagagataagatttaaggactaatacttatacctgggcaacatcagggaacctgtgccattgctaaaaaataaaaaaagaaagaatggctcccaacacccattcagaatagaatgtttgaaatccagagtgcatgagaaagttcaggatccagattgtaaaatattgccaatggtttatgtagtgcaacctgcatttcactgatagctcatgttatccttcctatttgaaacactagttaacatcaaaatgacttttcaggtccgtggtggctctaatctttgtatgttggtaggttcctttctaggcagaacatccaaagacaacccattctcttgaggccatcagaacaagatcaaaggttgtagagccttgaccacagtattaaagcaaagcctcaaaatgacttaaggaatcttaggaaataaaatgccacagtcctggacatttatcatttggcagcaagctaaacatttcctaaaacttttacaagtaatttaggtacctaatggaaattttttgtttttaaattctggagttgcctaaattgtttaggagaaatttagctggaatctggcgataggactgtttatatgtgcttggctcagggtggctgtgttgtccacattagcatgaccatgggctccttatcgaagccctggttcccagtaagtgctgtttgcaagagtgaggtggagtttggtggctttcaggccacccagagtgccatgtgtatctgtttgataaactctgtggtttgtctgttctctgtgtttttgccagattgtttaaaaaaaaaagaaagaaagaaaaagcaaacaagcaggcatcatatgttaaaagtttatctttctacatgaatttttggaaaatctaagtgtaattttattcctgaaagaacaaaaagttgtttccctggggagataattttggggtgcatagatatttttaaggctgtagatattaactatgaaaataatatataactttgtcaatacttttttttcagcaggctaagccatattttttcaaaaaaacgaggctggaatcaactactcttggcatatcagagatcaggaaaaaatgggtattggaagccattcttttttttcttcatgacagcacaggctttctgatgttgtccaggtgtacgtattaacccttcaatcttatctttatagtccaggatttttcagcctcagtactatgaacattttgaactggataatttttggcggggtgagcgggggctctcgtttgtgttataggatgtttagtaatatccgtggtttctacccactagctgatctctacccactaaatgccagtaacacccccatcagccatgacaataaaaaagtgtccccagcattgccaaatgtcccctcaggagcagattatccctggttgagaaccactggyatagccaatgcagaggaagcaggattggtcagatcggagtttgtatttgacttttatatggtctattttcaagtaatttgtcttcagagcaagaataggctaccgggaggaaccctgtaactaaacttcatgaaaatataattaaatttcatagcattccaaggcactaactaaatttgttatattgaaatgaaatcagtgaactgagacctgaggacaggttgagaacctgggaggttattttctagagagactgatctcagttgagttcaggcaaagggtaggaatcatggtatttctatggtgagtcagttatggttgttaaatttagttatttgctgtgctaatagcataaatcaaagaacaggaaacttccttcctaaaatatccgcctgcccttctaggttgtgctggccgcataagatttgctgttgcggctttctatggatggttgaccaattcagatgaagcacccacctgctgtggaaaatctggaaaatcagccaaagtttgtttcaaaaaccttacttgactacatattttaatgactccaagttatacacttgactagaaattagtggtgtgtgttttcctcgcatatggttgaatttccccctccctgttgccgattttaaaaagatgtttcttttttatgaacgctgagagtataaatcaaacaaaagccaaaggagccacgtcatgtactcagtctgtagcagcaaatgttgtacttgcattaattttggataacaggttacagttttaaattggatttttttgtaatgcaacagaaattaccttatgaaaagttggtttgaaaggtggcaattcacgtgtaatttgatgttccatattaaaatatacatgtcttacatagtactgctttcaagcatgactacctgtataatgcaatcgtgttaaatcattgttacatgtatttttactaattactgaactggagtgaattataaatctctgccaaaaacattgacttgcttatactgggcaagcagttaatcatgtttggtggatctgttctttaaaatttttgatgattttataaagcttttggataattaaattaagatgaactacttccacagtgtgtaaataccttgtaatgcagttttaaagggctataaaataataattaaaacttagaattaccagcttccaatgatcatttcaataatcattgctgacagaggaagaagtagtattatagaaaacaagagttcggaaagaaatacaagaagcctcagccatcctcattttctttctgtccatccttaccacgttgtatctgcggtgggagttgactggatggtagaaggggaaagccataggctaagggaagacagtacacttatggaagattgtgtattaaccattttctttccctaacagattttgattgtcccttatttaaatacatttctatgtgaaaccaggaaatagtaatcttttttgttgcatgtatagtgcaaaggtagcttgagaagcagtatgataggatggacaccaggatgtcatagctggaagccttcttggaaatgcagggagcacaaaatgtcttttgagcttcttttccctgtaccttttctccttttgtttatgccccacccaggcatgagttctttaaatcaaggatttctattcagtttactgttttcatatttgtacctgaaacagagatagctaacactgttactccaaaactagagcgaaagaattcagaaatatgaagaaaatttatataagtgtttgagggaggatattagtttcatttctgacttttattcaactttaaaaacttaacagctagctgtgtagtttccttgaatcatctgatcttgtctccatataaatatagagattcctagaaatattactgtgaatccatgctgtatgttttggcttcctgaaaatcaactaaggcccatmcatgctgtgcagatgttgaaagtacaattctccctgtagatagcaaagggtaagcgggtaatcacacactctttcttgtcatattttcttttagggtgagagtctagtagctgttggaatttggattagtagtccaaactactagtgtttagtcttctagagtttaataggtctattgatatagaaacaaatataaatctttagtctgtgcattattatctttaaatgcttattttagaaaaatctgttggttgagtttattgggacatggaactatgaaagtcatgggtatgagctctgctactagcacttagctttgccagatggtatgattatatagactgccttgaaagaggtggttttcaagggagcaggtttaaagggagaatctttcattccacagttatttgtgaatgttgtgctggacagacacctgtagacaaagcagaccacaaacacataaataaatgtgaaaactatcagatatgtgtgtgcagtgtattaaaattgggtgaaacaataaaaaagtagttatttctagaataaaatttataaagatggattaagcctcagtggaacaaaaatgaggatagacttatagagcctctgaatatacaaaaatccaggtctcattctgtttacactgcacaaaatattggggacagcttttattcgggagatccttttcatgatttccactccgtgttttcctacgaagtaacatatttagaaaacctcagaaaaacgtttgtttctaggacagcatagaaggggaagaaacagtctattttccttccgggcattgggggaacagagggaagacccaggcacatgagtggtgggtggtacctgagggcttagggtctaaagaagaagagtcatactatttttaaaaatccatatttgagacagtggcattcaaagccctaaatgagtggggtttggaggagaccatggaaagtaagaaaaggacacatgaaatgacaggaagccatgagatgtctggattaccatcttgtgtgaagttcctaggcagcaccctccctcgtccagatgtccctcccggcgggccagcacctccattgagttctgactcgtgccctttcccattgtccttcctgcctcttcttcaaaaaactttcactagaatgactttccttgcagcctctgaacctgttcacttctcacatccgaaaccagccctttctttctcttgtttagtttccctcgtcctttttaatcaaaaaaagttcaactctctctctccttatgtctcttttcctgtgttcccacaactgtgtaatcttgcgtttgcttttgcaaaggccacaactaagttccatgttgtaaactgagctattttaaaatagaccttgcaacagtaggtactgggggctagagggtggaagaggggcgtgggttgaaaaactacctatcggatactgtgctcactacctgggtgacaggctcaatcgtgcaccaaacctcagcaacatgcaatttactcatgtcacaaaatatactccctaaacctaaaataagagttggaaaaattaaaataaaataaaataaaataagtcttggcatcagataggatagaggttcaaatcttggctctgctacaaactgagtgatatcaggcaagttatttaacctgtctaaacctcatattataagatatgataatagcttcttttattataaagatcaaatgtgatgagtatgtgatatatcataaattgtccaatgcatttagcgtggtgccagcccacaggaagtgcttcatgagggatggctgctgctcctacttctactaaacagtgctgttgcagttactactgctggacctgctgctgcttttaattttgtaggcctgcagtcctctttatgctacgagcccttggcttccacctctgtactctgtaggcttgcttattctaaccctgcctgcagctttcctctccttctgacctctttggccttttcctactactaagagaagggggctcccatggattcagtcctttgtcccctgttctcaccactttgccatccatactcacagctttaactccctgctgtatgctcatgactgtcacatttatctctattgcctgctgacatcattactgggatatctcatgtctccttcactcatcacaagttaaaaacccccatcacctctcaattccactgttgcattagcctcttgaccattcttttttcttccatttttggctctttttaaactaagttgccccatagccagagtgatttctggaaaaggccaatcagatgattctcttttaaaaacccttcagccaagcacccaactccagccccagcctcagcagcaccagctacagagtctctccgtgacagtcacgacgcccctgtctacttagcaccccatgcatcgcctgtcacagtatgtgctgtgaaaatatccatgccagtaagacaaatgagtatactgcatgctttttgcctcgaagcctcatgatgttgactctgcctggaatatctttcctcctctctgctaagctcactttgattcttctcagcacaaacttcatcttcataatcttggctgggctgagggcccctcctctgttcttccatagcaccgcaactatctctcaccctgtaattgtgacccattttttttaagttaaataaaaccgaacagaatagactagaagagaaaatgctgttttgtatgtttgtctgtacttgtatataggtgtggtataagtttttttcaagggcacagtaaaaaaaaaaaggcttggaaaacagatttgtgatgctatactgagattatctgttcatgttactccatgaattgtaaactccttaagaaccrggaccattcttatctttttagccctagtgttaagcaaagctttagtcaataaaaacttgttaaatggaatctgctaattcttgaaaaagcaaaggtgaggagaaaccgtgaagtatgtgaattcctaggatgaaataaatgatttgtgaaaagttacttctctgagtctaagtgagttaataactgtgggcccccagactgagcctccttgtccagtggaccaatagaaccctatgtaggaaatctggagtgagaatctgctgaggagagtgccttgttctcttttgtcaaatgtgtatgtgcagattctgcaattacataggcgaaagtgagctcttttttatttgtttagggaaaccgagctcctaccacattaggctawgtgaatggcttttcctgcaaccaggatggtggaggaaggaaagagtggcaggtgaaaggtttcctatcaacttcccattaccttttcctgctggcaggctagaaaacaagccctgaaagagaaggagtgcgtccttccctcccaggtgctcactgatggattttcagcaccgaagcacatggcaggagatgcgggatgctcctttaaggggtcaccacatttcttctgtcctagcagggagccagacatgactctatcacgcttgccacttttccattcttctcattgtcctattctctttttcaaatttttatttgttcttaatacttttattgctttctcatgttttcactgctactatgcctttttcttcctcatttcatcccattcctcccttccacctccttaaaagcaaagaataaaagaaacaactgtaaacaacacttgtaaaagagaaattagttatcaaatgacttccacttaatttggggacctccacttaatacaggaaacaagttttagtgtcatagaccacgtatctaaaaatgatagtgttccttaagggggcatgcctaacttwtctttatccctgtaggcatagcatggtgctgtgcatagaaaaatgagctcaataattgtttgttgtccagctagattgaattaataaagattaagtgtgatgctacaactacattctgtttgacttgccctgaagcagtttccttgctctctctttcatgtccttatctgcctcctccttttaaacattattatgagtgctttattttatacttctgacacgttgacataaatgacagtcttgacagattttatattattaaaaacactactgaataatatccttgtgcttcttgaagtcagacacttcatttgtgaaaagttgattctctgagtctaaatgagttattaactgtgagaacaattatcctctgtactarctctaaaacccttccattgacaaatggcctcctgagtgttgctttaggtatagtcaaagccacctaacaggaattaccccaagaagacttgagtgccagcctatcctgagagccccaagctgggaggagtttgagcagcaaattatgaaggaaatagttttcaaagaactttctctattggcaataacattattatttttcagattttacaaacaatgcatatttactataaaaatcagactgcagaaaggcttataaaagaaagtgaaaattacctactttcttatggtctgtcctttttagtctatagtcatctttgtttttgcatgtatacataacatatgtgtttttaaaagattgttctaaaatgttattatctgcttaaaaaatataacagatatccatccatgtaatcagtgtagctctgtatcattgttttaagggttgcatggtgttttttgtaaggttattccataatytttaagctatgtttaggttgtttctatttttttagcattataaaataattttctaattaaggtctcttctaggtagcttgatttgtgcaaataacttaatcaccctttggatccttgcttacttctgtgaaaggtggagttgagcttgatgatctcttgggtattatgtttaaggtcactttttattacatatggtttcatgccttcaactcatagctttccctgggagaagtggaataggcaatggttaagggcatgactgttgtaatcacagtgcagggatccaaattctctttattgcacttactagctgtgtgaccttgggaaaattgtataaccttattgagcctcagctgcctgatctgtatatggagatgataatactaacattataatgatgttgtaaggattcagtgaagtgtaatgcacataaagtgcttagcatgatgccttacatacatactaaacactcaatacaggttagtcaatctttttattattaggatttccacttctaacgtgccagaagcctacccatttttcaatggggagccagatgactctccatctttccaggtggtcaggccaagaacattggagtcatcgttgacacctgttactaggctgaactgtgccccctcaaaattcatctgttgaagttttaacccttagtgcctcagactgtaactgtacttagagatagggcctttaaagaggtaattaacattaaatgaggtcattgggatgggctctaatctaatatgtgtcctcataagggagattagcacaggcacacagagataaacagaccatgtgaagacacagagaggagatggccattggcaagccaaggagagaggcctgggaagaaacctggagcaccttaatcttggacttgcagcaccagaactgtaagaaaataaagtcatgtttttattttttgaggactttagttaataaaaatgtattgtactccgggttttttttttttttatttgagacagagtctccttctgtcgcccaggctggagtgcagtggcgtgatcttgggtcactggaacctccacctcctgggttcaagcaattctcctacctcagcctcccgagtagctgggattacagtcgcctgccaccacacccgggtaatttttgtacttttagtagagacggggtttcaccatgttggccaggctggtctcgaactcctgacctcaggtgatccacccacctgggcctcccagagtgctgggattacaggtgtgagccactgtgcccagcctattccagatttttttaaagcacacattgctgtgtgcttcccagttccctctgcctggaacactcttcctgcagatagctgtggtgctcaacctcacgtatttcagatctttactcaaaaatcatcttctcagcaaggctttaccctatcacctgtttaaaatcacagacacaaacacatacacacacacacacacacacacatacacacacatgcacacacagcacttgtcttctctttctggcttttctccrtagtatttatattatatatcttacatgccatgtattttacttgtattttgaaatattgtgttggttttttattataagtgccctgaagggtgaagtttttttctgctttgttccttgtatatccacagcacctagaacattgcctggtacatgttcagcactctataaacatgtttggaatgawtggatgtgttttttggcttccttccagtctcctactctcagtttgtgctcctatagcaccacctctcttgtgacttttgatatattctggatttactatagtgtgttgtctgcccccaccccagactgcaaagtccttgatcagaaacaattcctcatattccttctactgtccagtggcatactctatataggaagtgctcaataaacagtctaatgaatatgttaacatcagcagtcatcggtcatatagccactctgtttccatttctttcccacacacagcaaatttgtagaccctggggtcatggttccactttatgaatgaagtagagacctttctgacccaagcgccatttacccatcgcttccttttatcttctgcaggtttattcacatcctctctacctttccctcttttcactttctcttagagttatgtcatacgtttcactacttttctcttttccaccatcacatcggatccctttgttagccaacagatgcctgttactaaaaagaacaagaacagtggcggtccataaacattaatcaccagagaaacagtgtaaatttgtgagagcaacaggctttgagtctaagtcaagaatcttccagactgaggtagcctttgtggaaatagaaagacttaaattgaatattggaaatgggaaggatttggatagaagagaagaaggggaaaggtggtttaaatagcgggaaatgagaagcaaaaaggaggcagcggagagcgcaccttgttcaccagctttcccagtgcttcattgggcctagcggacgcttcggaattccacagaagagagtttccagtcttcgttctccttcagttactattgtttttcttcatatactagatggagtaggaggatcaaaatgaaagctttaaaaaatatttttaattgaatttaaattgttttctgtttggtttaactactagtatttcaacagtaattttcccttatgtttaagttgtctgcctacattatttcagttacattgtggattaaataggcttttctgggttggtctgagattataaggactatttatattacagtttttatgggagaatgaattcagggttgtaaacaaccgacctatgtagaaacttttggaatgcaacttaatggttgactgttttcttgtaactgttttaaattttgttttgttttttcattttgcttttctagtctataaatggaatatggtgtgtcttctttcctttgattccattgttgctctgtgtagctaattagaaagtttatagaagttataagtcctgtcataagtcattttacttcaaatttcttataatattttaaaattattaatagtttctttccaccttttaaaaagataatcagggagagcttttcttttatattagttttcccatataagagtaaatgaatgaatataaaattaaagtttcattcttttttttttttttttttttgagacagagttttgctctgttgcccaggctggagtgcagtggcacggtcatggctcactgcagcctcgaccccctgggctcaggtgatcctcccacctcagcctcccaagtagcttggaccacaggcacatgccaccacaactggctaattttattttwttttttttagagacagggtctcactcaggctggcctcaaactcctggcttcaagcgatcctcctaccacagcctcccaaagtgctgggattataggcgcgagccaccgcatccagctaaagttttattcttatgagtcatcattattttgtgtgggagtgcaacataaactgctaaaagagcagtaaataaagattttgttaaactcttacagttgtgagattggacaacaggagatttgaactcctcaggagaagcgatggtgcagttgttcctagaaccacactcagaaaatggggctggaggaataatgattcctactgcgactgtcagaaagaaaggcccatctgcaaagcctttgggttgacacttcctacctgtttggtgttttgcacttttggagagtatttcatcacatccatggggtggaagtgttttagaaacggaatatcctctgcctgcttttcaacagttttgtctccatttattttagtattccaaataattataaaatttaccccaagtcagaaaagaaactacctttgccaccaaaatgtttataattacctcagtgactggcaatattttaattctctacccacaccactttccagaaagccctttcattctttctcttgataaattctaataaaaaaattaattgctggttgagagtatttctccggttacaaaaactcatttcttaaaatttagcatttaagagagggttaatttggaagttaattatggttaatattacatcaataattattgtcttttcattagttttataaaatagctcatttgattcattaaggattatttggtagggatgaataaagaaaaacatgttttaattgtcctcctttctaaatcatccagcagatatttacattgagttgtttttcttaaacagcatttgaattatgcaggaatgttcatagcagcataattgttaatatctcaaaagtaaaagcagcccaaatattcatcaacttattaatggataaatataatgtggtatatccataccatggaatatttggcaataagaagaaatgaagtactgatgcatgctacacagtggttaaaccttgaaaacattatgctaagtaaaagaagccagacacaaaaggccgtatatttataaatccgtttatatgaaatgtctgcaatagggcagatctgtgtggggcagaaggtggattagtggttgcctagggctggggtcgggggttggggggacaaggggagtgactgctaatgggtgtggagtttatttttagggtgataaaaatgtactaaaattgattatggtgatgattgcagaactctgtgaatatactaaaagtcattgaattgtacactttaaatagatgtattgtgtggtgtgtgaattatatctcaataaaactattgtttttaaaaagcatttcttagtattcattcactactttcatttaatgaaatggaagagactttagaggtacagagcrtggtcagtgacagaggtaaatacacagtgagtacttgaatttactaatctgaggaaagttctcagcatctctttgaaactctatttagatgggaatgaatagagaacagattccttattccattaatttgaaaatatcattgtacttatctaccagagagaaaatcccagagttcaaatgtactgagaatttttatataaaacctgaatgaaatgtttgaaaaaatccagtatgtttaatgaaggtacataaactatttctgcatttgatttagagatgactttgctgtgcattgtctcgaggtcaactataatatatcatagtttgccataagccataaaaggcagttcagacaacgcaactgttgggtgcattttggactgctacatagcatttattatatgcatgtatgacaaataatatgtatatatcataattttttaaccattcccctattgatggtcatttagattttttcctgatttgggctattatgagtggttcagcagtagaatcctagtacatgactccttgtgaacatgtatgtgcaaagctcttctctataatagaaaatgaaagatagaattgctgggtagaaggtgtgtccatttctacttcgatactgccaggwtatcctctcacaggtgccactgcgctctccctctggcagtttccctacacacttgctaatgtttgatattgtcaaactttatctgtggtataaaaaaatattgttttgatttgcaattgcctttgcatgagtattcatgagcttgtttaatggcactttaatttcctcttctacaaattatccttgatcctatatccatttttaaatatttgtttatctttttcttattgattagtgggcattcttcatgtattttggatattagtcttctgtctcataggaattgtaaatgtttcttcctctgtggcatgccttttgactttgtttatagtatcttttatcaggcagaagttttaaatttagatgtagtcaaatttatcttttcttgtgctcagaatcccctccatcctcctcccactttgtttaattctctgctgttgccgtcttgaaagtcgtgcattttcatttctcactggggcacgcaagtaatgtagtcatttctgcttatatgttattttaggcttaggtctttaattattctggaatattttgggtgtgtgtgacttgtgtgaaaaacaggtataattattttgtattttttgcaaatggacagccagttatttcaataccatttgtttcatagttaatccctttcccatcatttggaatgccacctttcttatattttgaattcccttgtattcattggactgtctctggaatatgcattttgttctattaatctggtcatctattcctgtaccagtatcatgatgttttaattgctgtatcttcacaaggtttttcgatatctggtaggacaagacctttgctcttcttttctaagattacttcaactatcttgtatttgtttgctttccttttttggcatcaacctctcaattccttgcaaattccatttgggattttgttagggattatatgaattttataaattaattttggagaaaataacatcttcatagtattgagtcttcccatacagggacaagatatgtctcttctttaattaccttatgtccttcactaaagttttatctattttttcttaacaggcttgcataccaagcattttaaattgttattttgaatgggatttatttctaagttttttaaattggtgtatttaagagctaataatttctggttttggtcttgtatttgatctccttgctgacatccttgtagatctactgttgatctcttagcctgttgattctcttagctcttcatgtagagattttaaaatactgacagtgttgtgtgtttattgctaatatttgttttattttgctttttttttttcgatgctgctttagctagagtaagtcttattcttctattgggaggcttctaccatctcatcattaactaaaaagtttactattggcttctcgtagattctctttttcagattaaagaaaacttctatttctagcatgttggagtcttaccatgaatgtgttttgcattttatcaaatccttttctctgcaataattaacacaatcatatggtttttatcttttaatttgttaatgtagtaatgaccttcatagatttttttctcttctaaaaccrccattgtatttctgcttgttctagatatattgattagccaggattttatttaggccttctgaatctttgttcataagtttggatgatctatggttttctttttttgttttgtcattgtctggtttgtgtatgagggctatgatcaaccagacaatacacatgacagcctctcttccaccccaaataatgattctgtctaaaatgtcaacagtgctgtttgagaaaccctgtgctagactcaaaataaactgaatggctttctgttttttttcctgagtagtttatgtaacatagaatttacctattctttcagaatatggtataattcacctaaaatgacctgagcattgtgccgttttaagaggtagatctttgagcaccttttctatttttgtttggatatccatctcagtggttttctttttgagttaattttggtaattatatcttcctggaaaattggtcatctgttttattttttagttcatttatattaaattttaacatactatctgaattttgaaagtaataattctatcctttttctttttgaaattcattttgccaaatatttgactggcttaggtgtctttgaaatcaccaggttttggttttattcattaactctactattttctgtttcttgatttctcattcatctttttattgctatattaatttctcttttctatatgtttattttctttctcttgtttttaactttttgaattgaaatttttggcgacttactttttattgttctcattttctaaaccagcatttaaggctataaattttcctgagtgctacttttccagtaatacataggatttagtgtatagtgcacacatatcattcatttttaaactgctggtgattttcattttcacttttttactttgacctaaaagtttctgaagtgtttttaaatttctgcatgtatagaattctttgagttgtttagatctgtcaggtaatttggcctgtatgttttctgtttgggaatgtttttgagtgctactctgtggcctaatacaagatcttttttttgtgaatatacaaaaaattaaagcttagtaaattattattcagattttctcatcatctgatgagaccctggtgcctgctatggcctgagcgagaagccatctatgtagatggggttctatgtaacagatgatagaaacctgaggacttacaaatatatcatccattcatttaaagtaaagaaacactgcatgttctcactcataagtgggagttgaacaatgagaacacatggacacagggaggggaacatcacacactggggcctgtcgtggggtgggagacaaggggagggagagcattaggacaaatacctaatgcatacatggcttaaaacctagatgacaggttgataggtgcagcaaaccaccatggcacatggatacctatgtagcaaatgtatacctatgtagcaaacctgcacgttctgcacatgtatcccagaacttaaagcaaaaaaaaaaaaaaaaaaaaaaaaaaaaaaagaacctgttctgttctaactacttttaggaacctgtttaactcaaggaaataaaaatacaatcaaagatgcttttatgcattatttgtaatagtgaaaaatcagaagtaaatgtctagtggttaaataaatgaataaatatgtaggctttaaaaaatcatattttaaaaagaatatttaagattatgggggaaattattcctggcatctttatttaataaagcaggatacaaatttgtatatagtatgatcacatgttgagaaaaacaatacatgtacattaagtatatgcatacaataaaaggttatttttgaattatttcttgagtgatgatataatttaattttttctttatatttgtttttctgaatgtttaccatgattatttaccttataataaaatatatgtagttggaagcatcttttgcgaaataatttcttttgtctagcttgtatataatgcaaaattgcaacttaccgagggcagcttaacaggatgtgttaaaattttgagtatttatattctttgacccagaaagttcactgctatgaattaatcagaagttcctataaaagtacagaatgattttactaccttgtttataatacagaaaaatttaaaaaatgtaattctaatactcagtataaacctactaaaatgaattgcattatatataaaaaaggaaacattaaacaagtcttaaaaataaattggagctttatgggtaatgacatgaaaaactgaccaagacatattatgtgaatgaagcaaggtgcaaaacactatgcatagtatgatcccatttgtgtaaaaatggggtggttgtgcatacatcacatgtaatgcattataattttctggagtaatacataggaaataacaatacctacctgtgagcaaagggctgaatatgtgtgatttcacttcatgtatttctatcattttgaatttgtacagaaaacatgaattacattaaacaaattttaataaaaattaaatctaaaaggtagaagattatatcactgtaatactgtttatgtatttcctttctgtgtgtggtagtaggcccacctgtgtaataagcatgtaaaatagataggatcactgcccttgaagagcttgttctctaaaaatctctttttcatggatataagacattaatgttactatttttgtgatggtaagatgataatgtgctagaagtcaaatggttggaatttagtcatttctgacttcagtgaactaatgctgatttcactgaaattcattgtgtacaagctrgataatcccaaagtgggcgttacctgtctgagaaaggaattagatgggttaaaattagtaccattagtccagactttaaaaacctccatagttttttttttaatcaaacataatagaacttgtttgcaccattgtatcttttatagtagacatagaaatamgttttaagagaatttgttatttatgatgggtcccaagtatcatataaagttgaaaagatccagtgtaaatatttcaattttgagttgatttgatgtaatgtaactgatgaactttaaaatacctgctgtttcacacaatattaagatataatttttactcagtgacatatacatttttgtttgtttgtttttaattttattattattatactttaagttttagggtacatgtgcacagtgtgcaggtttgttacatgtgtatacatgtgccatgttggtgtgctgcacccattaactcgccatttaacattaggtatatctcctaatgctatccctccccgctccccccagcccacaacagtcactggagtgtgatgttgcccttcctgtgtccatgtgttctcattgttcaattcccaccaatgagtgagcacatgcggtgtttggttttttgtccttgcgatagtttgctgagaatgatggtttccagtttcatccatgtccctgcaaaggacatgcactcatcattttttatggctgcatagtattccatggtgtatatgtgccacattttcttaatccagtctatcgttgttggacatttaggttggttccaagtctttgctattgtgaatagtgccgcaataaacatacgtgtgcatgtgtctttatagcagcatgatttataatcctttgggtatatacccartaatgggatggctgggtcaaatggtatttctagttctagatccctgaggaatccccacactgacttccacaatggttgaactagtttacagtcccaccaacagtgtaaaagtgttcctatttctccacatcctctccagcacctgttgtttcctgactttttaatgattgccattctaactggtgtgagatggtatctcattgtggttttaatttgcatttctctgatggccagtgatggtgagcattttttggtgtgttttttggctgcataaatgtcttcttttgagaagtgtctgttcaagtcctttgcccactttttgatggggttgtttgtattttcttgtaaatttgtttgagttcattgtagattctggatatcagccctttgtcagatgagtaggttgtaaaaatgttctcccattctgtaggttgcctgttcactctgatggtagtttcttttgctgtgcagaagctctttagtttaattagatcccatttgtcaattttggcttttgttgccattgcttttggtgttttagacatgaagtccttgcacatgactacgtcctgaatggtaatgcctagrttttcttctagggtttgtatggttttaggtctaacatgtaagtctttaatccatcttgaattaatttttgtataaggtgtaaggaaggcatccagtttcagctttctacatatggctagccagttttcccagcaccatttattaaatagggaatctttcctcccatttcttgtttttctcaggtttgtcaaagatcagatggttgtagatgtgtggtattatttctgagggctctgttctgttccattgatctatatctctgttttggtaccagtaccatgctgttttggttactgtagccttatagtatagtttgaagtcaggtagcgtgatgcctccagctttgttcttttggcttaggattgacttggcaatgcgggctcttttttggttccatatgaactttaaagtagttttttccaattctgtgaagaaagtcattggtagcttgatggggatggcattgaatctataaattaccttgggcagtatggccattttcaccatattggttcttcctacccatgagcatggaatgttcttccatttgtttgtatcctcttttatttcgttgagcagtggtttgtagttctccttgaggaggtccttcccatcccttgtaagctggattcctaggtattttattctctttgaagcaattgtgaatgggagttcactcatgatttggctctctgtttgtctgttattggtgtataagaatgcttgtgatttttgcacattgattttgtgtcctgagactttgctgaagttgcttatcagcttaaggagattttgggctgagacaatggggttttcgagatatacaatcatgtcatctgcaaacagggacaatttgacttcctcttttcctaattgaatacccttgatttccttctcctgcctaattgccctggccagaacttccaacactatgttgaataggagtggtgagagagggcatgcctgtcttgtgccagttttcaaagggaatgcttccagtttttgcccattcagtatgatattggctgtgggtttgtcataaatagctcttattattttgagatacgtcccatcaatacctaatttattgagagtttttagcatgaagggctgttgaattttgtcaaaggccttttctgcatctaytgagrtaatcatgtggtttttgtttttggttctgtttatatgctggattatgtttattgatttgcrtatgttgaaccagccttgcatcccggggatgaagcccacttgatcatggtggataagctttttgatgtgctgctggattcggtttgccagtattttattgaggatttttgcatcaatgttcatcaaggatattggtctaaaattctctttttttgttgtgtctctgccaggctttggtatcaggatgatgctgacctcataaaatgagttaggcaggattccctctttttctattgattggaatagtttcagaaggaatggtaccagctcctccttgtacctctggtagaattcggctgtgaatccatctggtcctggactctttttggttggtaagctattgattattgccrcaatttcagagcctgttattggtctgttcagagattcaacttcttcctggtttggtcttgggagggtgtatgtgtccaggaatttatccatttcttctagattttctagtttatttgcgtagaggtgtttgtagtattctctgatggtagtctgtatttctgtgggatcagtggtgatatcccctttatcattttttattgcatctatttgattcttctctcttttcttctttattagtcttgctagcagtctatcaattttgtccatcttttcaaaaaaccagctcctggattcattaatttttgaagggttttttgtgtctctatttccttcagttctgctctgattttagttgtttcttgtcttctgctagcttttgcatgtgtttgctgttgcttttctagttcttttaattgtgatgttagggtgtcaattttggatctttcctgctttctcttgtgggcatttagtgctataaatttccctctacacactgctttgaatgtgtcccagagattctggtatgttgtgtgtttgttctcgttggtttcaaagaacatctttatttccgccttcatttcgttatgtacccagtagtcactcaggagcaggttgttcagtttccatgtagttgagcggttttgagtgagtttcttaatcctaagttctagtttgattgcactgtggtctgagagacagtttgttataatttctgttcttttacatttgctgaggagtgctttacttccaagtatgtggtcaattttggaataggtgtggtgtggtgctgaaaaaaatgtatattctgttgatttggggtggacagttctgtagatgtctgttaggtctgcttggtgcagagctgagttcaattcctgggtatccttgttaactttctgtctcgttgatctgtctaatgttgacagtggggtgttaaagtctcccattattattgtgtgggagtctcagtctgtttgtaggtcactgaggacttgctttatgaatctgggtgctcctgtattgggggcatatatatttaggatagttagctcttcttgttgaattgatccctttaccattatgtaatggccttctttatctcttttgatctttgttggtttaaagtctgttttatcagagactaggattgcaacccctgccttttttgttttccatttgcttggtaggtcttcctccatccctttattttgagcctgtgtgtgtctctgcacgtgagatgggtttcctgaatacagcacactgatgggtcttgactctttatccaatttgccagtctgtgtcttttaattggagcatgcagtccatttacatttaaagttaatattgttatatgtggatttgatcctgtcattatgatgttagctggttattgtgctcgttagttgatgcagtttcttcctagccttgatggtctttacattttggcatctttttgcagaggctggtactgatagttcctttccacatatacattttttgagcagtactgttatcctttctttaatgtttagctacgataaaactttaagtgaaagccaagcttagaaaaggatgaacaatgaaccattaattgtagataattatgaaactagatttttaaaacaatgtttgtaaaaatgttgtattgtttcagcttatatacccaccatttgcatgtttcctcattttatttctggtatctgaaaatgcatttgatgtacagtaaatgtgggtgggtacagcattcaaaataagactgtaataaaaaaagtgcaagcaaaaaaattccatctgctatttaactttgtagataggttaaaaccattgtttaggatcattggcatgtaattgaaatgagtgacattttggatgatgaaacaaatattagaaagaagaaaaaaactaatggaccaatttaatgtgtcaaactcttatatataaaaaataaagtcactgtgggtaactgcaaaccttccacttttactccctttcaattcatgcattagattttatctgactctcttttccacacctggaarctctacattggtatttgttttctataagtatttgtttaataaactgttgagaatgcacatctgtgtcaggagcaatgatgaaggctgggtttgcagaactgccagatcaggctgctggttccctttggctttgccctccatggggctggatcctatgactgttgtagacctttccccctaactcgagtccctcttttgggattagttatctttgcactctgttttccactaccaaacctcaccaacacctcagaccatccttggatttatattatccttccagcttcccaaccagtagcagagcaaaggatgccccaactctgctccagtgctaaccccttcacctgtgtttgacagtgtctcccttttccactgcagctcctgcttccacatttatcctcaccctcaaagatctctggcttgttccctctgaattctgccatacacccaggcttccctgttgtaatatcatgtgcctcttgcctcttagtctcttttgctcccttttactacaaaacatgttgaacaggtggtccacgctcctatctctgcgtctctccaaaccaattttcatttccaccaatttactgaacaactttctttactgttacccttgatctttattttacgaaattcaaaggtctcttgttcattatttcttgcgttgacctttccacagcastaatgttgctgactctgccctttatgataatttttattccttgtggcttttatcgcattatctgtctcaattctcttccacctttcatagtcttcctagccttccttgctggttgcttttccttctctctgactgcgtgcatcaccttccctcaggaagaaaagagcatggaccttccctcctgtccatgctcttttctatcaatatgttcccccttggagagttctcacaagcagcagatatcacctctatgckgatggcttcctcattgtggtcctatccttgaacacctacttggtcgtcaataccatatcccatctgtgttyagaactttttcaaccagatgtcccactacagtgtctcttccagcttgagaacctgtaattctttaggtgtaagaaggtccaccgggtgctgtggctcatgcctgtaatcccagcactttggtaggccgaggcaggcggatcacgaggtcaggggatcaagaccatcctggctaacatagtgaaaccccgtctctgctaaaaatacaaaagattagctgggcgtggtggcaggcacctgtagtcccagctactcaggaggctgaggcaggagaatggcgtgaacctgggaggcggagcttgcagtgagccgagattgcgccactgcacyccagcgtgggcgacagaggaagactccatctcaaaaaaaaaagttcatcttctccataaaactagttcatcaaaattccttccttcagcatatcaccactatcattcagatctctgtaaagaggacaacctttattagtgatttagctgaaaatcaagaagcctcacataaatcagcccactccattgtcttgtatggagtcacatgctgatttatgtcagctcccccagcacagtgccgccacactggtccatcttacctcgcctggccttctgcctgttaactcctttcccagtccctcagggtcatcactgcctagtgacaatttctaaacactataggaagcactaatcatctagctgttccttatttgctttgacatttgcttagctcctggacctgactctcagggcccttgggagtttgtccctccctctgtctcccacctactcagcaccacttgacgtttggtaagctgcattctttcttttggtaattttagttacgttaagtccttcttgtttgtattgcctgcttcacyccattcttagtcctacccacctttcaaggaccaccaaaatatctctgaatcaacaacatctgaagtcagtcctgtaattgagtatttttcatttatgtcttgtatgtggataaataaatggtcccatcaccttccctcagaagcctttccatatactaccatttcctaaaaaatattataggctccattttcctaacttactttaagcttaagagtgagaatatatttcatacccttctctgtctcctctggtgaccaataatatacaaagaataatttcaataatgacttcatggttattaattgttatcagtttaaatacttagcaagttgagaaaatataaasaaaataagatttcaaacaatccaatcatctatattcagcaaaacacaaaaagtttctgttagatatgacagggtctagtgtttatggaattaaagcaatgttttctaaatgaaatatatgctgttgaggtatatgtcctcgtgtttcagtggagatggagaccccacrctttccttaggataaccttctaacatttaaaacataaaacgatttcattgtatactcgtggtatttagtgtataccactagcaaatgttgagactgggactagaagttgaagttcttatatcaaatccaaagacctttccactgcacatttccatatattctattcactcatttatttatttattcagcacatacttagtgagcacctactgtgtgtcaggccatgctaggcaatgagatagagccttcaaagagcttagtctaccgatagagactgacaagtcaacataaagttgaaatgcagtgggacatgaagtggagggaaactttatctgaatgttttgttttcagacaagggtttaaggaagtttaatcctgagggaaagtgctaatgagggagatgataaagattcaggtgaagggtaactggcagagtggtgtccctttgaagactgtgtgaagggaatggggtccagggcacaggtagggacatcagcttcccaccagacaggaataacatttccaaccagaatgggacgcagaaagcagcaccagaagcagaggaagcattctcattttgatgccttctattctaggtgaagtaagagacaggctcattgaatgagaatgagagttgtgggatagggaggaaggtagagtatgtgaaacccccatgtaggaattagaagaatcttgaccttcccaggacccaagggggcaaaggcggtgaggggaaagggtctgagacagctctagtggatacccaacagaggagcaacaccaggtggataaggggtttgtttggtaagaggtgaaccctctcatgttcagagcactgcagggtgcccagcatctcagctcctgccgggaggaatctgggactgatgagcaagctgaatggcagttgaargatccaatatccacagggattatggggaagctcagggagcatggacgcccaggagtaggtcagaatagcaccaactacagggataagtagacattttcctcttatggcagtacatatgtaaggaatagacagttgaaagaataaagagaaagggatattagagaacaggttattttaaaaaagatttattttgaaaggggatgatcagttgatttagtatgaaatggagagctgagctagcagagatatactgataacttctggtcagtacaagatgcctctctccttgagtgatgaccaacctttgctgcttagcctgccccacgacccatctgttaggttctctggattctcactgcaatcaggagcctcatccaggagctttcttttttttttttycccaaggacctttgatgtttgattcttatgctattatagttctcaatattaataattcagagtcaattgtttttaataacctaactataaataattagtgaagagaattaaaggaatggatatactcattgatattttcataatccttatcctgccctgtggcattgtctgttactgataaaacttgatattgttaaaattttatatgatgaaattcaaatcagaggggagcaaaaggattacaactgctttgaaaaataaaatgaagagcacaaaaaggaattactagggcctttctaaaccaaaaagaaaaattaacgaataaaagatttggaaaaaaattcctcaaagtattraaatctccttcttattcctaaagataattggagctagtagtgaaaagcaaagaatacgtgtgtgtttatacatacacatacatacatatgtacatacacacatatgaatacataaacacacttgcaagtacttgaaccaatatatcttttcaaacttaaaaaaggtaatgggaaattacaatcaagattaaataaaaatagcttcttttgaattaatagtatattgggtagatgtagctaagatattttttcaaccatgaaaagcagtaaggaatagtttggaaaataattggttgagattattttacatatttatgtaaagattttcattatcacaaattttaaatactattaatttgcaatattaaaaaattttgattatttagtgctaatgaaagggtatagtgacctaatacataggtaatgctaaaagatttctacttgtcttcagattaattacatgaatttaaaatggatcacacatctacatatatatatacatacacacatatgttagtattttaagcaatatattttaaactttgaaaaatgtagcaagccatcataatcatgaagatggaaaattagcttgagaagctattgaaatatttaatagcttatcatgagagaaaatgtatattagtaattcatgaattgttagcaattcatgaatagatattataaaatcaaataataaaattgcatgttctgatcctatgccagcaaatatacatacctgagcatagcatttatgactttagattaaaattatgtttattaatcattttctcatccttgtgactgaattctttgaaagtagaatagagagcaatcttatttaacccccagcatatactcataaaagtactcaaaaggccctgtgattataatgcttacacttagaatatcatctctcagaataacctatgaccatacttgaattattatcaccattgtacaaatgagttaattgaggcttgagaaggttaagcaatttttttttttttctcaagtcacccttctcctaagtggctggtcaggaattggaacctaaatgctggaactccaaagcccacactgttaactactgagcacaggcaggaaatgtgttggtttactttcttatacctggcactgtgctcagacattgtagtcagtcagtgagagtgtttgaaataaagaatgtaaaagttataataattaaagttacccaggattagcaaattattattattattattttattatactttaagttctagggtacatgtgcacaacgtgcaggtttgttacatatgtatgcatgtgccatgttggtgtgctgcacccattaactcgtcatttacattaggtatatctcctaatgctatccctctcccctcccccctccccacgacaggccccagtgtcatgttccccttcctgtgtctaagtgttctcattgttcagttgccacctgtgagtgagaacatgcggtgtttggttttctgtccttgcgatagtttcctgagaatgatggtttccagcttcatccatgtccctacaaagkacatgaactcatcctttttaatggctgcatagtatcccatggtgtatatgtgccacattttcttaatccagtctatcattgatgggcatttgggttggttccaagtctttgctattgtgaatagtgctgcaataaaaatacgtgtgcatgtgtctttatagcagcatgattataatcctttgggtatatacccagtaatgggatggctgggtcaaatggtatttctagttctagatccttgaggaatccccacactgtcttccacaatggttgaactagtttacagtcccaccaacagtgtaaaagtgttcctatttctccacatcctctccagcacctgttgtttcctgactttttaatgattgccattctaactggtgtgagatggtatctcattgtggttttgatttgcatttctctgatggccagtgatgatgagcattttttcatgtgtctgttggctgcataaatgtcttcttttgagaagtgtctgttcatgtcctttgcccactttttgatagggttgtttgtttttttcttgtaaatttgtttgagttcattgtagatgctggatattagccctttgtcagataagtagattgcaaaaatgttctcccattctgtaggttgcctgttcactctgatggtagtttcttttgctgtgcagaagctctttagtttaattagatcccattggtcaattttggcttttgttgccattgcttttggtgttttagacatgaagtccttgcccatgcctatgtcctgaatggtattgcccaggttttcttctaggatttttatgattttggtctaacatttaagtctttaatccatcttgaattaatttttgtataaggtataaggaagggatccagtttcagctttctccatatggctagccagttttcccagcaccgtttattaaatagggaatcctttctcccgtttcttgtttttgtcaggtttgtcaaagatcagatggttgtagatgtgtggtattatttctgagggctctgttctgttccattggtctatatgtctgttttggtaccagtaccatgctgttttggttactgtagccttgtagtatagtttgaagtcaggtagcgtgatgcctccagctttgttcttttggcttaggattctcttggcaatgcgggctcttttttggttccatatgaactttaaagtagttttttccaattctgtgaagaaagtcattggtagcttgatggggatggcattgaatctataaattaccttgggcagtatggccattttcacgatattgattcttcctatccatgagcatggaatgttcttccatttgtttgtatcctcttttatttcgttgagcagtggtttgtagttctccttgaggaggtccttcccatcccttgtaagctggattcctaggtattttattctctttgaagcaattgtgaatgggagttcactcatgatttggctctctgtttgtctgttattggtgtataagaatgcttgtgatttttgcacattgattttgtatcctgagactttgctgaagttgcttatcagcttaaggagatttggggctgagacgatgggattttctaaatacacatgtcatctgcaaacagggacaatttgacttcctattttcctaattgaataccctttatttctttctcctgcctaattgccctggccagaacttccaacactatgttgaataggagtggtgagagagggcatccctgtcttgtgccagttttcaaagggaatgcttccagtttttgcccattcagtatgatattggctgtgagtttgtcataaatagctcttattattttgagatacatcccatcaatactgaayttattgagagtttttagcatgaarggctgttgaattttgtcaaaggccttttctgcatctattgagataatcatgtggtttttgtttttggttctgtttatatgctggattatgtttattgatttgcgtatgttgaaccagccttgcatcccrgggatgaagcccacttgatcatggtggataagctttttaatgtgttgctggattcggtttgccagtattttattgaggatttttgcatcaatgttcatcaaggatattggtctaaaattctctttttttgttgtgtctctgccagactttggtatcaggatgatgttgrcctcataaaatgagttagggaggataccttctttttctgttgattgtagtctcagaaagaatggtaccagctcctccttgtacctctggtagaattcggccgtgaatccttctggtcctggactttttttttggttagtatgctattaattattgcctcaatttcagagcctgtcattggtctattcagagatttaacttcttcctggtttrgtcttgggagggtgtatgtgtccaggaatttatccatttcttctagattttctagtttgcaaatgattttttttacttttattttaagttcagaggtcacgggagtttgatgtgcaaattatttcattactcaggtaataagcatagtacctgttaggtagtgttttgatcctcaccctcctcccaccctccaccctgaattaggccctggtgcctgttcttcccttctgtgtatccctctgtactcaatgtttagctcccacttacaagtgagaacatgcagtatttggttttcctgcattagtttgcttaggataatggcctctggctccatttatgttgctgcaaatgacatgatcttgttctttttatggctgtgtagtattccatggtgtatatgtaccacattttctttacccattctactgttgatgggtatttaggtttattctgcgtctttgctattgtgagtagtcctgcagtgaacaaacacatgcatgtgtctctatggtagaacaatttgtattcctttgggtatgtatccaataatgggattgctagggtgaatgtaattctgttgaatttctttgagaaaacgccaaactgctttccacaatggttgaactaatttacttttccactagcaatgtataaagcattcccttttctctgtaacttcaatagcatctgttattttttggctttttaatagtcgccattctgactggtatgagatggtatctcattgtggttttgatttgcatttctctaatgattattgttgagcatttctttcgtatgcttgttggccacctatgtatgtcttcttttgaaaagtgtctgttggtgtcctttgcctactttttaatggggttttttttgtttgttaatttgcttaagttccttatagattcttgatactagacctttgtgggatgcatagtgtgcaaatattttctctcattctgtaagttgtgtgtttattcttttgatagtttcttttcctgtgcaaaagatctttagtttaattaagtcccatttgtcaattttattttttgttgcaattgcttttggtgtcttcatcatgaaatttttgccaagacctatgtctcaaatagcatttcttacgttatcttccagaatttttatagttttaggttttacatttaagtctttagtccatcttgagttgatttttgcatatggtataaggaagggatccagtttcaatcttctgcatatggctagccagttatcccagaaccacttattgaatagggagtcctttccctattgcttgtttttgtctactttgttggagatcagatggttttaggtatgcagcattatttctgggctccatcccattccattgatccatgtgtctcaagacagccagtaccatgctgttttggttgctgtagccttccagtatagtttgaagttaggtaatttggtgtctctagctttatattttatttgcttaggttcaacagtcaccttggctattcaggatcttttttggttccataccaattttaacatagtttttttctaattctgagaacatcatcattggtagtttgataggaatagcattgaatctataaattcctttggtcagtaggtccatttgaatgatattgattcttcctatccatgagcatggaatgtttttccatttgtttgtgtcatctctgatttctttgagcagtgttttggaattctcattgtagagatctttcacctccctggttagctgtatttatagatattttattctttttgtggctattgtgaataggattgtattcttgatttggctcttagcttggttgttgttggtgtatataaatgctattkatttttgtacgttgattttgtatcctgaaattttgctcaaattgtttatcagatcaaggagatttgggacagaaactatggggtgttccaggtatagaatcgtatgtctgcaaacagagatagtttgactttctcccttccagtttggatgccttttatttctttctcttgcctgattgctctggctaggagtggtgggaatgagtgtccttgtcttattccagttctcaaggaaggaatgcttccagcttttgcccattcagtatgatgttggccgtgggtttgttatagatggctgttattatttygaggtatattctttcaaagcctagtttatggagggtttttaacacgaaggatgttggattttattgaaagccttttctacatctaatgagatgttcatgtggtttttaagttctgtttatgtaatgaattgcatttactgatttgtgtatgttgaaccaaccttgcatctcagggataaagcctacttgatcatgatggattagctttttgatgtgttgctggattaagtttgctagtattttgttgagaatttttgcatctatgttcatcaaggatattggcctgaagttttctttttttgttgtgtctcttccaggttgtggtatcaggatgatgctggcctcatagaatgagttaggaaggagtcactcctcctcagttttttgtaatagtttcagtagaaatgataccagctcttctttttgcatgtggtagaattgagctgtgaatctctctggtcctgggctttttctagttcgtaggctttttattacgaattcagttttggaacttctttggtctgttcagggattcaattcctttctggttcaatcttgggaggttgtatgtttccaggaatttatccatttcttctgagttttctagtttgtgtgcatagaggttttcatagtagtctctgaggggttttttgtatttctgtggggtcagtgattatatcccctttgtcatttctgattgtatttatttgggtcttctcttttttcttctctattagtctagctagcagtctatccgtcttatttattcctacaaataaccaactcctggattcattgatcctttgtatgtttttcrtgtctcattttcatccagttcagctctgattttggttcttttcttctgctagctttggtattggtttgctcttgtttttctagttcctcaaagtgtgatgttaggttgttcatttgagatccttctaactttttaatgtgggcgtttatctgtgtcccagagattctggtatgttctatctttgttctcattacttgccaagaatttcttgattactgccttaatttccttgtttacccaaaagccattcaggaasagttgtttaatttctatgtaattgtatagctttgaatgattgtcttggctttgatttwtatatatatatatatwtwttttattttattattattacactttaagttttagggtacatgtgcacaatgtgcagcttagttacatatgtatacatgtgccatgctggtatgctgcacccattaactcatcatttagcattaggtatatygcctaatgctatctctcccccctccccccagcccacaacagtccccagagtgtgatgttccccttcctgtgtccatgtgttctcattgttcaattcccaccaataagtgagaacatgcggtgtttggttttttgttcttgtaatagtttactgagaatgatgatttccaatttcatccatgtccctacaaaggacatgaactcatcattttttatggctgcatagtattccatggtgtatatgtgccacattttcttaatccagtctatcattgttggacatttgggttggttccaagtctttgctattgtgaatagtgccgcaataaacatacgtgtgcatgtgtctttatagcagcatgatttatagtcctttgggtatatacccaataatgggatggctgggtcaaatggtatttctagttctagatccctgaggaatcgccacactgtcttccacaatggttgaactagtttacagtcccaccaacagtgtaaaagtgttcctatttctccacatcctctccagcacctgttgtttcctgactttttaatgattgccattctaactggtgtgagatggtatctcattgtggttttgatttgcatttctctgatggccagtgatggtgagcattttttcatgtgtcttttggctgcataaatgtcttcttttgagaagtgtctgttcatgtccttcgcccactttttgatggggttgtttgtttttttcttgtaaatttgtttgagttcattgtagattctggatattagccttttatcagataagtaggttgcgaaaattttctcccattctgtaggttgcctgttcactctgatggtagtttcttttgctgtacagaagctctttagtttaattagatcccatttgtcaattttggcttttgttgccattgcttttggtgttttagacatgaagtccttgcccatgcctatgtcctgaatggtaatgcctaggttttcttctagggtttttatggttttaggtctaatgtttaagtctttaatccatcttgaattaatttttgtataaggtgtaaggaagggatccagtttcagctttctacatatggctagccagttttccccgcaccatttattaaatagggaatcctttccccattgcttgtttttgtcaggtttgtcaaagatcagatatttgtagatatgcagcgttatttctgagggctctgttctgttccattgatctgtatctctgttttggtaccaaggttactgtagccttgtagtatagtttgaagtcaggtagcgtgatgcctccagctttgttcttttggcttaggattgacttggcaatgcgggctcttttttggttccatatgaactttaaagtagttttttctaattctgtgaagaaagtcattggtagcttgaaggggatggcactgaatctataaattaccttgggcgatatggccattttcacgatattgattcttcctacccatgagcatggaatgttcttccatttgtttgtatcctcttttatttccttgagcagtggtttgtagttctccttgaagaggtccttcatgtcccttgtaagctggattcctaggtattttattctctttgaagcaattgtgaatgggagttcactcatgatttggctctctgtttgtctgttattggtgtataagaatgcttgtgattttcgtacattgattccagcatataaacagaaccaaagacaaaaaccacatgattatctcaatagatgcagaaaaggcctttgacaaaattcaacagcccttcatgctaaaaactctcaataaattaggtattgatgggacgtatctcaaaataataagagctatctatgacaaacccacagccagtatcatactgaatgggcaaaaactggaagcattccctttgaaaactggcacaagacagggatgccccctctcaccactcctattcaacatagtgttggaagttctggccagggcaattaggcaggagaaggaaataaagggtattyagttaggaaaagaggaagtcaaattgtccctgtttgcagatgacatgattgtatatctcgaaaaccccattgtctcagcccaaaatctccttaagctgataagcaacttgatttatatttttattgtgcagtggttttgagtgtggttggtatgattttggcttttctgaatttgctgaagtttgtttcatggctgatttttgttgtgtggtcagttttagagtacgtgccatgtgcaaataagaagaatgtatattctgttgttttggggtggagagttctgtagatgtctgttaagtgttaagttcaagttccgaatatctttgttagttccctgccttgatgatctaacattgttggtgggggttgaagtctcagtgttgaagtctcccactattattgtgtgattatccaagtcttcataggtctctaagaaattgctttatgaatctgggcgctcctgtgttgggtgcatatatatttaggtctccttgttgaattgtatcctttaccattatgtattgcccttctttgtcttttttgatcattattgttttgaaatctgttttgtctgaaattataatagtaactcctgtttttttctgttttccatttgcttggtagatttttctccatctgtttactttgagcctatggatgtcattgcatataaaatgggtctcttaaagacagcatacagttggttcttgcctctttatcctgcttgctactctgtgccttttaattgggacacttatcccatttacatccaagattaatattgatatgtgcagatttgatcctgtcatcatgttgttagctgattattatgcagactcggttgcgtgattgctttatagtatcaatggtctatgtatttaagtgtgtttttgtggtgaccaataagtctttcctctccatcttaagcactcccttaaggacctcttgtaaggcaggtcaggtgataatagatttccttaacatttgtctgtctgaaaatgatcttatttctcccttgcttatgaagcttagtttggctctgccacgaaattattggttggaatttcttttatttaggaatgctgaatataggcccacartctcttctggcttgtagggtttctgctgacctgcctttaacttttttttttttttttcatttctaccttggagaatctgatgactgtgtcttggggatgycatcttgtatagtatttcacaggtattctctgcatttcctgcatttgaattttgggctctccagtgaatgatctctttaaactacataaattgctagaaatctctgtattccttaaatactttaaaattatgctttaagatagtaaagtggaaaaaaatgagttttaaagagtattgctcatgaaaacactgagaaccctacagtgtgatcaggaagaatcaccaggggagtgagaagactgctaacttaaatacctctgctgctgttgtcagtattctgttgtgaccttggaccatttactttcatatactcattcattcagcaaatttttatttaggtttgtcagttttcatttaggtctatactggtaaatagaaatagtcatgattttgctctcaaggagcttataatctagtgggagggacagacattcattatataatgagagaaatagatataaaattacaatgatggtaagtattacacagaagaggtatatggtattgtgagaacatatagtaggagagttagaccttattatggagatccaggtagtgacaattgttctgaaatctgaagactgagtaggagttgaactaagcaaagagaagagaataaggaaagggcattctaggcaactagaacagaataagcaaaggctcagtagatgatgggccttgggaagtatcagggagagtggtggggagagtgaggcagggcatgagccaggacttgggaggtaggggccagtccttgcagggacttgtgggccatcttaatgagggctatctctatcatgagaggggagggaaaacgttaaagagttttaagcaggcaggaatcaaaatcgggtctcacagctgcagtggaaagtggactagagggcaggactgggtgacagtagcaagctaggaggccattggatgacctcagagacataatgtggtggtggaaaggatagaagtggatgggtttcagcggggatttaggaggtagtgtcaatggaaggaacagaaggaagagtgggytggtcaaaaatgtgcctaggctttagaaaaatggatagtggaactcatgctgagatggagaactccaccaaagaccagctatgtctagtttgctacattctgaaattgaggtgcctttgagactaacaaaaagaaatgtccaggaggcaccttaacatacaagtaagatgctcttgagagctccagacttaygtttcccaaagggacatgatctctcctgcctgggtcttcacagcactttgtatgtctcttgctgccaccattaatggtttctgtttaggatcatgattatctttctgtgccatctgtcatttaccaagtgaagtctaagtccaaaagtgttttctcagtagcactaagatttagtacctttgaaaatacagttatgtctcactttacataatagatgagtattgggttgtcttgaaattgaccttacaaaattgagtgtatgtagaggggaagggcttaaatccatggcccagacacttggaattcctccggagtctcctgcttctgtttagtttcggttctggtactggccctttttcccagttacaggcttctaaggtgagctggtctgctcaagtagaggaaagggtgcttacttcaggtctggcctttctagaagaggcagtaaggcatggagaattccagtctgggctccaagactattgccttcctctaaaatgtctcaaagaaccaaaaaaagttcttcccttgagcttcagattacactaaggcagagatagaaagatggacccttgacatacagacttgtcayggggtttgtttggggccagctccccagggaagtcttggtgacctttccaagtaataagggagagtgagtctatgmtttggttccttattcgcttactcatggcatagctcagtgaagcccagaatcactcagatttcaggccattgctcttttagttagtaggttcagctgctttgaaatatctagtgtagagcataatagcagcttattaggcgcctttattataatagtttgggacccttgtgagggatcagaattcctaattacagaatccaaaggatrtagctttcttgactgttcaaactggcagaagggtctgagaggcccagatgggataagacttgttgttagggcttctaggtcatggtgatgctcagacacaggcccatactggaattataccatggcggttcttccaagtggttgggacgtggggcggcaggagtgtgtgtgtgaggaggtgtgcccttagctgaaaggctggaagactagttggacagaagtccaggatgattgcattgggaaaaggaagtcgctggactgaaatcctctgagtgcatggggcataattcatcctgagtgccatcatgacctgcctgagacaacaggactcttctaggccccatttgccagcagggagacttctgccaatatctgtggaggtgtagctctctttggctcaggtctggtgtgatggggctgctggtggtactctgtattaggttggctgaagcacagtgcctgcagtgccttaattcccgttttagaaagaactggtaggacagggagggaagagttcaaccttgcccatccaggtggttgcttctgagaagaagtgggcaaggaaacaaaatggacatctcaaacagctattgagaaaagaggggatggctctaaacgaagccacagtgcagatcacaattgtattagtcagagttctacagaaaaacagaaccaatatgatatttgtgcgtgtatatatgtgtgtgtgtctgtgtatgtgtgtgtggagaggggttggggaacatggaaaaatttttaagaaattggctcatgcagttgtaggggctggcatctccaaaatctgtagggaaagttggcaacagcctagagattcaggtaagagttgatgttcagtcttaaattcaaaggctggaaactcaggaagattttctgtatttcatctggaggcagaattctttcttcttaggagaaacctgtttttgctcttaaggccttcaactaatttgatgaggtcccatccacatttatggaggctaatctgctttacttaaagtcaatttatttactgtaaatattaatcccatctaaaagaataccttcacagcaacacctagactaatgtttgaccaaaaaactgcacagcatagcctagccaaggtgacacgtaaaattaaccatcacaacaacgcccatggaacattgtcatctcttaaaggaaaaagggtcattaggtaatcattttacccttgagagagtggggagatggagggagggacagtgttgtccttatttktggggcttatttatttcaatctttagctacttcttgaactttgagtcttccattggcccacactagggtggcatttgggtggctgacctgtcatagatcactcccttcttaaaggctgctatcatttgtattagccagagtcccaaactcctggtccctggctggggcccatctaaatacatgaaaacaccttaaggatagaatccacatctgttcattttggtagtccatgttgtctagtaccttagtactgagtcttaaatataatggacattattcattaaaaaaatcaaagtcttccaagttcacacaaggcattgtgataggtgttggagtagccattgaatacgcacacacacacacacacaatacatatacgtatatatacacacatatatttatttattgagtgaattatttcacaccactttatgttatgatttgtattttctttttctcctgagtagtggggaatgatttcaaactagtatatcctagaacatagtcctgtaagtacttactccctggctggcattcatagttcctgtgatttgcctcaggttacttttcagccctcattgttcccctcccacagcctgaactcagaccacaccacactagcttcccttcatagtcactctggaagcattttcactctcatgacattccttttacttgaaatgccttttcttgccagttccttcctsttttaatccattcagatctattattccatggaggagctcaggtcccccactctctctgaattctgaacatcacagccctttcagaaacctcttttacttatggtagaccacttaggtatttcttatagcctctataaggttctagaagacaaggtgtgtgtctcattgcagattgtagccttgcccagtattttgtactggtgttaatgaagtaatactcattggagcctccagtagtccttttgtattatgtttgatacatgcttagtttgcccaggccaccattacaaaatatccttgactgggtagcttataaacaatgaaaatttatttctcacagttctcgagggtggaaagtccaagatctaggtgccaatagatttagcagaggttaggactgccctctgcttcatagatggcacctaatcttgctgcatcctcacatggtggaagggacaaacaaagtccttcatgcctcttttataagggcactaatcccatttattagggctctgccctcatgacctaatcacctcctataggccccaccccttaatattatcacattggggattaggttacaacatctgaattttagtgagacatagacattcagaacatagcaatacgtaagttaggaatctgttcagccaatacatataattttgggctgattacccagtttctggactgtcttaaagtttgcttttctttgtgtatttaaaatgtagtaaaaggacaggagaagaaataaataccctaccctttttattgttgagaggtggacaacttacaaaaattaatcgaagatttaaaacaaatgatggcaagacagattaaaagatattgtgacttatgtatctgtggtcctcaatttcatcaacactcacaagytgagtaagatgctttgctctggaggctggtaacagcaatccaaaactttattyttcttattactcacagttctgtttcagttagctgccacttaggaactccttgtctggtgagatgagaggagagaaagagaaaggcatataatgggaagtagcaaaggggtggactgaagcctgccttcatttcttttgcagttcagtgggtttgggtcagactagatatcaccactgaaagggagataactgttctaactgtggagaagttctgttgtccacagtgttcttgaggatgtaacgatgtaaggacattcttacaagctcattagttttcttaccatagaggcactggcatgctcagttgccagaggacatcgtgtcagtgcaacaagcccagaatcctggcaacaattttatatgttggaaccttattgaaaatgacttttcacattaggaggtttcgttggcagagaatgaagcagactttgccctttgccaaagcataggaaaacttgtgcttaattttcttttagccagcccttgttcttcttttagaatctttggtggatacggagatacttgcccaaagagaataattgttaagaaaaggtaattctaaggaatgatgccttctttttggaatatttactcattcacagcaccagcaatttgtttttattactgttgttgccttattgacttttggatggtaagccgctrgaccattctaagcccaagtagggatctctaaatttgattagtatttcaaaatcacctcatgatgtgacttacgtattataggccacatgtattttgtggttaaaagcctcaattaaatctatggcatgaactgtcagtttcttttaattctcatggctatgttcccttcatcccccagggtattttgcatatatgaaccctatttaaaatgtggtttaatttgaactaccactttgaaaagtaaagtttatcaaatcactttctttttttttttttttaatcattcttgggtgtttctcgcagagggggatttggcagggtcacaggacaatagtggagggaaggtcagcagataaacaagtgaacaaaggtctctggttttcctaggcagaggaccctgcggccttccgcagtgtttgtgtccctgggtacttgagattagggagtggtgatgactcttaacgagcatgctgccttcaagcatctgtctaacaaagcacatcttgcaccgcccttaatccattcaaccctgagtggatacagcacatgtttcagagagcacagggttgggggtaaggtcaccgatcaacaggatcccaaggcagaagaatttttcttagtacagaacaaaatgaaaagtctcccatgtctacctctttctacacagacacggcaaccatccgatttctcaatcttttccccacctttcccccctttctattccacaaaaccgccattgtcatcatggcccgttctcaatgagctgttgggtacacctcccagacggggtggtggccgggcagaggggctcctcacttcccagtaggcacggccaggcagaggcgaccctcacctcccagacagggcggctggccggacggggggctgacccccccaacctccctcctggatggggcagctggccgggcagaggggctcctcacttcccagtaggggcggccgggcagaggtgcccctcacctccgggacggggcggctggccaggtagggggctgaccaccccacctccctcccggacggggcagctggccgggcggggggctgaccccctcacctccctcctggactgagtggctggccgggcagaggggctcctcacttcccagtaggggtggccgggcagaggcacccctcacctgccggatggggcggctggccgggcggggggctgaccccccccacctccctcctggacggggcggctggccgggcggagacgctcctcacttcccagacggggtggctgctgggcggaggggctcctcacttctcagacagggcggctgccggccggaggggctcctcacttctcagacggggcggttgccaggcagagggtctcctcacttctcagacggggcggccgggcagagacgctcctcacatcccggacggggcgrcagggcagaggtgctccccacatctcagacgatgggcggccgggcagagacgctcctcacttcccagatgtgatggcggccgggaagaggcgctcctcacttcctagatgggatggcagccgggcagagacgctcctcactttccagactgggcagccaggcagaggggatcctcacatcccagacgatgggcggccaggcggagacgcccctcgcttcccagacggggtggcggccgggcagaggctgcaatctcggcactttgggaggccaaggcaggctgctgggaggtggaggttgtagccagccragatcacgccaytgcactccagcctgggcaccattgagcactgagtgaacgagactccgtctgcaatcccggcacctcgggaggccgaggctggcggatcactcayggttaggagctggagaccagcccggccaacacagcgaaacctcgtctccaccaaaaaaatacgaaaaccagtcaagcgtggtggcgcgcgcctgcaatcgcaggcactcggcaagctgaggcaagagaatcaggcagggaggttgcagtgagccgagatggcagcagtaccgtccagcttcggctcggcatcagagggagaccgtggaaagagagggagagggagactcgggggagagggagagggagaggcaaatcactttcaaccatgattgtgataatttatatttactagaaatatgctcattaatcaataatatattgatcaagtagcaaaaatggaagcaagtacattttcccccaggttactttccattttamtttaagtgaattttatatcagttaagtttttttgtttctcttttaaaatcacarcatacgtcaaaggtttatattgatggtctagaaaaagagtcaacagtaatctaatgactaaaattgcaaatccatcttcattttcactgactaggagaaatgtgtaatgtcagtgttaacggggcatcatatggagtttaaaatagtaatcaagttttctgtgagtttggttatttggttcaattgtaattgttctatctttgtgtacatatctataggggtatcttctgaaaaattcttatttcgtttgcagcatgggcaaaaactgtatttgaagattaatttaattactaactttcacatcttagggttcccttagtacaaaagtagttgtggtccactttatttcacagtgctgtttatacaagaaccatgtgatgaattgcatcttgaatttagttcctgaaagtctgtgcaaggactgttgcttgtttaattttgctgggtagtaaaagatgtgtaaccctgtgtattgccatttgtgacttttctgtaacaaaaatttagtatctgactattgctgtttattcacctcaggagtatggtgatatcttatcccaaagctccttttagatgttctatttccttcatcttaaattatcctcttttatattatgctgtgaccataggcctcttcagattctttgtaagtaggctgggtacatatttctaaaaatacgttttctggttaatagtttgatttctatggaagtggtgcaaaggaggaatatctgaagcagagaatgcatttgctttatatccgaaaacccagagtccattagaaaaatgtatggcacctgggagacactttgtaaatatctgtccagttgaagtgaatataccacataaatctttcttcaaattttaaaattaagacctgtcctgtattagtgcctctttgcttcatatagcctctgccctctttttcatcgtatcaattttaaagcaggtttttaggaactgttgtttatgccccagagaattctgtgagagcttctgagccacagtgttcaagtgacttgccatttttttctttccctgtttggggggtgtatgtgttttcaggtggaggagatggtatctgtcatcatcagtgcagcacatttatcaaatcccgttaatacagcccaaagccaagacagaaatgcacacttctgtgtaaagtactctccaagatttttgaattgagaagcaagtgtcagaagtaaatagagcctgggatggggtgttgcctgggcctgcctgatttgatatagtacgtagtgtctagcgattatgtctcctctttttcctcttccttaagagccccttaacacagtgggatatgacttcctttttaaacagcattgaccgctcctgcgtcatagccaaattttcttctctttcctttactgaaaagagaraagctgttctacagctacgtattttcttatttgaaaaataaaggaaaaaaaaagctatattcttagttgtttctaaaaattaaatcccttcttccttctttaatggcaaaaataaatttactttaattcatgagtatatttttatttctgtataactgtggcctcacccatatctacatttctgtattttatgtaaatactaatctgttatctaccattagtgggcttttgttttgaattgtttttccatggcaatagtatatttttgtctttaagtttttatattaatttaaacatgatataaagtatatactaaataacattttgaagaaaaaatcccactaggtctaatttctcccacactgctaatttcattagtgcgtattaccttgtacacatattaagcatagttgttactaaaggatgtgttttgttttctttagggttagacttgtcatgattcagcagtmcctaactaatccattttcctttggatttacaatgcctaaccaagtttaaacgtctataatttatggccatggttcaaagcagagtaagtgactcttgtgggaataaagtcacccatatgggatatgagcttcagtgtctttagaactctgcttgaacttgggccgggcatggtggctcatgcttgtaatccctacactttgggaggccgaggcgggcggatcacctgaggtcaggagttcaaggccagcctggccaacatggtgaaaccccgtctgtaccaaaaatacaaaaaattagttgggcgtggtggccggcacctgtaatcccagctactcaggaggctgaggcaggagaatcacttgaacccgggaagcggaggttgcagtgagtcgagaagaaaactctgtctcaaaaaaacaaaaaaagaactctgctctaactctaaccaaatgagatggtgagaattgtccactactaagtcaatttataatactaataatgaccaatttaaagtcagaagactttaatagggacagagaaattctcactgtaaagaccctttctactttatctagaaaagtatcctgaaacatttataagttatcatttgagcacattctgattgttaattaatgtggaatatgcctaatgctttcattgcattttgcagtcacattttcaaatgtaatgattttgtacgtcaaagtgggtcagcagcaaattgtattttactgtatattatgaagacaatcaaaatatgaaagatatttattttcaaccatttaggtaaattgttctttacactcaagacaggaaatgggataattctatggttctgccagaagctatgttattatgtcttttggttcatgaacgcgtggagggtrtttctttactaatatgcaaagcttaaataacatagccccagttgacaggtggtgttacttatttttagtagaaatgaggaatagcctaaacagagctaatttggttttttaaattctgatatttttagagaagaaataaggctctaacaattctaagaataagaataacttgccactagctattttcactggttcttcctttccacttcatttattgattctgcttaatagacttataattggttgtaaacttctggaatttcagagaaataaggttttattaagtaataaatcatttctgtgtttctttgattaaaagactttcagtgtgggcagaattgttagagtttgttgtttttatatggatcttttcaggatttatctgtttgtattaatctgcgtggtttctaatctctgtaaattagaaaatgagctgatgataaatcataattgacatggaaagtcagaaaaaagaggatgtcaccaatagcaaaaaaggattatgacttaagggttrttatttaagaatcagacctggccaggtgcgctggctcacgcctgtaatcccagcactttgggaggcccaggcaggcagatcacgaggtcaggagatggagaccatcctggctaacatggtgaaaccctgtctctactaaaaatacaaaaaattagccaggtgtggtggcgggcacctgtagtcccagctactcgggacgctgaggcaggataatgatgtgaacctggaaggcggagcttgcagtgagccaagatcacaccactgcactccagcctgggcaacagagcgakactacgtcttaaaaaaaaaagtccctattatccctaacactaacaatttcatgaataaatagattacttgaaagaagctaagataactgttttcatgaagtataagcacaagaagtttcattccctgatttctgggcataggattgttatcattttcaaagagaattgtttgtggaattctttacttctcttcgttcaagtatgtagtagcttgacctgtatgttttagttattttagggctcaagaggccctgggaagcattctctgaattttaaggctgggaatggtagctccactccgggtgcctatagctccctgggcatacctctatattagcttctaattacatwgtcttgaaattatttatatctttcatctccactacatgcttttctagtacttccatagtacgtggcccacaacgcttaatcattttttattgaattgaagtaaactaaaggccaaaatagaaaacataaaataggctgtcttatctctgaagttaacagtatacttgatcaatgtgatattcgatattgcacacatagaaacatcaaagggtaaaagagagggaaatttttagcttattattcttatctggtatcatttttagtttatttccttagggagctgagaggcctgtatctctgtctatgcttaatttgtgtactcccaatgcttttgtctccaaaaagggactctatgaggaggacatagtgttattgcctctatattacctgtgcccaggcactgccaagagaagtgaaaactgtgcagttcctaggagatcrcctttcactttatattaacttattcttagtagaaggcataggtgtactatattcacctttagtaagagcacatgggaattaagcatgggatagtgcacagttgtttccagtggcagctgctgagggctaggcaaaagaaacagactggtcatcaacattgagggaaatgggacagttttcaatattcccggcagccccttggagataccaggaggaagagaacaaaataaaaagctagttaatggaaccatgacataagaagcccataagtctgagcggctttgggcatgttattgggagtggctagtggagccaagacatagggaactctagtctgggtgggagacaccttgtccaaccaatatgaacaggcacaaggagctgtagggggaaagcagccagccatcaacccaactgaggaaaaaaaatgactagaaatgatgttggactacttatagctttgtcgttgtggacaactttcttagcctccctgagtattgggtttctttgtagaaggtagaagatagtatcaacatctcagaggagttgggttcacacaaggtaatgcatatggttcccctagtgctgggcctggcacaccataattattcactatgttagttccttccggaccctacagttctagtgtgaaccaccccagagatgaaagggccgcatccctagaggttctttttttctttcttgaaagacaagatctcactctgtcatccaggctggaatgcagtggcatgatatcggctcactgcaacccccaccgcctgagttcaagcaattctcctgcctcagcctcctgagtagctgggattacagatgcacaccaccacacccagctaattttttgtatttttagtagggatggggtttcaccgtgttggccaggctggtctctaactcctgacctcaagtgatctgcccacctcagcttcccaaagtgctgggattacaggcatgagccatctcacctggccccctaggggttctttagctcctgcattagggatggtagaactgcttttaaaactctaatggaggaaaagcaaatgagaacctaacaattgaccaaaaagagagacctattagagaaacgtaggatggggatcaagctgacgatagcccgtcaagtgtaccaggagtccttgttacatacagctyctaaatatttggtatacctaatacatgtttatgatttacagttcatctatctctttgctttataaatagagaagccatttgatatagaaagctatgtatttttaagaggaactagaggaagaagtctgacatttatggggtctgggtgccagaccccataaatgtcagacttttttttcctgtaccttcattattttatttgactttcacagcaaccttgtagaataaattattatccttgtgtaacggaagaggaaatcgaggccaagagaggacaactgagtagcctgaggtcatcagctcctagcaggcagagccagacgtggacccaggtctgtcaggtgttaatgacagtgctctttattggcccacatttgctgaaattcagaaacgcttcctagcaggagaggtttgaagagcaggcacagcagcccctctgcactgtgagtgcttggaaggccagggctgagttctgcttggtaaccccagagcccaggaacatctggcatgtggcagtcttttcagtaaatatttactgaatgaaagtcacaagttaaggtagaaaactatttcagacagtgatagattgtcagcagtatgaaatttatcatctttacaacattgttgaattactgaaaaatacgtgacatttattaatacaggctctactcaagtggctctccagsagttcaaagatctgtgtttagaattggacaatacatgaaaaactgacactaaataagattcaaaatatgccagtaagttttctaatgactaaagagacaaatgctgcctttggagaaaagtaaactgatcacaagcctaaaagtatattttaaaaagtaatgtgatataaattttgattcacgtattctcttcttttctctcaaagtttaaatgtttgaaagttaccattatggagattataaaaagcactatttgtcttttactaaatgtaaaggacagcacaaacaactttcaatagatggaaaattaaagtaaatgtaataatttaaaaagtaaatatactatgccagttcttggccaaataaatgaagctattagctgtgtgctttrtaaggattttgatggtaaaaatataaatgaacgagcaagctaaacattggtatttcattagtaaccagagaaccatggatttgtcaagcctgggatccgatggaaattctactaggctaaagaaaccaagttgtagtccaatgaagattttttgctaaaagtaaaaaggtcgtggagtgtctccgctctgcacaactgtattggaattggttgaataactcagttcctccttccccagtaaacaggggcttcaacacaagagccagatacatttaaaagcaaaagacatctttttcttttaatttggtcggggtatatttagaaccaacagaaaccagttctgtcatggtgaaggaaagagcgctttaagcaccctttcatgtgagtgcctttagtgctagttgacttttccttagaaattcatttcacagtcttagtgaagatacaccaagtattttgcagtttcatacaacttttgttgagattgaccatttccttttcttgagggaaatggaatccctcttgagttctatgaagccattgctgacggtggctgcggtctgggtagtcttttcagtggacagtggcatcggttgtcaaaaggaacttgacatttatgattaccacaggttgaaagaagctaccatcttttttttggctgtgtctgtactgcagttctataaatggtataatgttgtggccttcaggaactacaaattatttttaagtggttatcctgactgagcaagctgatttgtatcaactaggtagctgaaagtgaaatgtaatttgcatctattaagcctttaaactttcaagcaaaatatgcttttcataacatggaggaaaaaaaaggtattcatcattttcataaattaacctggttgtaatattagtttttaattccatttcaagttatatttgtgtcctagcatacattatagcctcttagatactatcaggcatatgaggtcatttaaatagtatttgatgatttatttggtcaattattatagagatctataatagatgtctataacagagctgtttttgttctctctctctcacttttttgagaacagttgtaacattgctttctctttatggcatttggggtgatttgaggtgagtgaacactgggatttttagcaattatgttcatttgtaatttttaaaggtgtaagacctacaaaatgttattcttccaaaaaaatttatattggcctcatttacatatatgaatgatagtccctctttccagatactcatttctgagttcaatgaatatttggtgagtgctttctttgggcaaagcaccacattagaaaagtcagggtgaatttggaattaaaatatgacaagtccttgcccttaaaaagcttatcatctagacctgcactgtcagatacactagctgctagccccgctttgattattgagcactaaaaaatgtgcgcagtccaaattgagatgtgctgtaaatgtaaaatatggtggatttcaaagacttgaaaagaatccaggtatctccataacttttatattgactacatgtggaaatgatagtattttggatattttgagttaaataaaattattgaagtttattttacctgtttctttttagatttgttaatgtgactagtagaaaattttcaattacatatgtggcgctcatacatttttggacaccattgatgtagacattgtctctgcttcctcccaatactgtcactaagggaaagtattcatctacccaaagataattaagtgtccaccccataaatacaaatgtttataaccacaaacaatagcaatagaagcataatgatttcttgttagccctttaattggcccattattatgtaaatatgtagctagatagcgtagtttttttttcactgtatgataaaaaatagtagtaatgctgaaaccaaggtttgtaggtgctcagacaggataggaataataagaaaggaaagaggggaaaggatggccattctcatctaataatgattgcctgaagcatgtaaagatgtcaaggaagcgtatctgagattgtcactcaactgggaatgatataggcagaggagatagctctgatcaaatcctcacaaaatgcattatataggagagaatgatgaggatgacgatgacgatgatggtgatgatgatagcagtagtaatgtcaaccacattaattatacttgacatttattgggagcatcagaatctttagtgggcatttctaccttatcttgtttaataacaacaaccctaggatacagtactattattgtagtccctgttttagggttagctacacaggaagggctggtgcagaagacagaccagagcctgacacccagtctttttcacttaggtactctataaagggctgcctgagttcatgcattttaactcccttctgcattggtggtcagaggccctgcggaagcattagaggcatcagccaaccaactttccttttatgagagaccaaagtgtttgtaagcttgcaatgagctcttaaaaggcagctttgtgtagtttttactatttaggtccaagagattaacttggaagttaatttcagtgaactcctttttgcctttccagtaattccagtaagtaagactcgaggacttgtaatgtaaaaatcttagttaggtcagcctctacagcgctttcatatttattatctcctttgtgccttatcaaaccctttaaagtaattaagaacaagtagttattttcttcattttataaaatagcagctgaggtttggagaggtttattgacttcccaaggctgcacagtttgagcattgagtcactcggggtccaactggaaaaagaacatttaaaatagagataatttaatataaggaattattacaggtagtggaagaaccaggaggccaaatgagattgagattggtgatgccacccaaaggttgtcaacagcagataactatccccacccacaggatagagagacagggagcaggtgatggggctttgggaactcagaggggatgcagcgtttgctggagacactcaccttgccctgcagagagaggaggagggaaccacccattccccggctttgcccttcttcttacccagccttcagtctgctgtcagagcctcatgtgcataacccagtgggcatccagctgagttgggatctgaagaagtcttccatgagggctagccctgtggctaccgaacagagcaggggaggaggaggaggaactgacctgcctgggtactatttaacctctgaaatgggatgataggtcctgcttcacagagttgaggattcataatagtagctcagtaaaggttagctcacctcctttccatgggcacaactgcatttaacggcagacagtagttaccatgtggcttgaaaagctgaggtatgtggtggtgagaattattaggattctgatcacctctctgagtgctgtgagctactgtggatttttctggatcatgggttttattctccatactttattctcttcattctttttgaaatgttctttttaattcttaaagaaaaattaattgataaagaaaatccattatatcttctaactcaaggaaccttccagttttgtctggaagtatggggtagtgggtcacaagatgagactgcccctggagaatggatacaggccatggagagggttggttttcccgtattcctggttgtatcttattttttatagcctgtgttttcaagttttagtcttattaaattaatgctttcaaagtaatgctttcaaaagtacaactaaattacttaaaaaataaatttataattggaataaaacatggtttagctaaaactccagttctttccagaggacaaaatgtgatttctgtgttgccattataattttcagtaaacccaagtgaattttaccatcatatttagattgagggaggaggggagatgattcaaattacattaaaagataatctaatttttaggtgcatttcttaagtgccatgagccacagactcaactcagcagccctgcaaagaatttctgaacttgaagagttgaattttcagatgatggagggatattagagagtccaagattgtcagtggtgacatgtgatagtagtgatgtcatatgtgtgtaatatattagtgttttgacttaaaatgagagatacaatacacatgcatatgaacagggcagagggattgggtggtgatcggggtggagtggtgatggccctgattcaatcatcagaaaaactgaccagtgatctcttaagaaggtcacctggaacagcccagccatcagtgccttcacccttcctggcacctcacctcctttcttcagctctgagaactcacatttaacttctaacatccgccttctaccactgtgttccctttgtgaagggaaccactaactgccctccacagtgctcaccacacctccgttatcacatccagcaaataacccccatttgcatctcttccccatttgtgggctatacaggcattgtggtgagataggtgagaaggccagagtgtgggagaggcaagagctgagattggagaatctgaattacagcatccaaaggtgtgtggtgagcacaggccagtgcctgcagggctccccttcctggtagccaagcaagagcaggatcctgcatagcgaagcaggtggccacattgtcctccccacaagatccatgcccatcagaaggaaattccagccaagggctgggcaaggactcagttctagccaggcaggctaaggattggattaaggatccatgcccatgaaggggcagagggtagggagaactgtagccagcctcaggaaataaacaaaamgcagtcataaggattcagccaccatgcccaaagatacacatggctgttcatctcctgggttcaaggcagcaagactaagccagacttcacaagcaggtagaagtgggttcctggcctgggtagcatggactcccagactggacaaggtgaagcctacaggttgaaaggtgaggagamctttggtgaagcctacgagttgaaagtgtccagacagactagaactggcaacctgcctgactgccagtcaggatgagaatacccctgtagctgagattatactttgattgtacctgcatttccagtgcctgggacttagaacttaacacattatyaataaggtcactttcaggtaggatgatcatatgtttcagtttgcccagggcagtccctgttgatgtggcatgtttattgatacccacattcactctttttaactgtcccactttagatgtcattctaccttgggtaatatagttcaccagttgctggtggttccagccattcctgtggtttgcaggtgctggggacctcatgtgttccctcctgtcagaaccttctgttgggacaccatttcattcccagtgctctctctccaaaggtctcctctctaagtagcttgaactttagtgagtcagtatagagttgcgtaatggactgaagggtcagcttcaaaactctggaattaaagccttgttagaattggtaattggtatggcagcctgactcttggaataaggatagcatcctgcttwttaataaggggatttggtaattagcttgcaggtagaatttgtccatgtttttatttctggataactttaatgaaataaaatacagtataattagatgtggcattttaagcttgcattataatacttttatgtaaaatctaagcatgacttataaatgcctatattttattctcacatcagcatccatattaatgcaaggcccttccagttccaactctcaaaactactacgcagtgtgtactttgtaggattgcctgagcttcttggttttatagtctatataaaatggtatagagaccctcttaatcatatgttctgtggcatattatttaaaacatgagctaggttcaggaagctgtatttagaatgaatttggtgcctgtgtgaaattaattgtacatttacccctggtaattttctctcagtagatgggacttaacagcagtgaggcctggtaatggtgacacaagattcattgaagcagttaaattgctttagtcactggcagcatatgccacttaaaatacattaatgatgagattttgctggtttttaaaactgctttttattttagtttgataagctaattaatttggaagggacttatggttttagaaaggtatacagtgattcaggaaaatggcagaactggaccttctgcagtccaaattcacattactctattttgcaaatgctttagattaatcacttgagtcttctggattcgggccatgcagatattgacgtttttattgatttcttaacccaagcatggcttttaattaaaaaaaaatggagcttactatgggtatgacataaagtggatgtatattgttgctctctgccaagtagatacaaagactgtgagcatgtctgtgccacttcagcagatgtttgtgttaggaaatctttcatttgcatataacacctctaagtagaaaagcagtggatttgagatttgctggaatttttaaattactcattaattttgcaaagtggatttacagcaatgcatattataacattttgagataattgtaattattttaaaactgtttttaaaatatatagatttctacttggtgtttgaaatggtgatcctacaagtggtgctctttgagttcattcattcattcattcgggggctcaagagacttgatatttagcttctgacatcccccttctaccaccgtgttccctttgtgaaaggaaccactacctgctctccacagtgctcaccacagctccgttattacatccagcaaataatccccatttgcatctcttccccatttgtgggctatacaggcatcgtgatgagataggtgagaaggccagagtatggaagaggcaagagctgagaytggagaatctgaattagagtgtccaaaggtgtgtggtgagyacaggccagtgcctgcagggctccccttcttggaagccaagcaacagcaggatcctgcacagctaagcaggtggtcacattgtcctccccacaagatccatgcccatcagaaggaaattccagccaagggctgggcaaggacttagttcttgggaacttgatcccctgcatgaatttttccagccagaggctatttaaacatcatatgtcctttagtgtagtttatttagggtgttaaggcagaaacaaaataaatgcctacatgtataagctggtgattcttagtgtggtaaaacaaaagagacttcttccgtttgttgaccttttaaaacaggtggtgagttgtatttgcacacaaaggggaaatgcagatgattatcagttttgtacawatttgtatttgttctgtctgcagcccaggaaygtgcactctcaggccgcagggccttctctaaggaggtgctggctcccctcacaacagaggcaggctagcttttttctgatccttcccccaggcttgtgagcttcttccaacattgcagtctctttactaccccaaatccatgtaattgttgttcactctgattggctttctcttctccacataatatattaaaatctaatatttgaagttttgtattttaaaccattttgattttagcactttagctgtagactttggattacattactaaaattgggcttattttttttccattgacaagtataatctgctcttttttgtgatgtattagacaactctatgtgtaatgtggccgtaggctccgtggaggattcaataagccaaaaataaattttttcagcctgaattctgcttcttaaaagtgtatactctggttgggaaggtttacagattttacaaacatgtgttgtctctatggtactgactttaagcacaaaaggatttaagagaagagaggttagccacactcaagtaaagtaaaccctttcaccgaaggcctagggtttcagccagacctctaggatggggccacatttggagatgaaaggttaggacagagaataatatgggcagggaaatcagcactggccccagaagtggctgaggaacatagatatcctactctgggaagctgcaatctaacctggaacaattaggtgagcacacctactgagttgttttgaggaatagaaagaagcaaaacactgagtcccaggcttagcacatggagagcactcaagaactggcagaagtagccattgttgcaggaatggttatagtgagaggagtgggctgcgactcagggcatcaggagacttaggccttcccgtaggcgagactgacaccacatcctgccctggactcagggccttcctacccaggaaggaagagagtagaccacyctcttcccttccagcctccagctggacacctgtaggcaagttaccttatctctctggaactgaagatcttgataatactcgtgttataggattgttgaatacatagtaactgtgtaattaataaatttgagctatatatgattccaaattcctaggccagaagattcagacagtgggaccataagggaaatgggccagtgacataaggaagctggtcaggaagccagggtgaatttggttttacaggaatttgaggaaagagctgaaaaagagatatggtagagacccaatttataagtcagaacacagaggatgctgttatcaaaaaaaaaaaagttttgttaacagatttatctccatgtggccgtttggtaggcagtgaacattttgttacagaaatactcatttgaacattgactggtattgctatagaattgtaattatttgatttttaaataaatattatagataaaacagccaaagttgaaaaatcttaaaatttaattatttacctatctgtccttgtactatcaactttgtcttcatactattttacatccaaaagacctcttgtactgagatgtttcgaaaaattcttttgaagatgcttgatataaaagttatatgatctgtcacccctcaattgaagaaacaaaaaaatgacttatgcttcttttaaaaacacatataccttacataaacagttattttgataagttaaagaattagcttattttgtctttcttttagttccaaggccatcattggctttattaagatgaccagttcattgaaaagattttctattctgactatcaaaattggtccggccagaggctatagaagataaggcccattccctttaaaagtttaccttctacttgaggagataagactgacccacataaaacaattagataactgaataagactgtaattaattatgctaaattacagggtagacactataaataccgtaagagtttagagaagagagaacactgagggctgaactagggtggctcatgaatggtttggaacttatgagtgttttgtagaaagctgagtttcccttttatgtaattcattatttagtttcttttcttatttttccaatctaattgtccccctccacatacacattaatttcttttcttttttttttttttttgagatggagtctcactctgttgtccaggctggagtgcagtgatgcagtggcgcaatctcagctcactgcaacctccacctccggggttcaagcaattcccctgcctcagcctcccaagtagctgggattacaggcgcctgccaccagacctggctaattttttgtatttttagtagagatggggtttcacagtattagccaggatggtcttgatctcctgacctcatgatccacctgcctcggcctcccaaagtgctgggattacaggcatgagccactgtgtccagccacacacattaatttcatatgcagataaaccatttggttaaaaaaggccccaggaagaagttattttcctacaagacaagataggaaataataaacaaagtgatcacataataaattgtcagtggggcaattctccttaattttaaaataattatggaattattaaaatttctgacttgaagagttactattctttgtttgctctggtggatgtgatgtgtcccagggcaatagctttgcccctgcatgctgatggatctctaagaaactttccttctcactcctgcatcaacccctggattgcattttttccctcaaccccaagcagtgccagagttaaagattaaaaaatgaggaaaataatttttttttcaaagttatcctgaaatagtgaagaaccagcacagtgtaggggaaagaaaattaatgattgagaagttactcttagaattgatcatatttttcgcattatgtgattcaacttgcataccttttaaaattcaatgcaatttactagacagttattaccaattaaagttatataactacatctttaaatagctctgtagtataggaagtcagcaggctctgtaatgtgctgaatatgaaactacatatccacagttgagaaacacagttttcacaccaaattttgccagccacttaagtaccattataatagatcataaattaaaatgtattaacatcattattttcactagaatctaaaggatcactagtgtaatttataggagctcggtgcttaccgttaagtttttcactactggagaaaactgtgaattttattgcagtttgcactggacacagatgtagactgtggctttatatatttactttcaggaaacattttggtagtagtgaaaatgctttgccaaaagagtgttgttgtgaaagcagtattgtatgtcattatggtcctatgatttcacaattagagatacccttgttttaaaggcagatgtaacccattacatatttgaattatttggaacctttaacctgactttgaargcttcctgttacagaaattggaaatttgttttcttcacatgtagctgttttgggtgctgtaggtttatccacattgcaaataacaggagagtgtgaaatggaatcatctgaataattccagtcacaaagtgctttgagtgaggtcatttgatcattttttagataaaaatattctggagattatggggatcattgcttcaaatttgtactcttatgtgaatacttatacaagacttaaatgatcattttaattaaattgatgggctttaaaattaacacaagactttgagaaatggttttttttccctatgggtgtggggatgcagccttctgaagctttttgagagggcagctggctatctttgacagtttcctagtatatcttgggcatcacatacgtttggttgtgcatcagttaaacaagactcagagagggtgacgttcattctgtttcttctgtgataggattatctttcaacaaatcctaagtgtttagagtattgcagtgacacatttatgatggtatttgtctttgttattcttccatgaagaaataatttcagactgaaatgtatttattgaacaggatctaatgtacagtgtaccaaattccaggcagtgtttagagcagttttcaaatatgaactcatcttatcattgtaacaaccctgtgaggtaggtaccataaataacatttggggaataggtattattttgatggctattttacaggtgaggaaaccgaggcacagaggacatgcagtgctagctcacatcttgtggcgcatagtatttctgtgggtgattcctaaactagaaagttgataaactattgaattattttgttctactctggtataaagaaaaccatttcacagctatcaataaaagttttttgtgtgcttgattttgctgtttttattaataaaattgtgttacttatatctataaattatgtagttttcatttcttccctgtttcccagattgtcatttctcttttggatagccttaaaatttccttcacaactctgtaaaacatttattctctgcctttactctggcatttaaggttgacattttctcttaggaagtgataatcttcctctttgtcttctaaagtttatgttaataaggccatgattctaaacttcttagaggaagggaggtgagtttgcagatccctttgagaatctaatcacagtcttgtagagcctctgaaactcccctgtgacctttcaaagactaacatctaagttagagatgcctttgtctttgaaagcacaggtgaatttagggactacagtcctttaaaagagaataacttttcccataaaactgtccattatatgtagtacatttgcaggctggtggccaagtaaacaacttgtagatataagtggatcacctgtaatccatctgaactagaattatcttgtatttttttcaattgatacattattattatatatatttgtgggagtacatgtgatattttgatacatgcatacaatgtaaaatgatcaaatcagggtaattaggacatcagtcatgtcaaacatttataatttctttgtgttgagaatattccaaatctcctcttttgaaatatacaataaagtattaatgactatagtcaacctactgtgctgtcaaactctagaacttatttcttctgtcattttatacccattaaccatcttctctttattccccctccttcctgcccttcccaagcctctgataaccaccattctactctctacctccatgagtttaagttttttagctctcacctatgagtacatgtgacattcgtctttctgtgtctgatttatttaatgatgtcctccarttccatccatgttgctgcaaatgacagtattttgttctttttatgggtgaataatattccattatgtatacttaccatattttaaaaayctatccatccattaatggactcttagattgagtccatattttggctattgtgaatagcactgtgataaacatggatgtgccggtatttcttcaatgcactgatttcctttcttttggatatatatccagcagagggattactggattatatggtagttctatttttagcttttttgagaaactttcatactgttttccaaaatggctatactaatttacatttccactaacagtatacctttcttcacatctacaccagctttttttttctctttttgataatagccaatttaacagggatgcgatgatatcctcattgtggttttgataagcatttccctgatgattagtgatgctgagcgttttttcatatacttgttggccatttgtatgtattttttgaaaatgtctatttagataatttgcccatttttaattgcttttttttgctgctgttattaatgcctcattggacagtttgcacatattttctcccattctgtagactctctcttttcactctgttgattgtttcttttgctgtttttacaaatgtaatcccatttatttatttttgtttttgtgacttgtgcttttgaaatcttatcctaaaaaacatcttgcccagctgaattgtttccccagtgttttcttctagtagtttcatagtttcaggtcttacatttaagtctttaatccattttgatttgatttttgtatatggtaagagatagggatctagttttattctttgcatatggatatctggttttcctagcactgtttattgaagagactgtcctttccttaatgtatgttcttggtgcctttgttgaaaattagttggctgtaaatgcattgatttatttctgggttctctgttctgttccattggtctatgtgtctgttttgatgcccgtaccatgctgttttggttactatagctttgtagtatattttgtagtcaggtagtatgatgatgcctccagctttgttctttttactcagtattgctttggctatttggggtcttttggggttccatatgaatgttaggatttttttttttacttctgtgcagaatgtcattgataagtattgcattaaattgatagatcattttgggtagtatggacatcttaacaatattaattcttgtaatgcatgaacacgggatggctttccattgttttggtgtatcttcttcagtttcattagtgctctatcattttcattgtagagatatttcacttctttggttacatttattcctgtttatttttataactatcataaatgtgattgctttcttgatttcactattggcatatagtaatgatactaattttgatttcactgttgacatacagtaatgatactattagtaaagatactaattttttatcttgcaactttgctgaatttgtttatcagttctaagagtttgttgatggagtctttagatttttttaaatataagatcatgtcatctacaaacaaggacagtttgacttatttctttccaatttggatcccctttctctctttctgttgcctaattactctggctaggactacaaatactatgttgaataaaagtggtaaaaaatggacatccttgtcctgttccagatcttagaggaaagactttgaatttttccccatcatctgaactagaattcttattgatctttttctgtatgtgactttcttttttctttggctgcctcaaagctttctctttaattggttttcagcagtgtaactatgacatatccaggtgtgtgtgtgtgtttgatcctgcttgagcttcttattcttgagctgcttaacttggaaaattctaggacattatctcttcaaatattttgttgccctattatctctcctgtttttcctacagggactttgttttcacgtatgttagataacagctcttagatgctctgttttgtttttctaaaaaaaatatgtatatactcttctgtttccttgtattttcatttggataatttctattgacctatctgcaagtttacagattcttttcttgactgtatttagtctgcttattaccctatcaaggaattcatcatctctgatgtgggktttttttttaacagtatttcctttggaccatattttataattcccatctttctgtggaaatataccatctgatcatgcatattgtccactttttccactagatcttttaacatattaatcatagttgttttaatcttcccatttaatagtttcagcatcttctgagtcacttctagagtctggctctgttgattgctttatctcttgacaatgtttttttgttgtttttgttttgtttttctttttacttttttggtatgacctgcaatttttattggatacaaaaatcatggttaatagagactgaagtaaatgatgtgctcagaaatgggcatatctcttcttccaggtcattagtgttgggaagattgagtcagtaattgagccaggtttgggatttgtgttgccattgttaccttcaatgtaccactggcttcaaatttctccactggtgggctactgttaccttgtgttttgtgtgaaggaagcaggtagcatactagagggtttactcagagttcctgctctgccctcagctctcacctgtgaatgcctgtgtcagaaaggggtctcttcccatgttcttgtccctcctgtaatggtagactgcttgcattttggtgctaggcttctggtagggtcagggagaagttttggtcctgctgatccagtttcagtcttaggcagccctatgcacctgggcctcaggaatgggccttctcacctgtcctaacctgccctgctccctgtggcagccaaactctgcctgtatctgtttagaatttgggcaggtgatagttttctgccactctactggtcatagcagagctgtgcttttgttgatgcaagctcctgattacaagaggttctgctaccccctggggcaatggatctttgcctggttccagaggtggatgggttctgcttctacccttttcccagtggccctgytctacccccagtttttctcaggagcacccatggagaagatttacaaatgagtgcaaactcttcctgtgtctggcactcccggttaccctagatggatacactgggtcacacttggcttttaagaattccttaaaattttatctgatttcctcttacctgcttccatggtggccacatcttcttcccacgctctaccaaacccagaacagtttcttgtgtcctatttctccttggaggggcgtgtcactctttgaaattccgttcccttggtttctgtgtgaccgtggctctctgatgcatacaagaacagttatgattttatagattattgggctttttcttgttagggtagaagtgatattctgttttggctttctgtgttgtaaaccgccatctaaactttacttgcccccacttcatgactttttaagtcacccataggctcctaagatctgagccctcatagactctgcaaagctagggcaggggtgagcttttggaatacagaatactgtagaggacatgacagaagaggagcgcccatggaggagaggcatccacaggccaaggagtttctgttacttgcaataaagggcctttccacatgagcaagaagcagcatttaactgtacctagctttcctttatattattttattctttttcatttcattttattttataaaatgaccttcagagtgactgtcttgctccaaattcccccttttcttcttttttctcatcttaaagagcacatcaaagttttaaagatgtgtgaaaaactttgcargrtagcccttatgtgcctggcatgacttattctttcaattcagagttattgttattgagctgaagaaaggtcaggccttgctgtgctcatttaatggacttcaagttctttcttgggtttttttgtttagttttgtattgttgtgtaaaagagaaatttttctaacccccagtttctcaactctaattctaaatcccccttgataaacatggtgatcccctacctttctttaatgttatttatatttcagattaaataacttgattcaagcaaaccagagagataaatggctgctttgttttcatactacaccctctccccattctgagccaccccatgcccacaccctagccccacaccagaatgactgcttagacttggtgactgttttgccagggtattgaatctggatattgaaacatcattttctcatgatgttttttgaggaataatcaaacagaaaatgggaacaaatgaggcttgaaagacaggagtctttcaagtggaagtctttcaagtctttcaaatggaataggaaacaggaggtaattttcttccagcagggcattaactatctgtgtgcccttagacaagactgcagctccacaacttggtttcttgttcctcttctccagagcgagctaaatcgattgaatcagtgccagacactttgttgccagccgatgaaatgaggttcacctattccttatcccvtttcaggatgagaatttatgaaattacccatgcccatttatgaaattgccactacctaagtatcccagatggtaattttagtggcctcctatttttagtgacagccttctattaaataaagtaggcagttatgttagaaagatgtatgtttttccataggactcawtatggctatttatgtttttaatgctaaatatgagtcgtataaacatttctatttttcctgaatttgctgtggtgcagaatgtttccctagyctctttctagttcattgctttatctaaaatcattcccggtatgaaattgttattctgttggctaatgtacaaatgaacctttgtttctttctagttctaaattttaagattgtcaagaaatgcaaaatttcagggttgatatggaggtaggttctttggaagmcggttttcttgcagtccggacattgtttgtgtattctttctcttgaggttactaagttctaatagagtagcagaattgcaccaagtttcccttctgttgtattcaccactcagaagctttgggtgatgagtactccttcacagtataacagccaattctgagaaatagtttatactattttttaaaagtattttgaggcacaagtgtctcagcagaaacctgcattttttcctctggttttagatggttaatgcatgtgagtattatgcatttaatgttcttccagttaaaaaggtatatgtatagcacatgtaggttgaataatcttcattatttagtttaaactaacttgcattacaaggcagcataaacaatagatcccagctctctgcttctgaccagctacttagcttaggcaagtatttgatcactgccaggctgaacaatgaaagacaagttgaaatgagtaagagtgggataaggattccaggaattaggcaatttggggctcagtctcctgccattgaacaccagttctccttccctcccacacaagtgcttctgtcctccccttccttttctgctgactgtggaagaccatttcgccagcttctcctgtattcacatccacttgttgctcccagccagagattctggtccacccattaaggagtgcaagctcacatctgttctcttccttattggtctctaaacaagcatactcctctattggtgttttctgatcactttatctgctagtgaggaaggagaagcagattcaggccttggtgtgctatggagacagttctaggcaacagcagatggagggagaggaagagacaggaagtctctgctaaggggtgtccttgatgtcattatatctgcccgtggttgggtggtcatcatgttcatgtgtctgcaattgataaccagaagtctccattcaaagcctgggctggtttgtgaaaagcatggcaatgttcttaaagccacagtgtggtgtttaagctgctgcctgttccacatacatgggtatgtgagcatgtgtgtatgttattaacttactttgctattaggccttttccctcttaataaaaaagaaacctgtttatctgaaatgtatcatttataacaaattagaaagtgtaacagaatattaatcagcctgtaaaaatgaaagaataaaagattacaatgttgrgaaaatactatatatttcttaatggatcagtggataaaccacatccatatatttttgtaattgttctactagtgtcatctttgagacacgatatataaagattataaaattccctaactgagtcagtatgttgtctttatcaaaggtaaatgcgtcttttaaaaactaaagacatcggtcaggcgtggtggctcacacctgtaatcctagcactttgggaggctgacgcagacggatcacgaggtcaggagatcgagaccatcctggctaacatggtgaaaccccgtctctactgggaaaaaaaaactaaagacgtcattctgaaaaatagaaaattatacatttgtttcatgtccttatgcatggctgattacaaaactaatttcatgctaactcactcaaattgatgtaatacaatctatgctttagggatttgaaatggctttaatataatgtatcttacagatacaattaccacagtttttatgtattttgcactttattgttctgaggatataattgtaaagaaatattctaccttgtggcttttatgttttgtcttggcacccagatcacaaaagcttctatggttcattttgaaactttgaggaaaatgatacccatatgatttaaagtttaagtttaattaccttctgcaaattgcttttggaagtataggtagttagaaagtaaaagtggttttaaatttcagagatagagtatagcataatagctttttaaaatacagatattttctatccagagcaggaaaattagaattgcctttggataatattcaacaatgttcttttctttgtcatgaaagtgatataattccaactcccatccctatttcttatttataaatacaatgaatactgaaaatttgtcatagattttatacacatactgaaaggcagtatcatcttttaggtttaaaattgtgaaagatcttttgaggtaatttgagcactcttttcaaataataaaggtctccatacaaggaaggacttaaatacacacacagatgtggatgtcagccccttaagatgagaacatgttaccttaagcaggaaagttgaacagtgccttactggtgatgctaacttctttagaaataagtgctgcctgaagttttaaacttagtccttttaataatctattaatattaaggtacaaggtgacattgttctgagcattggggcatagtaataggttttaataaatccaactctacgattttaggagctccaacagctataatctagcccttcatctcagacttacatgtctatctgatgtatactgatgactgatctagtatgagactttggagagaggaatttctgctggaattcccatttaacagttacttaattggtttctacttagctgtttctcatcatttggtgcaaatagtttccagaaatagtctagacgtcttagcccaagtagtcaggaaatggtttttaaacttyagtgtacatcctccgtcacatggagtgctaccttgatgtaaattcctgggcaccagccccagggagctggttccatgggcctagcaatctgcattgtaaccaggtaacccagatgattctgaggcaggtggtctggtgacaagcctttgagaagtattggtgtaggaggcgtacgtagaaacagggcctgtttcatggtgtatgacctgtacagttgcacaggcttcacactgactcagaagagccctgggcttcacttagctcctctgtcaccttgaaattcttaataatttttaatcagggaatcctgcattttcacttttctctgggctctgaaaattgtttctttctttctattttttgagacaggatcttgttctgttgtccacattggagtgctgtggcaagatcatagctcattgcagcctcaatctcctgggctcaagcaatcttcccatctcagccccctgaatagctaggactacaggcatgagccaccatatctggctaattaattttttttttttttgagacggattctcactctgttgcccaggctggagtgcagtgacacaatctcagctcactgcaacctttgcctcacggattcaaacgattctcctgcctcagcctcccgagtaggtgggattacaggcacccgccaccatgcccggctaatttttgtatttttagtagagacagggtttcagcacgttggccaggctggtctcaaacttctgaccttgggtgatctgccccttcttggcctcccaaagtgctgggattacaggcatgagccaccatgcccggccaaaaaaaatttttttttgtagagatgggatctcactgtattacccaggttggtctcaaactcctcacctcaagcaatcctcctgccttagcctcccaaagtgctgagtttataggtgtgaacctccgtccctggcctgaaattgttcttcttgataaatatgaattgcaattattcaataatgatttcatacctgttggtattaggctgtcaactscaaggccaattctgagctttagagatgaatgagtatcattcatcacaggaatctagaataggaaatcttaatagtatgatttttttcwaggaaattaaatttctattcataatcttgaacatagaaacctatatttatgttattctaatatacggtctttttytcctctcaggatggtacaaaacagaagagggaacggaaaaagacagtctcattcagcagcatgccaacagagaagaagatcagcagtgcaagtgattgtattaattcaatggttgagggttcagaactcaaaaaggttcgctccaactctagaatttatcataggtactttytactggatgctgacatgcagagcctaaggtgggagccatctaagaaggattctgagaaagccaagattgacattaaatccatcaaggaagtgagaacaggaaaaaacacagacatattccgmagcaatggcatttctgaccagatatctgaagattgtgcgttttccgtcatatatggagagaattatgagtcactggatttggttgccaactccgcagatgttgcaaacatctgggttacaggactgcggtacctaatttcttatggaaaacatacacttgatatgttagaaagtagccaagataacatgaggacttcttgggtttcacaaatgtttagtgaaattgatgtagataaccttggacatataactctgtgtaatgctgtgcaatgtatcagaaacctcaatcctggtttaaaaacgagcaaaattgagcttaagttcaaagaattgcataaatcaaaggacaaagctggtaccgaggtcacaaaggaagaatttattgaggtttttcatgagctttgtactagacctgaaatttatttccttttagttcagttttcaagcaataaagaattccttgataccaaggaccttatgatgtttcttgaggcagaacagggtgtggcacatataaatgaggaaataagccttgaaattattcacaaatatgaaccatccaaagagggtcaggaaaagggctggctctccatagacgggttcactaattaccttatgtcacctgactgttatatattcgatccagaacataagaaggtctgtcaggatatgaagcaacctctgtctcattactttataaactcatctcataatacatacttaatagaggatcagttccgaggtccctccgacatcacaggatatattcgagctcttaaaatgggttgccggagtgttgaattagatgtatgggatgggccggacaatgaacctgtaatttacacaggccacaccatgacctctcagatagttttccgcagtgtcattgatattattaacaagtatgcattctttgcttcagagtatcctcttatcttgtgtttagaaaaccactgttccattaaacaacagaaggtaatggttcagcacatgaagaaacttttaggagacaagctctatacaacatcacccaatgttgaggaatcttatctaccatccccagatgtcctgaaagggaaaatactaattaaagcaaagaagctgtcctcaaattgctctggggtagaaggagatgttactgacgaagatgaaggagcagaaatgtctcagaggatgggaaaagagaacatggagcaacccaataatgtgcctgtgaagcgatttcagctttgtaaagaactstctgaactggtcagcatctgcaaatcagttcagttcaaagaatttcaggtgtcgtttcaggttcagaagtactgggaagtctgttcctttaatgaagtgcttgccagcaagtacgccaatgaaaatccaggggactttgtaaattacaacaaacgttttcttgctagggtttttcccagtccartgagaattgattccagtaacatgaatcctcaagatttttggaaatgtggttgccaaattgtagccatgaactttcagacaccaggactgatgatggacctgaatattggctggtttaggcagaayggaaactgtggctatgtcctccggccagccatcatgagggaggaggtctccttcttcagcgccaatacaaaagactctgtcccaggggtctcacctcaacttcttcacattaaaatcatcagtgggcagaactttcccaagcccaaaggatcaggtgccaaaggtgatgtggtagatccttatgtctatgttgaaatccatggaatccctgctgattgtgcagaacaaaggacaaaaacagtgcaccagaatggagacgctcccatttttgatgaaagctttgaatttcaaatcaacctgcctgaactggccatggtgcgctttgtagtgctggatgatgactacattggggatgaattcatcggccagtacacaattccctttgaatgtttacagacgggctaccgccatgtccccctgcagtccttaactggagaggtccttgcacatgcttctttatttgtccacgtggctattactaaccgaagaggaggaggraagcctcataaaaggggcctttctgtgagaaaagggaagaaatccagggaatatgcatctttgagaacactgtggattaaaaccgtggatgaggtattcaagaatgcccagccycctatacgggatgccacagatctgagagaaaacatgcaggtgcgtgcttgtgtttaatcatttactcaatggttttcctactttgtacatgtccatagtttrtaaatatattggttttttaataatagtatatttaagtagtttttaaattctgattagttcttagaatgtttgccactagtctgttttttatcatttaacttcctaaaggtacagttgatgttgaaaatattgattacatattgggataagtgagtctcgttgctgtgttacacaccttcatcccagtccctgttaatgactgctgaacagttccttgtttttttctaatagtatacatgggaatctctgggatttctgaatattccttacctggaacacaaattgatgatctatcaaaataaaaaggatataggtcaaagtaaaatggatgtgatccagtcctttcttacgaagctgtaatgctgaggagatgggaaacctttaaatgagccataaatatatgtgtatgcatagtgagcctccttttgatttgagaggatagctaattctgtaagtaaaagagatgtctgtatttattagaagtttaagataataattacctctgaaatatataatggctaaaagcagtcagttaggaattacatatttaattaaggatcgcccacacatctagccatacgctaggacccctgagtgacacagagctagacagcaagggcctgcctcatgcagacagcagccctaacctgtcatagtgtgtgagaagtggtgtgtgtgtgataagtgctccatgtctgtttattttgtattttaaaaattatattttaaaatgaccaatgagaatgatgccaacaaataaaatctgactgagaaaattcaacgttttttccctatcaactaattctatgtgtacttcgtgaataaaagaccttcccacaataaggaaatttgttttctttctcttaaagtaaaagcataacagacatatgaagggcttttccctgtttttgagggtgaaagtggtttggtaaaccctcagctctgagcaagcgcattgtccactgcccagtggctgctgtggtgtgtgtgacacagaattcctttgaggatttgtcagagctcaagcattgtcttttccaaagcctcatctgcactgaacctgacaaagcagtcggtagtgatactgaatgagcacctgccatgcacaagcaatmtaggccatgaagatgcagtggtgaacaaacagattgactgcctgcctttaaggggcttgcatgctagttgggggcaggcagtgggaaggggaaacagacaggaggcaggcagataaacaaatagaacaactgcaggtatgagtaagtggtgtaataagagtgactggggaactgcactttaaatatcacagtcatgattgatttctgtaactgtcaatatcaaagtgatttgagccaatgatctatagtttgatgtccatatttaaagcaatattaataaaaatgaaatgtttaaatttaaaactaaagtgttcattcccaagaacctgcattatttgagagcagaaggcacaggcctgcagggcctaggtccaccccctctgcccgcatgcccggcctagaccaggacccaagtgtgcctgaaatagcccacctgactcttattatgattataattggcctgttattactcacggtgactcaaagcatgggccttaacatcagcagctttcaggtaaaatcttgactccttcacttactagctgtgtgacgctagacaaacagagaaggattatagctaaggctcagtcttctcatccataacatggcttgctgtgtggattaaatggaagtaatgtgtaataaatatgcctagtatggcttagcacttagtaagtgttcatagaaggccagctcatggcattttatagtgttgaaggtttttctttaatgggtatttaaatggcatatctctggtgattagaaaaaagagagagagaggcattgggatcagcagtgacactaataggggaaggtcacaggtaaccaaggtccctgctgggcagactcaacagagaacagtagcatcctcaaaggttctttagattttgagccagcaggcataaatagatgagagattcaggtttctaccttgcaaatatttctttcccttttgtatggctggcatatttgatacttattttaaatctgatttgatttttttttctcctaaatctttaccctctttgaatgcagaagctattcgctctgtttgctcatagttgcatatccgcatcagcactactatgaactttgggctgaaaagaagccttgcccttcagaagaatttgacttatttgcattttcagtacttttgataaattggtgttacaaatgtccataacagcatttactttggatracagccatttttcccaggataaaacaatcattagccaattctgttataacactgttaataacttttgtaccaggtggttcaagcataatcagatatatcaaatataatatccatgagaaagtaaaacccccagttaattacaaatgctcctttcattccatttaacagaatgcggtggtgtcattcaaggagctgtgtggcctctcctctgtggccaatctcatgcagtgcatgttggcrgtgtctycccgctttctggggcccgataacacacccctagtggtcctaaatctcagcgagcagtaccccacaatggagctgcagggaattgtgccggaggttctgaagaagatcgtaacaacttatgacatggtgagttgtcctttgtccgtttacatagcctgggtgagagagatatcctaagacaacacagcagacatactttggagcttttgctgaagtgcactttcctatttcatgcttcattcacctatgctggagaagtaattcccctgaccttgctgtatttgaaagagattagtgttttgttgtttttgaaagcagaattcagagacactcacctcagttggattaaacattagttagcttctcagctatatctgaattgatttttaaaggatgcactattttccacacagatgtaggaacgagtttttaaaaatcttctcctgcagccagtcattgattatttgttttcattttattttcattttttcaactggtaaaggcaagaaatttaacttaaaaatgtaatgccatgagggacaggtgcctgtatcacatgactctgcactaggctatggtttcccttcttacaggagctgctctgtgatacttgtatttgtaatgagcttaacactaatggggtatcctcaggacacctagaatattacatttttctacttaagatttaccttgcattttcttaatcacatcctgctcttactgtaatttttttatttatcataactctaagagagaatttattgggtgaaggacacccatttcaagtgtatgatgtagttgaagctgtcattgactcttcaacctatcagggttaagggttggtgttggacactcccctcccagatgggccagtctgtcttcagtactatttagagtacttgggggtgagtacctcatctgctacctcctccactccaaaagcacaagctaagaccacgaaactctaggtttcttctgatgtagcttgctgtgctcaaggacaaaacaggatcggcatcataaacctaaacagaaatatttttgactgtttcataagttgtctgaaagctgtaatttagagggatttatgcaattcaagggaaagaaaaaagacgttgggccagcacttctcaattgtgactacttcgtaggtttcttaggatgttagtaaatatcacataggggaagggtttcataggatgttagtaaatatcacatggggggaaagttccttgactaaataattttgggaaatactagtttgaacaaaagtaatcagatatctttactgcaggatttcttagaaccttttatttgctatcaccatgagttccaagatagtgatagagtatttccagtttcacaaattgacttgaccattggaatactatttctaaaaacaaagattctagagaatatattttggaaaatccttcttcagtctttggatgaataagtctagaagtacaagtcagaagaatgcagtgttttaaacagcttatgagttcattaccttaaaaaaagtgatatttgtgcattttgtagattcctatgaagtagtcacacattgtagtgggggctgtttccttcttagcattcatggtaaccttaagagacaccaggaactgaatattggacactgcaagcaaactacatagagtggcaccctcctgcagagaggagggaggccagggtcaggtgtctgatgagcctcaggtgctgagtgccactgtgctgagtgccaaaggggtccacaaagactcatatgaacagccccatcctcggggagccatcaagtccaccaggagagaaagtgaggctggggaccaacatcaacacaggaagcatgctgagattcctttggtggggaaatagaagaaggggtaaaaatggaaaagtctgaagatcttttacatgctatgaaccagactgcctaaatagttcttgacttaagttttatgagatgaagccaaaaaagtatctgatatttataaacgctttttaagcataagccacaaataaaatcacatacctgtttcattgaccaaaatctaatatgatttaccccctaagacatttgcttgatttctatgacagtcatacagtgacatttcttcatggcgagctttttaacagggacttcttgagggtggggtggtagtaccccgtggaggtgataacagcataacagggcaggccaagttcaggggctgatttctgctctatcaagagtgtgtgatcatagctggtttctcatggtctatgttaaaaatcctcatggccaccagcaacctttatggcactcatagcaatattcggctcaggaatggctcattgctccttggttccctgcctcttcctcttggattggtagatgctagctcttaatatgtaactcttatttgcgtctaactgtatcattatgttgttatagatttggcaagacagaatatgctagcttgcttaaaatttttaaattataaaattactcttttataatgtataattgaaatagctgtgcagccttatactgcctaatttatcgatatgttctgttaattccatctgataaaataagctaataaaatatttaaaattaaatttaaattatggctgcagcaatattataactcttgtaatattttgcagttctttttagtgacttaatggtttcttaccttgtgacaatttattaaagctagccagaatagattaaatattgatgggaaatgtactaaaggtctcggacagcccgtaactctaaatatagctctttatttttgtaatgttatgttgagcttgccccaaaattaaccttagaaataagatcttatttcattctgttgacttcccatgtataatgtatggaggcgaatgagaagtaaaggcaagttgagaaactcctccagaactcctgtgtcatggccagtctacatgcctaaagtgtgtcttcctgtgaggacagtgccatggtacctcctaaaatgtacagatgtgtatttatgctatcaagattgtgattacttttcaatatctagactgtattaataaaatagtatttcagaagtgtgctagtttctttgtgaaaacggagaatgcagatcgttgtcctaatggctgccgtgattactaccaacaaacaggccttgaaaactgccagaattgtgcttttacaggacttgtggtgctctcgtggctcctgtggtggggtgagcctgggacctagctcaagaagacaggtatcagagccattcaggagtggagaagaagagaaattcacacacctccttagactaggcagattaagggagttttagtaggaactggactgggatggaaagtgggaatgaccctattagcagtgctggagtcagagacatgagtgtgggatagaaggcacctgctgaacttgtgcctggaggcctggggcacacagatgacccttcttcctcccaatggtgagcaagggccctagagtcctctcctgctagaacctagagcacaaaagctgcacatagcaaccctaggtagggaaattgtagcagggctggaagggggcctcatgcaaatrgaggcttacagggcatttaaatgaggcgtctttgtccccttaagctcagtgtccttaagtacttcatcccatgattttggggctcaacctgtgagggctcatcttcctccagtcagcttgtcctctctgcctctcttaatggaagtgacccttgagtcccttttttcatacctatctactttttttcaacagatggggcctgggctccattattaagccatgtggttgggcttttgcccacaaccccttatttattgcattggacagcatacatgattatatcatacatcatgaccataaagtcagagggtcaaacttttgaaccaaataattgatttgctttaaagatgtcacgtttggttgttttgaagtggcatataatagaaatttaattggtttatttcaataaaacagatacaaaataagttactgtatttttggtgatgaattcaacacccatttataagctcttagcacgtgcactgctcactcatcaacagcaagtatttattgagtgcctactgtgtaccagtgactattgtaggcaacatgaggtaatataaagatgaaaaagactttttttttcctttgaggagcttataatttagttgaagagatgctgcagtatgtttatagataactgataagatgatagacaatagatagtaaatagatattttaaaatatataaatgaattatttgaatcttcaaaggagagaatggttagtttcaggttcagagattaggaagacttcagtgaaacatcggccttgaactagacctgtaagaatgagttggaattcaactggtaaagaggaggctattgcaagatgagttcgtagggtgaaacatgctcacaggtgaaatatgctcaagcacatattctgggaaatccaggcttggactgtaacaaatagtagggagtccttgcacatttttgagcaaagggctatgctcagaattaggcattatggactctgggaggcttggagtgaaatagaactcagagaccacctattgagcacctttattttgcacgtgagaaaatggaaaccctgtagcacaacaaattaatggcagaaccggggttggcacccaagtggtatctctgtccaatttttttctgcaatccagatcagaaaaattaactgtatagaatgtgtagatgaatgatcaatgtagcaataaagcccaagtaactgtaataataataatatacagttattcatgtggggctcttgaagtcacaggcaccttattttttgttcttgtgccccataaagatagaaaattcttcattttgcattttcacatatattaaaaggcagatttaatgcacttaaaataaagaaaactgtaatcagtagatcaaatcccactcaaagaaatgcaatcataaatgtctgaacacattgtttataatttcagaaaacaaaagtttattttacttaaaatatatataaatgagcttgaatacacccactattgacaatcaagatcaagattgagcttgttcgctcatgtaattaagggctggtaagagaaaataaggaatatgtaacctgagtttaagagattctagggaatatctggatactcttcatagtacacagtgtttttaagaatggatttgcactggcatttcggtgcatctcctctcccccatcaatgtaagtgatctaattcatcatctttttaaactgaagtgacttttactattctttttatgttgagagtgataattccattctctagctatctttattagatgcagatttaccacctgttttaaacttgaatgtttaaaattgttatgagacctgtactaacatatagagaccaaggagtcaacattcttcctctatagagagaaaacattgaaaatttaaatattttgtgacgtattacataaaaagtaagttcttttctaaagttttttgttaattttgctgcagtttttctgtcatggactatgctttagtcattgtaattaaattgaagttgtagagaggaaaaaggagagaagaggaaaaaaataaagaaaatgaagcccatctctctcttacaggcagtacggtggttcacatacacagcaaatgggcagccccacctgttcagagattatacgtgaattcattcttgtcattgcagttccattctctgtactttccctttgaaattaattttttcagtcatttttttttgcaacttcacaaaagtcttgattttaattgccttcaggtttaattaagaaagcatactctgaggaatccatttccccagtagaaaatagtactttttaaagggaagaacaagatgctttgtctgggaggatattatttgctctctctgagtgtttttatttaagttgctgagtagtctcttctaacacatgactttaaatatttcttaaataaaacaaggttatttaaataaaatatgtgaaatgaaggtttttttccttacacagaaatgttggcagttgacatgcagcatcatgaacattctgggttaagttgttggtatggtgtcatatactttttcttgttacttcttaattcagtgaagagataaatcacacttcataattaatggagtctgctggtttggaccaagccagagatgatctgtaataaggttactattgatccccatctcctttgtggcttcttttatcactctcctgcctcagtcattaaaagcttcttttaattagagttgtcgacactaccaacttttataactgtagaaaaaagaccagatggaatattgtgctttgggataagaataagctaaaaatgaatgaaagaaggaagggagggtggaagggagttttgggaaaggtagatgcatcctacagagtgatgatttgaaacccaaaggctgttgtttaatctgatgactggagaggtccagccaatgtttccaaaatcagtttctctgaaatcatcaaaaccattgatgagccattttgtaatggttcaagttaccaagccagtggaagtgaaaataaatgtttaaacgatacagtgtgctggtaacatcacatgtattatcagatgagaagtaccaggccaccacacagtgatcgggagctgggagattgagaaacctttgggagattgtgcttcaagcatgtaagtggtggtaattgtaagattttccttctgatccagttttctagcttaacatgtctccacagaaaccactgaggaacacatattcttaaagtattcttacacacacacacacacacacacacacacacacacacacccagatactaagcaaggaacagttgaggaaagagtagcactttaggggatggcagtctgcttgaaagagacttaatcacatagcatcacagagcagcttttatccattaagttggatatccatctctaaactctctgggaggatgactttaatagatttcaacatgttgtcagatgatgtcctcagacaagaaatgataaatgctattaagcaagctactatgtcatctgacatactaacagtctgatttaaaattgcaaagtaagcaaggaaacaagagctggggtgccatccagccctattggtgaatgagaaatgggacccggctgttagcatcacttcagttcctgggtagatttcatttgagccatcaccacctagagaactgttagggggcagtggtttagggccatgtatttgatagggtctccatggttttacttttctgtttagagcatttttattgttttttaaaggggcaaaggcagattgctaatttttcaaacactttagttccctgaatctggtagaaaatatgaatatatctgaaacccaaagctcaagaaaagttagggaacttctttgtaaacctatgctttacgcaaaagaatactactacrttttttataaaactaagatattcgaagtactgtagtcttttttcttcctatgcaaaagtagaggagttacttcctatgttcccatcaaattccacatcgaatattggattttgctcctgtataatttcttcaaggcttatttttgatactttttcgatagtttctctgtgtttctgcagtggctgaaggtgcctcctaagttctttgctaagttcttctctctgtcaaggacccttacaggaaatttaaaaaaaagaaagaaagaaagaaaaggattttatgtatctttaaaattctgttagtgctctggagataatatacacagttcttttggtcaactggcagtttccaaagctgcgaggaagcacttagcttccttayccccatttattcagtaaactttttgtcattactagactttgaataaataaactttaattgagtggaggaggcaatgctggctgacttctcatttctgtggccctaattctagttgagcctttaatcaccttatgctgtatggcagagtttgagttcaagcttcatactcatcccaggtgaaaaagaaaatgtaactttcttacctctcttatgagggaggtagatgtccctggattttaattctgttggtaaacttcatctattgcattcattacgttattcgttttggactgtaaatgctaagctctttaggtaaaatgctcagtctctctgactttctctctttccccctcttccttcacaaagtggccagtggttgcttggagagggtgtggttgcaaacccttctttttgtgttcttggcaaagaatgtctaaacatctaaagccaccatcctctcctccactttctattcacctcgaggtgggtacatagtggggggatttcccagctccaacatgagtcactcaatactgcaagaggcgttatttcctcctctctgttctctcgtcaagaaagctgcaagagccagctcctttcctcctgcctcagagctgcaattcccttggctcaacctttgtatttggaaggaagtctcctccaccttaggggataacactctgtgatctacgggttgtttccccatgatatggtttggctgtgtccccacccaaatctcaacttgaattgtatctcccagaattcccccgtgttgtgggagggacccagggggaggtagttgaatcatgggggccagtctttcctgtgctattcttgtgatagtgaataagtctcatgaaacctgatgggtttatcagggatttccactttgcttctttcttattctctcttgccaccaccatgtaagaaatgcctttcaccttctgccatgattgtgagacctccccagccatgtggaactgtaagtcawattaatcctccttttattcccagtctcgggtatgtctttatcagcagcatgaaaacagactaatacactcgatatgttgaaataatttagaacatagtttgataaatcctgattttcaagtctatcattttggtgggaacctgagcaaaaatctaatttgacctttaaaactgacaaatgtctctgtgttcataagatagttgctcctcatccaagctctgaaacttgtcctttgaataggtggaaagctccagggaaaacatgattcattaactatggcagcatctgtgaaaagaaataacttattgacaccatccccatcacacttgtgagactgttgaagccacccagcctgcagcctttccctctctgctgcagttcatcctctggtttgccttaaagacattcttcctgaaatatctcccagagaaaggcctaggtatttctgggagggtccaagaggtagagttagaagtatgatgtgataactttaagaactaagccagctggaaggattatattgtgatcatcaagaacagtggagccaaattgctctgttaccttgactatttttgttaggtgaataacattttttcgtagagcatcctggaaaagtggcatccctttggtgtgttgagattgatgaagaatttgagttaagcctaataattgccaagagagagaaaaaggagggtgaagtgtgagaggaatatctttaagaacatacacttcatgtctattttcttctagcaattgaatctttccagcatcaagattttttatttactgttgaaacgtgcatcaaacactactggcaatagtataaagccctttttaaaaaaagtttttatagcatctaggatctgtgcagtatcttaaattgtgtaattatttttgtagtatgcacagaatagtattgtctctacattcagttttgtggattgtgattgtcctctttgtggaaattcaaacagaaaagcaatgatcaaagaaacaaagagcttaattggctttccatgtgtggtaatttgtatgtctttatgcagtttgtgagttccaaatcttttcagattgacgaaaatgaagactagctgacctagaacatgtgactcatagctcattaatgcattcagcctccttctccctttgagctgggagcctcctgctccctattacttgggacccagaggagacccatgttgctccttgatccttcaatctgtgctgtgggcacagaggcggctgtgccagcttgtgctggctactttgaaagaaaaacagatgtgttcatcttcatccatatgwttatggagactagtgatagaaacctgggcgcttcatgagtgtgggccccgtttgaaaccccaagtactccttgagccacaccctattggagggcacgggatatacacctttactgttgaatttaattagttgtcctaatggtggcaacttctgaccaggtaggatgatgtgaagcctgtcgtggttgttcactgcacctgtgaatgaagatggaacatattcaggttagagtttagaaagtgtgtaaagttgcagtgataatataattttattgtttagaatccttatgttcttgatatccttccttggctctataaatgcaagatccattcttcaggaattaattcaatctattgccacccattcttatgtagtttagagaggtatatacttttttatggagaaatttgtcagtgttacatgtccagtggagttgagttgggaagactgaagttatatcagtcacttcaatcaaattgttagtggtgagacatgggtttgtttgtaagtgccatgatgagctgctctatatttgtggacatgagcttttgggatgtacaatcacattttataagaaaaaatggaataatttggatggaatatactttataaaatgaagctattgaaataaccagtttatatgagaaatcagatatttcagaattgttttgtaaatgtgattgttgacacctacttgggccaccttctggcagtaaggtgtgctaatttctgacccttttttctgtctgttatgtccctggtcatgagctggaaaaaaattctaaggtgtttcttcacaaccttctgaataatgaggtaatgatttttctccacagctgatgtatttctataaataaagtttgacatttcataagctttgaagctcatattttgttgttacgttayatttgacctcatgttcataagagatacaattcagcattgcctctcattttcacatgagtgggaagactcaccgtcaccctcaccaaacctctcagagcagcgcacgtgtctggagggtgagtcccttctgcacagtaactgctctgtcagtggkgactgtgggaactgtcactcgttagtttatttaacagctcctgtttttcattctcttcacttctattcccccagattgctgtgaaataattaatgccactcaccccaccaaaataaccacttttaataccagtaagctgattttactaccagacgaatttatcaggaataaaaatagcatttaataatggttttaagccttttctaacttaattagggcatttaaaattctgagccataagaaaattactctcacacagtgggtagacaacatgatgtgttaagagtcaagtttaactctacaagcttaattaccaattagctgaaaactaacatgttaaggagtttaaaacatttgtttccctaccacattagtattagtcagatgtttagggctaaatgttagggatttttatatggagattttatgtgagattattcatctacctacagaaatatttaattcagatattttctttgaaatcaatgtygatcattctagttttctttgtagttatattctgacactggacagacatcagatggggccataccatcatttatgtaattctgcggcatgaaataactttagcttttaaatcacttatctgggacagattactcatgctgtaatcccagcactttgggaggccgaggcagacttaatctaggagtttgagaccagcctggccgacatggtgaaaccccatctctactaaaattcacaaattagccaggcatgatggtgcatgcctttagtcccagctgctcaggaggctgaggtgggaggatcacttgaacccaggaggcagaggttgcagtgagctgagatcacaccactacactccagtctgggtgacagactgagaccctgtctcaaaaaataaataaataaatagatcgtttatcttgtattagaaaaaaaaacaaaacaaaataaattctatctttgtgaatagaaacagctatttcattatttagctaaatataactgggatggtacgaattttaagctgttttcctaaaactaagccctgtctttattgttaaacgttagaattctccatagccaaaattttttgkccaacatatatcrtaatatgtgtttattcttttaaaataccaactacacttgatttttcatgttctttcctaaaaagtgcatgtcgcatatcaaactatattatctcaagtactttgagtccagttttaccaagtgatgcatcatgtaacattttagaggaggagctgagaaacacatgtttctgtatagtctgaaagctgagaatggtttttacatttttaatttattggaaaaataaaaaataatatcttgtgatatgaaagtcatatgaacttcaaattttgctctccataaatgaagtgtttttggagaacaaccacctccattaaatactatcaatgactgctttctcactacagtggcaaagttgagtagggtagttgcgacagaaactaagcctaagcctagcagcctacaatgtttactgtctggctctgtacagaacaaatttgccaacacttccaaaagtggattgggtaaaagtccttagggtattttgatacagtgattttcaaagtcacctttgccaacctaaattatgactttctctttctttcttttctctttttcctttctttcttttcttccttcctttcctttaaaatgtactcactgcattttgagttttgatacataagaatgggattctaatcgttaacctggaggaaggaggagactgttatcgttgcctgagcactcctctgctggaaaaagcaatgagcctgaatatggttctactaattgttacggtcagaaacctaaagaaacaagaggtggaaactaaaagaggaaaaagccagtggaaattaacgtttgctctgattttaatagcgcccgtgaggcaagcatgctacgtcagtgggaagtggtgacaatccacctgagctgtgtgctataactcaataacatttgtaactaatttaacctcacatatatttagtgtttatgtataaccatggttgtgctgcttggtaatgaggcattaaaaatgagccagtccaagaattgagtttaaatagtactccttctctcagccaaatcaagcatttcttgctgaggggctgaagggctgggtggagagaagggaattgggtagagttagtgagcagctctgcatcgtctctgaaaacccctcatttcctctcaccctttcctaaggcgaggaggaggactttctctcaaactgtaaaatccaggctgtgctaaccacactcagtttaaaggaagggattataaaagtgcttgaggtggagactaatcccatgaaaccctctcccacctgaggaatgggaaagatgctctgaagcctctggattcccacaccttactgttgtttatgctattcacctccttcttatactcgtcacaacttataattatacattcattagcttgatccttttttttttctttttttttttgagacagggtttcactcctgtcacccaggctggattgcagtgacgaactgttgactcactgcagcctctgcctcctgggctcaaacaattctcctgcctcagcctcctgagtagttgggactacaggcacgcaccagcatgcccggctcattttgttgttttgtttttttgcagaggtggggttttgccatgttgctcaggctggtcttgaacttctgagctcaaacaatccactcacctcagcctcccaaagtgctgggaattccttttttaaaagtacctctcttcctctccctgaaatctgagctccaggataacagggcccatgtgtcctatgcaacattgcgttctcagcaccgacagcagaacctggcacacagcaggtactcaaaatccatttttggtgaatgaatgaaaataaccttgatctccaggacacagatatcaggtgcccttcttaccctacatgtctttcccatatgtccctgtattccccgaacttgatttttatttccatgcacacaaaatgcctcggggaagggggcgcagagggtagagtggctgctcttccagtcttaggtctgtatggaagcacttatgttctaaggcagtgagggctggctttgctggtccaagaagaggaggatgcctgaggtgcttggacaactccagatgcttgtagggagagagggaccagaggcaggagagactggtcctgagaaggaagatctcagcatcccagctcctggatctttcacctcttgttcagaccctagatgtctccccagcttttatcagaggatcctttatcctatctgcaattccctccttaaagattcgtatgcccttaaaaaaaagaaagaaagaaagaaaaaaaaaaacaactgtatagaagagcttagtgcagaagagaggaggaggaaaatgtgagggcccctagttattcacctggctatgataggagagaaacctggttcagttaagctgcctgaggtgggaacatccctcatatgtgtacagtgttttatgatttttttcccaagcatgctcataaatcaattgttacatgagctaatagtcagaggctgtggtgtacaatgatgttagcacatggactggggtcacaccagaaaagggaagccttgggtagggatagggtccgtttgagctgagcagagaaattcttgaaagccagagagccactttcccccaactgctacaggcccccactctccaacacctactgaccctggtgagtgagccaaaacacatctcccagggaagaaagccttggctccccttcccctcaaccacacacagcatccaccagctctagctccaccttgggaaatccttgtcttcatccttatctcacctgccaccatgagctggctcccagggcaacagaagatattccctggcatgttttgcaaaggacacatcttaataagaacagtggtatattcacagaccacccaggtatgtatgcatggagtgtgaacacctatgcacaagactgcaccctaggaagcagatgagcccctgctaatgagctagctcctgcactagtgcttgcttgtgtgactgggggcaaggctgtttctctcatttttttaagaaatggggtctcgctatgttacccaggctggtcttgaactcctggccttaagcgatcctccaacctcaacctcctaaagtgctgggattacaggtgtgagccactgtgcccagcccaaacctattttttaaactctacaatgggcattagatcacaacctcaaaggattataagactatgtacctgtaaatagcctagaacataataaatactcaataaatcattgtcattatgattgtcattattagttttcaaaggctggttgcatatagctcctgaagcttgaagacctttgtgtgagtttattttaacatcactccatattccagagcagcatttgtcatgccccactttgttatttatacagagcatgrttactccatttcataaagtcaggtttaaagttcaaaatgaaaagcaaaaggtaagttctcccatcatcttgctaagcaagttgtctctctgctctgaaaggggaagataccagaacatgtgagttatgtggtcaacatcaggaagaacgccacacctgggtttatacagtaaatactctagtagctgctcagatgcattcttccagctctgttattcctggagaactgtggacactctgctgtgtttaaaaaaagtattgcttttcattacagagaagtcttcaattgctttcctctttcaacgaacgtctatacttagttatcacagacttgagagaaactaatgatactttacagtaagactatgattaaattaccttctgttaattaggagtttctaaatcaccttcatccccttggagaaaagacttgatgtaaataggcagtaataaaagtggtactatgtttaattcaaattgtatccttttaaatttaattaatttdgtaatagttttaaatgagcatgtcagaactaaagggtccttagtgacttgaaagagttaacgtagcatccagaagttcctaatgtactcttcagaagtagcttgctcactgaataattgggtttaaccagctcaagttcccctgtcctcccacgggaatgattcagagcrggttttgaaccattctcatcagttttttggagacactaccctccattcaggatgtagcgtctgaactcactatctttaatgtttccaagaccaagggagagacagtgaggccataggccctctttccaggcacttactagagagtaagccagcaaagtggctgtggactacatcctcactggactgcacctggctgctcacagtacctgttgaaagttccttctaagttgctaaatcccttcacctacccacatcccttcctcctttcatgtctgcagrgaatacttgagcacaaggcacacataaatttcatgctgtctgggatgggataaggatgtcgtgtaarcatatcattaatgtagcttagaaaagctgaaaagyggctgggagaggatggggtttgtgtatgtgtacatccttgaggtgaccatggtgcaaagcaatttatcatgtgctgtaaagtagattgtttaatgtgagactattgtataaggtttcccacagtaatcatgtacaaaatgatgtatagcataccaagttctcccctaacaagacttctggtcatgtaaggttgataataaactagagaagtaaaaggattattatcatttaaatgcatgtgcatgctcttcatatagaaaagcatagcataataaattaccacataaactggcagaaattattatatagcttttctggatagttttataattgcagcagagttcctttgcagggtagtttaggttctgttttgttgctcaattttcaccttttttttttttttttttttgcttttcctatgaatatcaaattgttcaggaccagaaactacaagatcaaattcaaaactccttccattttttgaaattctgtttatttcgtgaaataagattaaataacttatatttcttaacttaaagttttggttaaaaactaaaatttgaggtttagaaattttaaatattttccaaaaatttagagtaggataagtatttaacgtatattcattgacttcataaccaatcttttggtacaactggaacccctccagcgaccttttcaaactattgcctctggtctatttaaatgtattggggaccacatggagacttctggaaatgctaaatctcaatctagaaatagtagtgaatgccttttaaatctaagtttggttgtgactttatggctcactcacttgtctgcataaaaataaaaatttcttacctggtttaaaagcacagtttttggtgacataaaccaccctagtgcattcattgttttgattcccctaagctctgcctctgtgattttgtygattttttttcttttaatcctgtagatgtgcttttttattttttgcccactatcctctttgtgctgtttttccttatctttgctcctttttcctctcctcccagcctaacaaatgtgtattactaaggacttctagtggctaatgtgggaagtgcctctcagaaatacccacaactgtaaacagtaggtccatgcagtgcgcattggacacacagcacctgtggaaagtaggaaccaaaggcaataaactggttcttttgactacatgatactatttatttcatgaatgttatgctgwatccaaatggttattgagtgaatgcaggagacacccatattacacttgtatatgataagcatatgcctgtatcttatgtttgtatggtgattacattcagaaactgcacttaaagtttaacctgtgaaatatggcccgcttctaagtgtgtgaatatgattatatattaatttaggctgagaagtgatagagacattgattgtgttagaggaggctttttataatttgaaaattcaactagctacctacagataagatgggatgttattttataggattttatctgaaatgtagtacataagaggttcagaccgtatcagggtttagataaaagttatgtaacaggaaagacacattgatcccttaggtactaccctagctctgaagtgagctttatgaaaagttagagtatattggaaaaagttgagaatagctagcttcctacatgtggaccctgggtcactcttaattcataattcattccagatttatatagcatttggcatctgttctctggcaagaaatgatcattaaaatagttgaatacagtgttcaggcagacttatatgacgccaaaaccatgctttgaacgtggcagaaactgagaatttaacttagacttcaaataaaattccatagaagaattttgtaaacaaattttttggaaatattttgaagtattctcccttctatagtaagttctactacaaatacttgttttgaaaattcaaacttgcttgaatgcagtttatatgttaggtaacaatttgagcataccaaaaattttgcatttgcgtgtgcacaagtttgtgtgaactgaaattacacacacacccctcaaacatccaccatattcttcaattcacaaaatgtgttatgagctacaccctctacatcttgtgttacaattttccgttagatttcagatcaccctccttccaccacttcacagtgactcacaagctgcaactcctccaacacccacttccaccagcaaccttcaggtctttttcaaggttaagtgccatgtttattgtagtattttttcattctttaaccatttaacatatgcagaactgtgatattgtttttatttgatgtctttttttatgtgtcactgcaaaattttttagtgttgtgcccctaacccactttccttataagccctgtggtttttattgcacaattttgtatagtgaggtgagttttaggattgcagaactgtcatactgcagttacagccgatccttgaataatgtcattttgttcagcatcatttcattataacactgaagaggaaaaaataattgattcccagctggggccacttgtatggagtttgcaggttctccccacatctgtgtaggtttcctccaggtacaccaggtacaccagtttcctcccacatagcaaagatgtgagcttcagatgagttggacaatcttcagggtttcagtgtgagtgagtgtggatgtgtgtgtgagtgtgccctgcgatgggatggcatcctgtccagggtgggttcccccttttaccctgacctgctgggataggctctggccacctttgataagtggattggaataagtgggttggaaaatgaataaataaatgaatgaatgaatataagttattgggaaataaaaaaaattatcaggtatttgacattcatccaaatgcacggcaatatttgttaactgtttttgagctgtgtggtagtaggaggttcctctgaaaattttcattttgcaaacatttgttgatttaatacaccaccactatgactactgtcacgaattcaccacaaattgagtaaataatgatcttacttgttttcattaatctttcttaaatgtatgtatagttcacatttatttcagcatttaaaattagaagtgttttgatctttattgagaagtttgatgacgtttttgtgaccagaaatacgctgtggaaacttaacccttgtttatatcagttagcctagggtaaaattggtttcattgtaccttgttcactgaaagtcgcagtttccaagaagctgtccatgttaagagaagacttactgtatattctccacagttactcaagatcaccaaatgaccagatccgcagcttccaatactgtggactcactctcccagcacctctctcygtacacgcctgtaaatgtttagcatccttgttcttttcctgccctcggaccactcttgcacctgtcatactagttattattctctctgcttattccagtgattctggagcatcatgcaacattcattcatctttaaaatttstccctcagaaatgtagacattctttcatctcagccactacctctgtggagaaaattttcaattatccagtgccagaagcaagctgtcacataatttccggttgtactcgaggttcttagacttccctattgtaaccaccagttcaattcaactaagctggaagttcacatcctaaatacgttaacatacttaaaggaaccgtaaagcactctataactgtggggtgtgtaacatgtttacttgtaaactgtaaagcactctgtaactgtggggtgtgtaacatgtttagttgtaaaccgtaaagcactctataattgtaaggtgtgttacaatttttcttatcctgaccagttttctctcttatcttggctcttccttctgtgcccacagcaaatcagccttggagtcctcctccatgtaatgtgttcatgtcatcctttctttcccagcccctctgctgcctctcatgtctctcatatagcagtggcccccacctgcttcctgttcccacttttgtgccatctcccatttcttccttcacactgatgcttgttcatggttctgaaattttactttgttcataacacctctgcttaaaattgtcaagggtttgtgattaaattcaaactctgcagtgtagaagtttatatcttatccaatctggccctcactcctcttctatccatgtttccttacattctctaataygagttgaggtgcctagaaagcttaacaatattttacatgatttcaagtcctggccttccacatcatgcctgcagcggggtcctgtgtgtggcagcacccaaatatgctcctctgtatgtttgttaacagttgagtagtgctttttatcaagcgcatgtcaagttctttctacaactttcttttatatagggttttttcccccctataatttgcgtagtggaagatgtggtagtggaaatgaagtttcataagaaacctaggacaagttactctggaaacggtttgttatttagaaagtgttttcatagtgaccttgctggaagggaggacgaccacagctcttaatgatatggcagacctcggcccctggataggcaccagctctctgtcctccccacagtggactgcagccacaatgctctccccatgtgagatggaaaggggagctgggtttaattgtagcgcacagctggccaaagacctctacagcaataatctttcagtatttcagtgtaaatttgtgacttatattatgttcaagtatttaaaagtacgttgtattttccaacaataactttataaatggtgcctcttccattagttcaactttgtaacatttttctgtacttggaagctttagtaaaggaaaaacttacctctggatttcagttgagaagtctcaaatcccgatgttttagaatcaaactaaaattcttcacccgcacagtaataattattttaaagtgttaaaaagagagattatattgttaactcagagaggtgtttctctcaagagtgcagaaaaaagcaccaaagcttacaaattcccaagggcatcttgatcttactttctgtcccattcatggcattagtgaactaactggctttgcagggccaaacagcacaaggctgaccacccaccagggacgttgagctttaagaggctgttttagtccattttgtgttgttgaaacagaatatcacagcctgtgcaatttataaaaactgaaatttattttctcacagttctggaggctgagaagtccaaaatcaaggctcagtatctggtgaaggtcttctgagtggctcctcacgtggtgggagacagaagggcatgctagctgaatgctgtgtgaaacctcttttataaggaccttaatcycattgactaggaaggagccatcatggcttcatcaccttttaaaggccctgcctgttaatatgatcacattgacaatacttgaattttgaaggggacacatttaaaccataacagaggctgccattcagaaaattctgactagatgggaaaaaattactttggattgaattagttcctattttctgaaaaccttatccatgatcacatttrctgttctgtattcatccctggagtccagagaagcaagtcctgctttggtccagtcctcccaaggtcatcctgagcctggtggtgcctgaagccacatcttgccacctgggcgtttactggtccactgaggcctatcatggatctccaaggtggtcatggcagtttggggggcattcagtggttagggccaggtgtatactgcaccatttttgtaagtccattggcatgtttgagaatgataatcttttcattttttgagtttggaaagatacttccctgttatgtgtcaagtaatcatagaatccatgtgaaagaacaaagtttttttactgtctagcctttttcttttatagcaacttaaggacttctcagactttgtaacttcattagaaacagctacaacagaagatgcagtagccacatctgtgttgagcaggacaggcaaagaaagcagtttagaggttgggattttctatctgaaactgagattcaaaacaagataaaggggaaaaaaatctagaattcagatgttattactaaaatttctttcacccaagtatwtaaaattattgacaaactacttttataattattagcaaaatctgtgttcttaagatgaagggcaattcagtgaattgtctgaaatcagacatagggtccttatataaaaccacagacttgcttattctgaaaatggaattttcctagttgataagcaagtttcaaaacagaatatgaaggagcagtctatagaaatctagtaatatataatatatttatgtaataataacccttctcatagctgtatctataaacagagaagtttactttacactaacatgggagttactttcaaaacatagcactccgataaaaggcatatctggtttctttccagcttaataaaatataaattttaatttttactttgcctttagttaaaatttcctgcttttcatctgctcaaattctacattaaaatcttatattagaggtgatcaaatttatgaaatagatttctaggctatgttacatccatagattttccaaacactttagttccagaaatgtaggaggtactggtaacaggccagtgatataaaatccattagcaacaactatataaaakcatcttgccctagaaaaaacaatataagcatccatgtggcgagttactcaggctggcagcagggtgtctgattgctgtgccaagacttacacctgtgtgtttataggggcttgatgaaattcatgcatttgcattaatgcaaataatgcttatataattaaccattctacttggccttgcattctagtgacgtatcagtgtaatatacacagagaaaacaagataaagtagttttttcctttggctcatgcatcgatattactacctgcacatctgtttttgtctaatctgagatgcttattctagtagtttcacattaaatataaattatttattatttataataatgaattgtaaaatagagccaagtaatttattgctgtcattttaaaatgttttctcaaagtgctttatagaaacattgttctaaaaaacaactttgggtcaatgttagtagctgagatgatattactattgtaattgtgtgtagcaccttttaggagttacaaaatttcctctgcttttgtgctttcttcggattgaaacggcctttcctcttcacttgtgcagttgccactcatgtgtcaagacctataatggttttgtgggaaaagcagaggcttcaagaccaaacagaataccagtttcatgacttactaattacagttattttgcctataataccagattaccttgaaaggttgcttatgtttcaggtaggtcttcagtgttcacatgtgtaaaactaacctcataattactcacctcacatggataatgtgatcagtaaataaaatagaaagcaccaagtacatactgatgcagagatgttgaatcactttcatcttgatgcattcaaccaacacttgtactatttataatcacagcttgttataaagtagcagatccagacagaaagtggcccctgctagatcagctggtggccccatgttgcctctgctgcatcctcagtgccatgtgcactacattcaatcataattgatggcagaatgaaagggaaacatcagcctgctgagtaggggcctgaaggcccatcgcctaacctgtcctctaagcctgctggactcttcacctggtgttgctataggagcccacagtcctgagagcttccttaagagtacctagaggagctcttagactcaaggagaatttatgcaatagtgcaaaagttgaagattaatatrtgcctgttaagaacaagaactatgaactgttaaccatacattaatttaattataaatatgtaccccaaaatgataaaaagatacttccttctgaagcaagtagtacaaatattttataacaggtgtgacaacatgaatcatytctgctgaggtctggataagttttctgcctgccttgtctaagctttgctcattgtttactatgggcctaccttctcctaggctggttccttctggaattcccctctaatacagtctgcaaatgcctcctgctgtttacttgcaaacctaggaggaatggcttctcactattgtgttctccaccctgaagtattagtcatcttcatattttatatactactcatgaatcgggggacgatattcactgtcattatcagcagaggaacttcctgtattgaaatctaagccacaagtggatccttctgtggctgtcaacatggataccattacactacaagtgcttcaccattaaatatcctgccaaagggctgtagcttcagaatattgaattttatcacatccaatagctcacaggttacaatagcaatcccacctttttagttattctttgtgcatctgttttatttctgtaccatagtcccagtgcagcaattgttctttttyttatatatatactttaagttctagggtacatgtgcttcattctcagcccttagctcagggtctcacacatagagggcctcagtaaacgattgtcccaagaataaacaaatgatcctccaagtgttacagagtttaggaggcagatgagcttctatatctggactcttgagatggatgtgcatttattcagccttaacgtatattttatagctggaaggtgcataattatttatcctttggtgatacttaaactggaagatgattctaagaataataatgcaacttgtttctctgagcttcatcacacccagcttttcaagtggaactaaaattagtaatgagtattggaaacattgccagtgaacatatgaaaggagggcattcagctaatttggggctaccagaaaatgctctgccaggcctcctggataaatggggagtcagccgtgacagctgccgcttgcaagtgtcttcattgtgccagtcgctcctcacacatcctttcatttaatcctcacattatgaggtgtaatgtctttaataagcttattttatgggtaggaaattagggttatgaggttaaatatcttgtcctagatgacaaagctaatgagtaatagaaccaggattagaacccatgtaaatctttgctgtttctgccgctacaccactcccaagatgagtttctcatctgcatgtgtgagcctctgcttaatgctgctgttttgttctcctccactcctgcttttgctcctgtcctcatttgtttaatgactgggttcatttccttgatcatatttttttttccttctcctatttgaatgatgggggcacagttggccagttctttgatactgagctgtaacaatcaccatccttgcttgaagaagtccttgcttctttgtatctctcatttggcttgacatcaaagctgaaaaaggttactgatgacggtatggaccttttcaatatgcaaattatgtaatggtacaaacgactttatatcagtataataaagttcttaacgattcatttttattgctgcctgttcaatacgtcaagctgtaaaatagaatattttaatttatgggaatgactcagatcttgaagaatgaatgtgaaaatactgaattccaaagtgcaaactctgccataggctgtggacttcttgaggacaggggttgtatcctgtaggtcaggtatccctggtttccacacaggggctgcctgcagtagaccccagcgatgattaaagatacattatgaaggcgtaaataaatgcctgccttggcctttaaacttttgatgtttaccatttttttagaactgtgcaagttgataaatactatctgactaagcttaagaagctagtacactttttaagagacatgttggttatattttaaataagtgtaacttaccaaaaatrtggtggtttttgaattatgcaaataatccaacctgcatatatttagttactataagataattactatggcaattagtgataaatgctataaagaaaaataaggcaggccaggtgcggtggcttatgcctgtaatgccagcacttgggaggccgaggtgggaagatcacttgagcctaggagtgtaagaccagcctgggcaacatagcaagatcccatctctacagaaaattttaaaaattagccaagcatggtggcacacacctgtagtcccagctacctgggagatggaggctggaggattacttgtgcctaggagttggagagtgcactgagctatgattgcaccactgcactccagcctggctgacagaacagaccgtgtctcttaaaaaaataaaaagaaaaaaaatgaggcagaaatgaaaggaatggttgggtgtttattacttaaaatatgatggtcatgtaaaatagatgagtaatattataatgcaaaatatttggatatttaaatacaaatatgtaaaatttatactaaggtagatatcataattgtacccatttgagccatgagacttgtttctggctatcccatttccttttcatagtgattttagagccaacaagattacttcagagggatcttttcctagctttttagtgagtaaaataatggatcagctgttcactgattctttcccttcttcaagcttgggctcttaaaacaagcacatgcaatttggaacaagaattcaaatttgaacattttaaaaamcattaataggaacataaaaatactagttttagaggtactattagtgatgaatggtatcaaataaataaatgctattttttaattctcattgtatgttttaaactgaatttcagatgaagacattttggctgaaatgagtgaagtgtgtaggtgttgaagttttctataagatgaagttgaaaattttgttaaaatggataaccaaattttaaaactcagatcagatttgcacgcatatttgtagcttttcacgctgaaatgaactcagttcagtatattagctcagggttcaagtgcagtgttgtactagcctcactgcacttggaaagtaatactattcacatcttgttttaaccattatgtggggatgtgtgatgttatcattttcacatgcacatttgaagttgagtagtggaaagtcagataaaaaagcgtttaatatcatcacatcagcctgttttaggagaagagccttgtgcatgaatgcaggaggggatctagttgtcaggtgtaatctcatgtctggatgttccctttgcagatgattcagtccctcaaggcgttgattgaaaatgcagatgctgtatatgaaaagatcgtacattgtcagaaggcaggtaagtgaaagtttgtttcctctctttaaatgaaattaatagcatcatatactttgccccaaaactatttcattttttggatgctatatcaagaaaatcaaataagaaaattatttttctatggctaaagaaaataccaattcagtggttctcagccttgggtaacaaactcacctgaggggaccattcaaaatacattaacattggtctgaggtatggggctgggaattaataactattttaaattcccaggtgtttctaatgtacagccaaaattgagaaactctgcactaatctcttcttcagtgttaactgtgttgccaaagctcctgctggtcacccgtgactctggtacacagtaggataggtaaggcttgagtagagggagaatggcttcttgtaaaggagatggattccagttacaacctcctgacactttttagtacactggcattttcrcgtgctgataaattcattaatttaacatccaaatgttataccagactataaaattcttcttatataaacaatcatcccattaattttagctgtggtaaaaccaaaaaattcagtattctgcattgtaataaaaatacacaaaatggagttcttttaattttctgattttttgagtgttgatttgggagattctattatggagaatattttcaagtcataaaaaaaaaaaattgtcctgactttctaaggtttttttcgttgctgttctttaaaaccaagaaactatattgcctaccctgaaaaaaaaaatcccttatctcagaaatgaacttgtttaaaatagattgaagataaggatatgtgtgacattttttttctaatatctattgaaagagtattcatattagtgactaatcaacaaactccacaatccccatcttgttttactcatcttgtcagcaaatattgttagcaaagtggtctttctacttctagtcctttgcaggctaactctccctacaatctacatttaattattcaaacacaatttttatctacaacacaatctacaaattattaacacaatctgcaaattattgaacaggagatatggaagtaaacacagtaaatatattgaatacttaccgtgtgttactcaggagtctcaagttggtgtgtgaggcactggggagacattggtgtttgtgtagaacaggagagggactgagctttcaggtactgaccataatagctgtgtgcagagaatgtcyatgggcagacctgatgggaggcagttggcaatagataaggaaggtgcttctggagagtgagggaggaagggaagggatggtgarccatctaccctctgctttgggctgcctgtccccattccctgtgtttctacttaatcagatttgcacacatcactcatctgctgagacttctttctctgccctctctgccaatctgtactttcttctttttcaattatctcaacagtcttctgggagacctttcaagattccaggatttatgttacctaaagcattctattcagccctttaaacctttaatttgcttcagttggtagggcttcttcagttattgtgtattttattaatgcattccatcttgtaaacaggataataacctcctaaagcactaagattatatatcaagctgctctctgtatcttacccatgacatctgttctaacattctgcacagagtagttgcccaaatattaactaaatatgattttattttaattatttgattccattcaatgcatgtattgctatgaaaattgtggactttgtggaatttgaaaaaaactgtttatcagaaaaaaaactattcaacaatttgagttattgtcaattcactggtttatgagatttgataattttcagtataatgtggctttctgtttatgtttgatttcagtaagggatacatgtgcttgtacttaaaaagctgaagaatcttatctattagggattttgattaggatggggggagaataaccactgtgtaatggttcaagttgctctgggtttaaagatctttagaagcgtgtaaagattatcttttggtttcacagttactgatgaacgcctacacagcccttctgttatcccaagtacttattttagagtcccttgatcttttgtttctcatgtttacaattatggtaaggacatatagtcattagtcatatgaagaattgctaatttgttttgggctcaaagacagttgcataagatcttacttttgayaagtaattgttattctgcttgccaacagatataggtcaccaaagtgctgcaagagaggattattttagatgtatttcgaattttaaagcacaaacatatatttttattagttaaaaccttgtttaaataactgagtggaaataaagagtcagacatccacccccaaacacatgttaaaaaatgtccccagttcagaagggttcaggctcttggctgtgtaatctattttttacataggaacatgctatgctgatgttagtactgggaagaggaagcgtggcaggagaggaatgctgagaagtgaagacctccaaccaaggtaggctaggaacctatgcatcccagcagtggaggacccaaagggaccatggaaagagcagtggaaacaactcggagatgcgcagttggaggcagcctgcctgcatagtcctctctgttaagaagagaatgcagtgacacagagagttggggtaaaagagaaattttaataataaaaccatgttgctaggagtatataaacgacccagtgaagaggaagacattaatagatgagacagagattcaggatgaaggatgtgaggtcaggaatgaagtacagtcatgaaacacttgacctcagaaagggagaaaggctcctcgtctgagataatacagaaagccgtgacatttagaaaaattctgaaaaagagaggagtgttttccatygacgaggtaaacagggaagtagtgtcataggagaacaccaactttgggggtgaggaagtgaaagcggggattcaagacaggggcaagagtatggggactttgctcagagtcagagatcagcagtgccagtcaaagggactgattaaatatcagatcctgcaggggtgatatgggatgcgtgagtctgggccgccatgggagtgagaagtgatgtggccatgcaagaatgggtctctataattcataagcccaggcgaacacatgcatacatgttctcaagtaggagattggtaaggaacaccagcaggagagctgaacaggagtctgcagagggagaaacatcataaaagttcatttgttagaaatgtataaaagttgggaaaagatttgtcaaattctttcagggccaaagtcttttccactttctaatatcagggccaaagtcttttcygctttctaatatctatgtttttgtctctttaaatgccaaaactgcagcccatttttggattataatttcctttctagtcactgaattggtatgcttaataaaggataggaagacgatcaagaaggaaacccaaatgctttccctcagtgagmtaggtgtttctatcaggtaattttaaatggaaaataaattgttctctggaggaggaaaaaaacaaatcaatgacatcctgttaaagatggtgaattaacaaatgcttttaatctctactctaaaacctcattaaaatgacagtagagggtttttctttaagccacaaatccataaggacaaagaaatcgggagcaacaaaattctagaaactgagtaacagctgaacaagtgataattggcttagctgcccactcaggaacctcaatctgaagctggtcttggggggcctgacacagcctgactcacaggccaaccaccagctcagatctaacctggtgaccaggtacctctgggaactgggttaaagctagttataaaagacaggaactgtgtagaagctggattaattaacgcttagatctctgtgtcctgacagtggggaggttaaaaatagcaaaattctcattctccatatggggaatttaataggtgatgcttgaaaaacagttctaagtaaacaatataagcatgttacttggaaatatgaacataaatactaaggaagggaaacaatcagctaaaggcattgaatgtgactgcttctggggagggagaattgtggacaattatttggttctttacgtacatgcataattctagcaaaaataaaaactaaattcgaagaaaaaagaaggaaggaatcaaggggcaaaagctgccacaggaactgaggatgttcccaaagatgtgatcccacacccacaaggcctgggagagtgttaggttgcagaggcgcaaagagcccgcataggacacctgctggcttccctgctttcatgggcatgcctcaggcagaggtgatgcctgcatgcctgggaggatgagagcaggagaatctgttctgtgcactttcagaatgactgttaggagggaggatcaaactaaatgaaagatgacccagccctctccacacctctttaaatggaaggttctttgctaaaagctccagcgtattttcatgyatggccagggttgcatcttcactgagtaaagtgggatcaaagaaaataactttccaaataataaaagctttaattacccttcattttaatcaatttaatgggaaattttcagtggatcttatccatccctgctttcttaaatttgatttgccaaaaataatttgaacatttgttttaaagacccagggtcatcttgagatgctgcagtttaatgcagtgatttcttggaggctttaagtttggaggccccttaacctgcacacacagcagcctgcctgctgtgactgttcagatctggacatggtgttaatagttaaattccatctcctttcattaaactctcacttcctactgctttgtactgtatttccaactgtctgtttgtatactgctctttttttctcttacatttgctgcttccagtctgctgagcagttgatgtctcccctgtgaccaagcgatttwtcttacataaaagaggatgaggccccgacacactcctgcatggggaaaaccagcagaatgtcaggccagacctacatgacctggatttaattgctcagagacttttttttttttttcaaactcctcagatctcagtgtgctcctaggagctgaggttatcagataagtaagccatcaccacctgtcacttggttcatgcacatcatcttgcccaacatagtaaagaaaatcatctgcgagattcattctgaaagcacttaacaagtgttctgtttgaaaatacagttgacccttggacaacacaagtttgaacagcatgggtccacatatatgtgagttttttcaataaatatactgaaacattttttggaggttggcaacaatttgaaaaaagacagatgaaccatgtagcatggaaatatcaaaaaatttaagaaaaaggccacaaatgcataaaatatatgtaggtactagtctattttatcatttactgccataaaatatgcacaaatctgttataaaaggttaaaatttatcaaaacttatgcacacacttaaagcccatacatgacgtctttcacagttaagaaaaatgtaaacaatgtaagatgcactattaactcataactgctaaaattaactccaaaacatactttgctactgtaataatttcatagccacctcctgttgctgttgtgctgagctcaagtgttgggagtatctgcttaaaacgctgtgtgatgctaatcatctctgactgagcagtttatcattccagtaagttgcattcacagtaaaaagtgatctctcacagttacggcatattattcatcatgtttagtgcaataccataaaccttragtaacaccatgggacctatatgaagtgccactggtgatactgtaagtgctcccaagaagcagagaagagtcatgacattacaagaaagagttgaattgcttagtatataccatagattgaggtctgcagttgactgctatttcaggataaagaaatccagcataaggactgttctaaaaaaaaagaaaagaaaattcatgaagctatttttgcagccataccagcaggtacgaaaaccttgcacttcttgtgcaaagtttttttttatctcacattgaaaatacagcttttaggtgggtacaggattgctatacaaaaggcacacctatagactaatatgatttaaaaaaaagtgaagtcattatatgacaatttaaagtaaaggatccaaagctagagaatttaatgccagcaaaggatggtttgataattttagaaagaggtttggcttaaaaaatgtcaaggtaataggcgaagcagcttctgtcaaccagcaggcagcagacaagttcccagatgccattaagaaaatcattgagtcaaattatccttgtttgcagataatatgatcttatgtttggaaaagcctaaagactccaccaaaaatctgttagaactgataaacaaatgcagtaaagctgtaggatacaaaatcagcatgcaaaaatcagtagcatttctatatgccaacagtgaacaatttgaaaaggaaatttaaaaagtaatcccacttaaaatagccccaaataaaattaaatacctaggaattaacttaaagaagtgaaacatctctattaatgaaaactataaaacactaatgaaagaaattaaagagggcacacataaaaaaatggaaagatatttcatgttcatggattggaagaatcaatattgttaaaatgtccatactacccaaagcaatatacagattcaatacaatcgctatcaaaattccagtgacattcttcatggaaattgaaaaaaaaaatcctaacatttatatggaacccctaaagacccagaatattcaaagctatctggagcaaaaagaacaatactggaggaatcatattacctgccttcaaataatactgcagaattatagtaatcaaaatcgcatgataatggtataaaagcagacacatagaccaatggaacagaatagagaacccagaaagaaatccacacacctacaatgaactcattttgacaagggtgtcaagattatacagtggggaaaacacagtgtcttcagtaaatcgtgcagggaaaacgggatatccatatgcagaagaatgaaactggacccctatctctctccttatacagaaatcaaatcaaaatttaaatctgtgacatcaaactgtgaaactactgcaagaaaacattggggaaactttccaggcattggattaggcaacgatttcttgagtaataccctacaagcacaggcaaccaaagcaaaaatgaacaaatgggatcacatcaagttaaaaggcttccacacagtaaaggaaacaaacaacaaaatggagaaataacacactgaatgggacaaggaattaataacccgagtatataaggagctcaaacaactctgtaggaaaaaaagtctaataatccaattttaaaatgggcaaaatgtttaataggaatttctcaaaagaagacatacaaatgaaaaacaggcatatgaaaaggtgctcaatatcattgatcctcagacaaatgcaaatcaaaactaaatgagatatcatctcactgcagttaaaatggcttttatccaaaagtcagtcaataacaaattctggcgaggctgtggagaaaagggaaccctcatacattgttggtgggaatgtaaattagtacaaccattatggagagcagtttgaaggttcctcaaaaaaactaaaaatagagctaccatatgatcgagcaatcccactgctgcatgtatacccaaaagaaaggaaatcagtatatcaaagagatacctgcactcccatgttttttgcagcattgttcacactagccaagatgtggaagcaacctaagcatctaccaacagttgaatggatattgtgtgtgatacttatacacaatggagtgctattcagccatggaaaagaatgagatcctatcatttgcaacatggatggaactggaagtcattatgttaagtggaataagccaagcacagaaagacaaacatcacatgttcccaattatttttggaatctaaaaatcaaaacaattgaacttaatggagatagagaatggaaagatggttacccgaggctgggaaaggcaatgggaggtcagggcgggggaggtggggatggttaatgcgtaccaaaaaataaaagttaggaagaacgagtaagacctagtatttgatagcgcaacaggggtgctgtagtcattaataattttattgtacattttaaaacaatgaagagtattataggattgtttgtaacacaaatgataaatgcttattaagtggatagatattccattttccattattatgcattacatgcctgtatcaaaacatgtcacrtaccccataagtatatatacctgctatgcacctataaaaatttaaaataaaaataaaatttaaaaaaaccattgaggagaaaggatatctgcctgaacaggtgtttaatgaagctgaaagtaccctgttctgggggraaaaaaaagtcacagtggagaattgttagtaaggaagagaagcaaacagcaggatttagggcaggaaaggataggctaactctactgttttgtgcagatgcagtcaggtttatggtcaggactgcccccatctataaagctgctaatgcccaagccttaaaggggaaagataaacaccagctgccagtcttttggttgtacaacatggaggcctgaacaacaagagcttcttctatattagtttcatgatgctttgttcctgaagtcaggaagtaccttgccagtaagggaatgccttttaattttcttttgatattggacaatgcccttggtcacccagaaccccatgagttcaacactgaaagccatgaaatggtctcttttcccccaagcacaatgtctccaagtcagcatgtagattaaagggtcataagtacctttaaggctcattacagaggatgctatatggaaaggattattaatgctgtggaagagaacccccaatagagaggacatcatacatgtttagaaggattcaaaatcctgttgaagataccattgttgctacagaaaaatccatgaaagtcatcgagtccaaaacaataaattcctgctggagaaaaccgtccagatgttcacacgatttataacagagctgctgaaagaaatcatgaaatagattgtgaatatggcaaaaaaaaaaaaaaaaattgggggggggtgaaggtctcaggttatggattttggagaaaatcaagagctcatggacaccacaccagaggaattaacagaagataacttgacggagatgagtgcttccaaaccagtgccagacaatgaagaatatgtagaagaagcagtgcccccaaacaaattgatatcagacaatctggaagaagggttcctattattcaagactgcttatgacttcttttatgacaaagatcctcctgatgatactggcactgaaactaaagcaaaaagtggaagaagtactggtactgtatggaagcatttttagagaagtgaaaaagcaaaaaagacagaaattgcaatgcattgctgtaaagttacactgagtgtgcctgcctcccctgcctttccttctgcctcctccacctcttctgcctctgccacctctgagacagcaagaccaaccccttctctccttccttctccttagcctactctgctagaagatgatgaggatgaagacctttgtgatgatccacttccacgtgataaatagtaaatacattttctcttcctcgtgattttcttaatgttttcttttctttatcttaccttattgtaagaatatagtacataatacatatcatatacaaaatatgtgttaatcaactgtttatgttaccagtaaagcatccatcaggtccaaagtaggctattattagtaaactttttggggagtcaaaagttacatgcagatttttgactgcatgcagagtcaatgcccctaacacccctgttgttgaagggtcaattatatttgcaaatggaaaccygagagccttataactttttgttttgtattagtctgttctcgtactgctataaagaaataactgagactgggtaatttagaaagaaatgggctcatgcttaattggctcatggttccacaggctgtacaggaagcatgatgctggcatcttctcagcttctgtgtaggtctcaggaaacttacaatcatggcagaaggtgaaggagaagcaggcccatcttacatggctggagcaggagggttggaggaggtgatgcgctcttttaaacaaccagatctcatgagaactcaaaaggggggatggtgttgaaccattcatgagaactctgccccatgattcagtcacctcccaccaggccccacctctagcactgggggttatgtttcaacattagatttgggtggagacacagattcaaaccatttattctgccctggcccctcccagatctcatgtccttctcacatttcaaaatacaatcatcccttcccaataatcccccaaagtcttaactcattccagcattaactcaaaagtccaaagtttgatctgaacaaggcaagtcccttccacctataagcctgtaaaatcagaacaagttacttacttccaarttacaatggggatatagggattgagtaaataatcccgtttcgaaagggagaaatcagccaaaagaaagggactacagggagcagtgtccaggggctgtacagagcagctgggccctggacctggtccatgaaaccattcttcctgcctaggcctcaggtctgtgataggaggggctgtcaggaaggtctctgaaatacttttcaggccttttccccattgtcctgrctattagtatttgccttttagttataaaatttctgcagcctgcttgaattcctcctctgaaaatgggcttttcttttctaccacatggccaggctgcaaatttttccaacttttatgctctgtttccctgttaaatataaattccagtttcaggtcatttctcttcctgtgcatatgagcataggttgttagaagcagccaggctacatcttgaacactttgctgcttaggaatttcttctgccagatatcctaaatcatcactctcaagttcaaggttccacagatccctagagcagggatacagtgcagccaggctctttgctaaagcatagcaaaagtgacctctactccagttcccaataagttcctcatttccatctgagacctcctgagcctggacttcattgtccatgtcactatcagtattttggtcacaacaatttaacaagtctctaggaagttccaaactttccctcatcttcctgtctttttctgagctctccaaactgttccaacttttgcccattaccagttccaaagctgctttcacatcttcaagcaatgccctgcttctcagtatcagtttctgttttatgaggcttcaggaaacttacagtcatggtggaaggcaaagcaggagcagtcatcttcacatggcccaagcaggagaaagagagtggggaggtgccatacatttttaaacaaccagatctcttgagaacttactatatactaccaaggggggatggtgctaaaccatttatgagaatgctacccccatgatccaattacctcccaccaggacccacctccagcactggggattatatttcaacatgagatttggatggagacacagatccaaatcgtatcagttctcatttatgtcagaatgtttctcagctctgttttacagaagtgaaaggttctttcctgggaattgagagacccatgttctggtgccctctgtaccatgtccctgctgtgtgactttagtttagtcacttgaccctctctgcctcattttccttcttctaagtggcagtggattatgtgattccctgatggccctatgccttctaaattacagtgaactaagatcagttacataaacagcaatttgggaatggctggattacagttactgaaaaagattaaaagattaaacaagtcatcccatacaatgttacaggacacataaattgtagcccatcatcattactttcaaggaggaaagttaacactttgaagatgagacacaggaaacctgcatcagactcccaggccccatttgaaatccacagcatcttttctcttaaagactggatattgaaccaccacatcttcttttaggcatttactaattaattaactaataattagtgaagtcaagggaagaagagaagtagcaaggtcctcagtggcctctttctcattttaattccctcactaaggaccttcatcactgataagggatggcagaggaaatgaccacaaagacaacaactaggccaactcattcagagcaaaaacttcaaaataagcaactggtctctagaaaccgctgtctcaccacacctcaaccgtccctgtaaccttcaccctaattctgctctaagattcccacatcatatattcacagagtcatgcaaagaaaagaaggattcccacatcaactttcacacgaatgttatttttcatacgtgtgatcagaatcccctgggaatgcttgttgaaaatgcagtctctttacatcattcccaaaatattgaccatctgggagtgagactcaggaatttgcattgtggtgagcacattcaggttttgagaacttctcttttgagggtagarcagagcaggccctcttctgagttcatgctctttccctaagcctctctcctctgtctctcacagggagagtgtgagtgactgctcagactcaggcatgcaccagctgtgtgattgaatgacagcaaaattatctttctagagcagcatagaacatagctttcaccagtgacatttccccagtgccacaaatgaaggggagggaagttttggggacacttgcccttcccggggtacctgttctgtgattaaatcccaacactgtgctctcttgtcacatcttcctccctccttccttygtaaacccatggagtctctgaaagcatccccttgtatttaaatagcaactctcagggtcatctcagcagatgttctgctgaagaggggtcacgagtaactctcaggctgtttttaactctggcacttgcataaataaaccatttggttatgagaattcccattataatttcttattaaagctgagaagaactacaattcaagtaaagtccacagacaaaatgaatcacctttctcatacaaataccagaaggttatatatatacacacatgtatgtgtgtatattaggtatccttaggtttaatataaagtgatttggcccagattatctctaaggcttttccagctctcaaattctatggtctacaaatcctatagtatattataaatatataagggattgtaaaagggaatatacaaataattgaataaaagtgaacaaatgcattctaagaatgttttaacagtatttggagataaactttcttataataataaggaatataaagcaacttcaattaacccatgttcttttagtataggtcactgtattctcattataggtcagtgctgtgtcaataacatattaacatattaaagaaaaaacacagtcatgcatttgtggaatttgtttcatgacaagttattatactaattacttattggagatgcaaaaaaaggataataatgtctataccatcatggaaagttacagtaaaacacaaccaagtgagtggtatagataacaggtataaatgaaatttgaagaaaggagcagtctcagaggcttttgttgttaggaaaggaggtggagcttgaactaggggcttgagggaatgcagratttgtataagttaagcagaaggaacagggcattttagatgggccaaagcttagcagactttatcatcaaggtgtactttcagtgcacatgaaatatattgtcctggstgaagggaaatatttgcttcaggaaacagtaaaaattaggttggaaatacaggctgggcccaattatggaagccttttaactcaagtctaaaacatttgggattgattttttttaagccaacatttactaaagcctaattcatgcaacactagtcatgttcctcgggcaaaggacttcatcatcaaatttttataatgcaacttatcccctttggagattctcagtacacattagcatgctaaatatccttcatttttaactcagcatttctcaaacttatttggtgataaagcccttgtctcaagttctatctgtcagtgtcttaaagacttcgggaaactgttacaagcagtgaggtcactagatagtttaggactcactcggggactcagtgattggttctgtctcctctgccctccgtgttcatatattactcccagaaaaagaatgtgaatgcctgaagtattagtttaggaagaagttggttgtgaaggtctgtttcaggtttgacacatatgagatcacagtaggatgctcaaatggaaatagctagtaagttgtcaaaacaattatagtgaagcttcagatagagatgaggcctacagatagaattggctgtcatccaaatagaagggccgcttgagtggatgagttctctgtaataattgtttccttgtaacaccccatataatttacttatgcccatcacttgttgtctgtgtttctcctactagagtggaaactccttgagggcaagggacctttgtttgttcataacgtttcccaaatgccaagaacagtgtttggyacaaagccagcactcaataaatatctgttgagctgaattgaatacagaatgccgcatatttatttgttcaacaaacgagctcttactctccgtctgaccaggagctggagattccacagaaaaacgggatatggaccctcccctaagagggctccaggtcaagtattggagacaggcatctaagccactcataagtgtaagtgcagcctaggttgtaagtgcaggagtgagtgcgcactgccgtagagccctgatcacacagaggaggagtggggaggtctgtctgtggggatagttgaaccagactttagggcaggagttaagtcaagaaggtggtttgtctaagagccaaggcaagtggacacagacagaagagtgtatgcagggcaatacagccccggccagcagcagcagtgagcaacatggaatatcacatgggaaaaacaggaacagcaaatgaggtggagatgcaggccaggaactaatataatcccagaagctttaacataatattaagcaaacaaatttggtgttagactgcatgtaaaagaatttcgtatggcaaaaacaaacattctgaaggttgtgctaactacttattgatggattgaatgtggcataggaggagagaaagagatggtttttggcttcatcttggaaggatggagctgctatttaccaagatgctgaagactggggcaggcctggtcttgaaagggaagatcaggggtttgtttttggacaagttaagtttgatacgcctagttcacctccaagtctaaagtttggaggagagatcaatactggaattattaaatttgggagctatcattgcaaaggtgatctttcaagctgggagactgagctcatataagagatgaccatagacatagaagagggatcgctggcccctaatgtttatatgtcagcaagatgcagaagaacaaacagaaggttaaggtatggcagccagagaggtgggaggagaacactgatcttctggaagtctagtgaatgaggtatttcaaggagataccatttttcagatgtttgtattaaagaccccagaattccatcacatataaatgacaatggattggtaaggatatcggggaagctgataactcagatttgggggagggagggcatgtaaattgggtccatatatagggaagcccgtatggcagtaaatttcagaatttcaaattctatatacttccaaccaataattccattgtttcagagattattctataaatatgatcaaatacttagggaaagtcatatgtgcaaaggtttttgttgtaatattgaggacaacttaaatgcttaccaggagggccctgggacatacattatgatacatccttataatggaacattatgccactgtataaagaataaagaattcaaaaatcaactgtgacagcacgtgcctgtagtccaagctactagggaggctgaggcatgagaatcactcaaacctgggaggcagaggttgcagtgagccgagattgcaccactgcactccagcctaggtgacagagcgagaatctgtctcaaaaaaaaaaaaaaaaagaataaagaggtatgtatgtgtgtatgtgtgtgtgtatatatatatgtgtgtgtgtgtatatatatgtgtatatgtatttctgtatatatgagtgtatatgtgtgtatatatacacacatatacatatatatacttgcctccagacatatatatacatatataagaaagatcttacatgcatatatagatatatagatatagatagttgtaaaagcaagagaaaccatgtgtgttatttgctaacatttgctttaaagaggcagggagaatatgccgtttgtgctgtgtgtgcatctctctggaaggatacctaagaaggaataacagtggttgcctgagaaggggagggaaacaaggaggctgggagatggggaaaggaaagacagttccctgtatttcagtttatacttttaaaattgtggaaccatatgactacattatctgttgaaaattaaaatcggaagaggtgtcaaaaagaaggagaaacatggacaggctgcagtctgcagtcacgagggccttgtatgttatggtaatcatgccaaactgtgggagagcaggaaagtatcgatgtgaaagtggcgatccaaacaaaaatgttctgggtctaacagaactcctctgtgcatgactgtggtgaagaagacctctttatttctcggtgaaatgaagtgaggagggtcttgctaagcgcattattcttcgtattatcccacccaggtgagtcacgtggttgtgtgtttagaatggtggcatggtaattagattccacaaagggctgaaagttatgcaacttcatctcacctagatctacccagatggaaagtgctggcagaagaagaaaacctccctcatataattcattcacaaattgtactgctgtggatttggcattgcaaggatcttgtcatccatctgggtttcaggcatatatttaagaaacctggtttatcttttccatctcatgtggaatgggatttaacagttcaaaatccatcttaaaataatttggcttttgttaatgcccagattgtttgggatgaaggccaagaaaaggaggctaccaactggaactatctgaaaagcaattaggcatttccacatctccacaaggattaggatgtaaacacccacaggtaggccgcacacccaaacttcagacctccggagttttgaggcagagcatatagtttacaaaggctgtacatttaaacaggtactatatataaattatacatattcttataaaattatcagctatccatattttgttctctaartagtgtgatatcataccataagtcatgtacagaccatgttatgttaaggtacttttaatactgttgatatagctacctcttgaatgaggtcccaaacgcacctgtgttatatggtattccatctttcaggaaatatatcactacacctaatttggggaattggaaataaattaaaaatataaatatatattttgtcaccatttaaaagattttagcttttgcttttaatttgttttttaatctatacacaaaaatttttatactggttgtgtttgtgagaaaagagctttttgggacagcaaagtaaattttcagttgaaaaactaatctttaagtgtatccatttaagatcaatatgtctccttatgaagaatttttaaaactatatttgcttctaaaattttagccatgtgctacatgctatattttattttcatatcatttagattggtagagaaaatcccaaccagaatgtttgaaaggtcgtctgctttacgtttggcaagaataaatggcattcatttcatcgaaaaaggagatgatgccatgtttctgacttggccctcacttcctttcaaagcaaaagcctctttttgatatctttttattgtatatatcctatttttatttttagggctgtttggttttcatctaagtttgttatctctgatgggaagcagaaaacttgatagaagtggaaatttctcttcactatatcccagtatagttgtatgcagttgtactaaatgttctgagttaatttaattatgccatcttgaaatttttgcacccatttattaatttttataaaacctgacattttatcaacattataattcattttttgtcattaagcttttaagcccttcaggaaaaaactatttaaaatatttaaattataaagtattttgaaataataattggaaaattatgtgtaatcaacacctacacatataaaaaatcctagctgtttagattttagagataacatgaaagaagcaataaatttctaaaatatgtttctttatataaaaattcaataatgtaattttgtatggccataccaatttttaaaatttaacattatagctataaagcaaaagttacatgatttgggcagtcctcaccatgaactgatggcttcattctgttctttgttcacacagcctatatcttccattccctttcgaccagaactgaattaaactctcattgacatcacctaaggattttccatgtgtcctttctctgctgcttgatgacctactatttatacccttagttctcaagttcattatcacaaagaaattgcggcaggtttcctcatggttaacattccagaagaaaaataacccactgcttttccctaggaacagaaacttggggtcatggagtcaaaggaacctaatggttggttctttggaacagagcaactgaggctcaaagacaatcattttgttgaaagagcagccacaccaggccagccaggtcttttgctgatctctgaacataatctctgatcaggtcatttgctgatctctgaacataatttacccctaagcattaattggtattcctgcatgttttattggattcatgtaatatgctcacagccttcaaactttgatgtctttaaacacactgtatattctgactgcgaaatatatagcacatagcaattgtgtcacacttccaaaggactgtttacctacttagttttggttttcaaatgaagttttttccatttctttggctagaattaactgttacctcttgtcttacttgggtggcaacatggttgtagaatcaaggaatcctagttcctccccctctgtctttaatagctgccccaaagtgttacgtttcacctttaaagaaaagatggatgaagccatactttatttgagacttttatagtgccatttagtttaaattagactggtatatgggacattggctaatagaaaaaatacaattattttgttaaacaattaacttcaagataatgtgaacaactatacttggctctaaaatatacaaatttaggatacaaatgtgttggtatagtgtttggaagatattggaaacatgcagggaatggaacttgtttttgaaagaaaaaaaatcccagttcttattccctcattattattggcctggtttctatttctgaacctgaagattgttttcacagtgggaattcttgtcactatccctaagcagcggcggcagcagcaaccttgacaccgtcctgaatctgccttcctgtttattctccccagtgtctgcctggtggctttccataggtccagcaggcaatgctctggccacataagctaagagccacactctgtaagaatattaggactcttttggcttaaatccacaatttaaaaatttctaaatatgaccttctaaatatgcagatgatcatcacaagagaaactttctcaggatcaataaaattccaattatttttattaaatatgtaggtttttcttacctataattcatcaacaaaaaacacttgtgtctctttctcttccttcctccctccctccctccctgccttcctcccttcctcccttcctcccttcctcccttcattcctttcttcttcttcattccctccttccttctttttttttaggatagacagtcttacagttcttagattttctgatatacccctctaataatgaccctctaatgcctactgaacatggacttcgcatctctcagtcccatctccccatcttcctaatcggattttcttcaaaatgatcccaagtcctcttgcatgcaaatctgaaaatgtctgtggctgggcccaccacagacctcctaaatcagaacctccagggagacacaggagcctgcactttaaacacacacctccagtgattctgttactcgttgaggtttgagatgcactatctagtctccacgtgacttctctgtgctgcctgtccccaccattctctgacaagttcccccagaccctcctcacatgctctttaaattatctggattactgtaacagtctccacttttgcctgttcaactgcagtcacaggttcacacagctgcttgcccacccacagctcttcccaacactgggtcatgctcctttcgcatccccatagtgggagtctcacatctcttctcttcctgtaattaaagtgcaaggagttttaaaacaaaaccaacttgacttcttgagggagtggagagggagtgtgacttagtcttaagctttttacttcttacctgattttcgccagctactttaaaattcactctatctagtctttagacagaatagtatgacttacagaaggagaagagatgctactcttcagctttttagtaagagaaggactttttcgttgggctaatgtttctttgctgaaaataatttgaaaaatgaggtggttacttaacttctcacccagaaaagttctttatacaccactgttgttgtaaagaactgtgaagacctcctgtgacatgctaggagtagatttcctagtaatttagttccaagagaacaatgcaatttgcatcttagatatcttaatggatttattttgttttatatagacagactgatccagttcaaatgtataatctcattctctctctctctcttgcttcccttataactggtacctatgcaatagcccttacaatgttctgcccacagaataattattttacacatatgattatatcagacaaaccaagattaaaatccttcttcaccacttccttaggaaagtgctgtagcctctgtctgcatttcttatatagcgtatgtgaagtgcctggtaagttgccttgtgattcccttggttgygtatctttcgtccttgccctggcgctcgcatgtcacagggagacagtgaaaagtcaaggtgagaacccttttcttaaaaaaatacaatcaatatatgcttcaaattagttgattagcaaaatccactgtggtggattttgtcatttctgttggatcagtcatttctaagttaataacacagaaatgtttaaatgaccagcctgaccaacatggtgaaaccccatctgtactaaaaatacaaaaattagccacgtgtggtggcacgtgcctgtaatcccagctacttgggaggctgaggcaggagaattgcttgaacccaggaggcagaggttgcagtgagccgagatcacaccactgcaccctcacctgggcagcagagtgagactctgtctcaaaaaaaaaaaaaaaaaaagacatgtttaaaagaaacagatgtgttatgcagcaaatcaaataattaaataaatgacaatgggattgatagtctcagtcacttttttggattctgagttttttatttttaacttagtatttccagtgttcaatttgtcacctttttgcctgtttttaaaaagagcttcactaataaaacattttgcatgtccctgtgaacttttattgggctagaggtattttaagaggagtaagataagggggagtggtcttgtctcatttttttaatagacttgtaaaatatgagctttttagatagcagccatgtatgcagctacacttgtttctttaaatgtttccccatttcttccttatctatatcattttttatcctttcaactctgttgcatcttcaagtccccaatccttctcaaggcagcctgttctgtaacagcctctggccctagactcatactttctgaagtttctgaaagctgttttcttaagacctagagtagctgtttgtctaagctcagcattcccttcttctgctgttccatacttacattatgtgagttggaattaagcccagtataccagttcctgtcattgcctcattaccttacaggtgatcaagtgttcagcaaggcaccataaacagtctgcccctagcagaatgaggcttccatgcggataccttgatgttagaaaaatcccccactattattgttccaccttgtgccagttttgaaatgccataaaaaatcattgcgaagagcccacatccagtcaagcagttgtaatatgtggtcctgcgttagttaacatcacttgcatttttcctcccagtttcttttcctgttcatcttgcagtccatggagtcatatttcttgtttgtagagagctaccccctccctcccactcttgtgtctcttccctttcctacaattccagtcatggattccattctgcaagcctcagtgatacttatgagaatatggtacctcctgactgccagaaacataatgagtattaattattcctgtttggaaatccagaactcttgctgaagtccagtattaaaacttagaaaagccaagcacatcagtcttatcattaggaacccaacgggtggatctgagtcatgcagcacactccagggagtctcccggatgtgaagagtggggaaagtgtgtgtgtggcattggggtggaaggggcttattcggttaaccaagttgggatgttctcaggtaccatcatcagtaaaagaaaagttggagaaaaggggagtggtccatgcgttagttccctggagagtggaatgaatcttactagttactgttctttcccaaaaccagtgaggttcccataccttattagcataacaggaagtaggaccatggctcctggttaggtaggaaaaagaaacacagaagtaaaaagcctaaattggccatttattgtgtttatcatatgtgtgtcagcttttgcttgatatttaaagacactaaggaataaagttgttgtcaatcaccatgtaaagagttgcttcgaaatggtgttgcatagaaagggaattagaagttggaatgcccaactgaagagtaaaagtgtgcaaaagaatgtacaaaatgtcttgtaaaatttacaacagttctaaattatatgtaatagcaaaagtttttaaacaatgcaacgtccttcagtaggggactggttaaataaatgctagttcatctacacattggagtctctgtagctgtcacagaaaagagtgaggaagagctctatacactgacatggagtgaactccactatgcaattgtgtgagaaaaagaaagaaaacaaccaacatgcaggacactgtacatagtatgctactttcatgtaagaaaggaagattattaataatatgtacacatttgattatatttgcaaagagaaacaatacaataaaaaactaataacatataaggggaagaaggatcaaggtagagaagaccataaaggaggcaagacttatctgaattcaccttgatatgtagtttaattttggaattatgtaacgttttgatataatccataaaacaaattacatccaaaaaaagcacttccctccaccacatacatgtaaaatgagaaaaaagaaacacatgacctaattgtacattgtgagtagcataaccacagagagaaaagaattattccagctgaccctagaacatcatatttttcactgaacattctcaattacatatactcttaaggacaaaaaaatgctaagaatgtttaaattggattcagcggtcttactattagagttatattggtgtgattaggaattaagattttccacctaatggaaaaaaaagcataaaatttttaaatttatgtgaaaaccctgtaaactaaatttgaattagaggatctacagatcttgcagaaattgttttgaacagcagtagggattatttatttattatataaattctggtgtagaataaatgcagagttagagttcagggtctttctccactcccatccttgtactgtgggcttggtctctgacctcagattgaccctttctgtgacagaaaatacattactttgcgttctttctatccctcgtctccactgtgtcctcagtggagcttaaatctgccttctgagagtccaagtccagatgctggtcccagcccttctttctgctcccttggcagcttcccatctctgaagcttgctgagcttcccttctctaaaataagaataacaatgatcataggtgccctgtttcccttcagaacaatgaggaacaattgctgacttcgaagatgccttctgccttgttgctgccataatttttcagtgttttgtccccattattacattcttaaatggacacatttatgaaattcyactggaggttggaatcattttagctgtacctagaaaaagaaatatttccagttcattaccacagattggatgggagttaatatactttgtcttttttatttctttcagccatggaattccatgaacacttgcacagcataggcaccaaggaaggtttgaaggaaagaaaactacaaaaagcagtggagagctttacctggaatattaccatcttaaaggtatctatagagttgtttctgatgctggtgattttgcagcctctttcagcatgcttccctctcttagtataacatttcctgcattgtacatggtcagccactgagattgtagaatggatgcagaaatcacatgaagaactctgcccttctagagtctgtaggcacaacagtttgacattgtagatcagttgaagaacaggggaacttctatgattggcacattgtaagtcctgatagacaaaggacttttgtcattttatccttgagacattttaaagttcataaatgccagttgctatatgtaaaatagaaaatattgattacagaggaatgattgggaatttaaagattctagttactcaaatttcatttaacactttaaagtgtaattatggctataatgttcatatgatcccagaaataaatagaaaagaattgtatggagcataatcaaaggaaatacataaaagaattgctattgaaagaaatatttcttgaagggaaatgctatctgctatctctatgcatatctattttggcataacagttgttaaaaattaactttttattttttattataaaaataatatattttcattgtcaaaaatgtcaaaagagcaataatcaaaggtaaacacaatcccatcatcgagagacaattactgttggccttttgctgtgcattctctcaggctgattttctattttatatgtaatgtgacataatttttaaaataatgctgtgtatgtacctcgaaacttttttgagctttacctcaatagttcttctcagtgttactcacagagcataaataataataacacagaggttatttcattccaggtcttggacaattaataaatgtaaaattactctctggtgtttgccttccaaactttatgctcagctgaatttgtagggaagaaaggaaggcttccctttcacccgctgaagctgccttgaaaacgacctgacaattgacagattagcaggcataaaaaggcctacatattatatttatttaaggtgcagaagcatggggaatggcaggaggatgattacctaacaacccagtgtggtcttgatgcatacaaacccttcttcatagtggagggacatgggggaaatgtggccatttttgaggggtagtaaatgaattttaggggaaatgaatgggcccagtgctcagaaatgggatagtaaatgattctctttgggaactgaatggtctgagaaggaaaactagtttgggaggaagttcttctgtgctgtagttgtggtgtttaattttcagtctcttcttctgtaaattttartcttctctggttaatgaaatttcagagaggagatcagaggcatttgtgcttctctttggtgggtccagtttctagttagatcagggtacttgaacagcctcatctttgggagagagaggactgagagatatgtggtgggggtggtcagagaaaccgtgagcctgcttctttagttcagcatgtcaaagtgtcatcttttggggtattgttttctgagccccaacagattcaagaccataaagacattatcacagctgcctttttaaatttcctcattccccctgaagttaaaagctccatccttggagctgacaataattttcagatttgatgtaataaaaggtatcttccaaagctagtcgccatttgcatttttctcacgttaaacgtctacttatttttataattaagatcattttcttgacttcttcagacatttcccttttcacatatgtacttttcttatatacctattttgcttatactttaaccctgattgtttgcagatcagtaaacagcaaacataagaatttacaacgaaaaaggatttggctttacaatttgctgactcactcctggtcagaggtgggggstacactataaatttcctgtaaactcaagaaaatatatcacagcagattaagccctgtggtaggaacaaatgctcactttgctttaattttattagaggcaaatatagacatagggaccaaactttggcttgtcaagtacccttcctactcatgtgtggtccgggaaccagcaacctgggcctcagaggggaacttgttagaaattcagaatctcaagtcccaccctagtcctgctgattcagaacctgcatttttacaagatccccaggtgattcttaggcacattaaagtttgagaagcactgggctgagagccaccaaaaatgggagcctgatgcacatattaatgaaaaacagctgacataaagcagtgtgccatattttagaagtaattggaccaaatagatacactgaagaaacctactttcttttgaattgtgtccaggagagagaattaacacctcagacttatgttcatatggaagtaaatgtataggatggggtaataggtctttttttaatttccaggataatatttgctacagatggtgtttaaggatggtagaatgtaagtgaggcatgaggaagaattggaaagatctgtgtgtcatttctgtagaatggggtttttttttcattcctgtatgtcactggtttaaactttctttagaatgagtgctgacagggaatcttgaacgtgaatttaggtctaagttgagctaccagtattttcctggcgggagggcatgggatctgtcgagttcctcccattactttttgtttgcagtgagctaggagaggtggcagcgctccaggcagatggccagcagtaaacacacagcaggaggctcccagtagcacaaatgcttagggagggtttcagatgaccccggaaatgcagagaagaggaaatgaaggaggaagccaggaagactgctgaaggagctctgaaacagtccaaggcttgagaattacctgggatgcttaaacatgccctctcctaagcctcatcccagacttcccagaccagaatctccaggcttggaacccaggaatctgcttatttaacaagtttcttgggggattctgaggcacacacaaaaaaaccttattattgttgtcctagaatcaaaagctttcctgatgcatcaccatagtcatttgaaccataaggaggtagggtggccagccatcctagaagcaagacattcagtgctaaaaccaggacaatctgggcaaactgggaccattgatcaccctgagaggagttcctgccactaaaagtgtcgtttcattgaaggatgtctgtcccagtttttatgaatctttacttgcctagtttagtttttttttattttgaaggttcttttaaaattcagaaatgaacaaagaagaaataaagtcatctataactgccacacccagaattatctactattaacatcttggcatacttacttccagtcattttttttcttgaataaaaaagcattcatttgttgttataaatctatcttttttaaaatagaaaaatgtttttaagtgacccaagattctccctctgagaaataaccattattagacgtaggtgactttattccaggaacctttctatatgaatatgtctggatggatcagtatatattttaatgattctaagtcatactttttttcacactttcggtatgtttgaaattagcatatatcttatagtccatggcatctttgcattatatcctggttaaattggcaatgatttttatttcttagtgctacataaaatactggcacatctcacaagcactaatgtctcagatattataaaataagttatgtcagcagacataaytcttttttttttttcttttttgagatggagtctcactctgtcacccaggctggagtccagtggcacaatctcggctcactgcaacctctgcctcctgggttcaagtgattctcctgcctcagcctcccaaatagctgggactatatgcatgtgccaccatgcccagctaatttttgtatgtttagtagagacagggtttcactatcttggccaggctagtttcgaactcctgacctcaggtaatctgcccacctcagccttccaaagtgctgggattacaggtgtgagccatcacgcctgactgatagaattctaatataattgttctttaaaaatttttaagtactaaatttcattttatttaaccataaagatgctaaatgaattggtgagcaatttctaccataacaaagatttatttccatttcccaaaagatccctttgaggttaagaaaagggattatgagaaatgttaatagaagtcattttgctgggtatttttaaagctacatgttttagttataagtattgttggttgtcctgctatgaaagatgacaatatgggccgggcatggtagctcacacctgtaatcccagcactttgggaggccgagctgcatggatcacctgaggtcaggagttcaagaccagcctggccaacatgacgaaaccccgtctctactgaaaatacaaaaattagttgggcatggtggcgggtgcytgtaatcccagctactwgggaggctgaggcaggagaatcgcttgaacccaggaggcggaggttgcagtgagccaagatcatgccactgcactccagcctgggtgacagagcgagactgtctcaaagaaaaaaaaaaaaaaaaagacaatatgagcattctctaatattactagatagatcatattgttatttttttattgtccatgttaaaagtattcatatttggtcttgaaactataattgccatgtcacttgaagttcagtatttaaattggttcactgtcaccatcagtctgggaagtcacccatgctttcctgcaacctacaggaatagcagggaaaagagataaagccagcgggtgtctttgccaggcttcttaagatattggacccagccttctcttctcagagtttgtaaaatgtcctgttctagggtttctgctgcaaactagggagagggtgtaatccattcccacaggcctcccattgcttctttgatttagaagccaactttgaaacctccctccattagatagtcagcatcattttttgtgtgtcaactttgagacataatgtttgtaaaataaaattcaccaattttgagcacaaaatcctatgagttttgacaagtgtatgtacaggcgtaccttggagactgcttgatcagttccagaccatggcaataaagcaaatatcacaataaagtgagtcacatgatttttttggtttcccagtatatataaaagttatatttacactataatgtagtctattaagtgtgcagtagcttttatgtctaaaaatcaatgtacatagcttaatttaaaaatgctttattgctaaaaaatgctaataatcatctaagccctcagttagttgtaatccttttgctggtggagggtctcacctccatgttaatgggtgatgactgatgagggtggtggttgctgaaggctggggtggcttgtggcaatttcttaaaataagacagtggagcttgctacactgatggactctttgtttcaccacagatttctctgtagcgtgcaatgctgttcagtagcattttacccacagtagaacttstttgaaaatcagtcttctcaaaccccgccattcctttatcaattaagtgtatgtaatattctaactcctttgctgtaattacagcaatgttcacagcatcttcaccaggaggagattccatctcaagaaaccactttctttgctcattcataagaagcaactcctcatgcattacagttttatgatgagattgcagcaatttagtcacctcttcaggctctatttctaattctagttctctagttattttcattccatctgcatttactttccccactgtcgtcatgaacccatccaagtcaaccatgagggctgggatcaacttcctccaaaatcagcttcttccagactcctgttaatgttgacattctgacctctcccatgaatcatgaatgttattaatggcgtcttagaatggtgaatcctttccagaaggtcttcaatttactttaccccgattcatcagaggaatcactatctatggcagctatagccttatgaaatgtatttcttaaataataaaacttgaaagtcaaaattactctttgatccatgggctgcagaatggatattgtattagcaggcatgaaagcaatattaatctccttgtgcatccctatcagagtgcttggatgaccaggtacattgttgatatgcagtaatattgtgaaaggaatcttttttactgagcagtaggtcccagctgtgggcttaaaatattcaggaaaccatgctgtaaacacgtatgttctcatctaggctttattgatccatttatagagcacgggcagagtaaatttagcataatacttaagggccctaggattttcagaatggccaattagcatcggctgctacttacagccaccagctgcattattccctaacaagaatatcaaactgtcctttgaacccttgaagccaagcattgacttctccttttgagccatgaaagccctagatggcatcttctttcaatagaaggctgtttcatctacattgaaaatctgttgtttagtatagccaccttcatcaatgatcttggctaaatcttctgggtaactcactgcaccttctacatcagcacttgctgcttcgcattgcactttgatgtggtggagatggcttatttccttaaacctatgacccaaccactgctagcctccagcttgtcttctgcaactttcttacctctcttagacttcatagaattgaagagagttagggccttgctctggattaggctttggcttaagagaacrttgtggctggtttgatctcctattgagaccactcaaactttctccatatcagcaataaggcagttttgctttcttatcattcatgagttcagtagaatagcactttaaatttccttcacaaacttttcctttgcattaacaacttggataaatgtttggtgcaagagacctagcttttggctcatgttggcttttgacttgaacttggccttcctcagtaagcttcattatttctagttttttatttcaagtgcaactcttcttttcacttgaacacttggaggcctttgtaaggttattttttggcctaattttcatattgttatgtctcaggaactttgcatgtcattagggaggcctgaagagacagagatggagagtgaccagtggaacagtcagaacacacacaacatttaccaattaagtttgctgtcttataaggaagggcacactttatggtgccccaaaataattagtaacatcaaagaccaccaatcacaaatcacaataactaatataataatagtgaaaaagtttgaaatattgcaagaattaccaaagagtgacacagaaacacaaagtgaacacatgctgttggaaaaatgacactgtagacttgcttgacgcaaggttgccacaaaccttcartgtgtaaaaaaaaaaaaaaaaaaatgcagtatctgtgaagtgtgataaaataaagtatgtctggagtcatgcaacccccagcacaatgatggtagggcattgttgtcaccctgctcccccaaattgcattgtgcccctttgtagtaaaatcctttatgttggcaaccacttatctcatttctatctctatagtttgacctgtgccagaatgtcatataaatggaattacatggcatacagtcttttctgcctggcttatttcatgtagcattgtgcttttgagtcatacaagttaatgtaggtttcagtactccattcctttttattgctaaatagtattctgttttatggatataacacattttgtttatacctgcaccaatttatggacatttgtgttgtttccaatttttagctattacaaataaacctgcaatgaacattcacatatcagtctttgtatggacatgcttttattcttcttgggtaaatatgagtgggattgctgggtcacatggcaaatgtgtgtgagactgataagaaactgccacagtgctttaaaaacaactgatgttccattttgcctttccccagcagtgttgcaagggttttagttgcaccacatccttgtcaacacttggaattatcagttttgtcattccagtaagtggatgsgggttgagcatctttgtgtgtacgtgagttttaaaaaatwtctgactgactctaatgtggttttctttatgtttcttctgcttggggttggttgagatttttagatatgtgaatttgtagtttttaacaaatttggaaactttttggtgattatttcctgaaatttgtttctgtcttaccctttctaccatctccttctgtaactccaattatatgtataaatatactgcttgatattatcccacaatcacagatgcttattcattagtttttaagtactttctgtggtttaaaaaaaaatttttttgagacaggatctcactcttgcccaggctggagtgcagtggcgtgaacactactcattgcagcctcaaccttctgggccgaaatgatcctctcatctcagcctcctgagtagctgggaccacaggcacgtgctaccatgcctggataatttgtaygttttttgtagagactaggttttgccatgttccccaggttggtttcaaactcctggcctcaaacaatcctcccacttcagcctcccaaggtgtaagaattaccgcactcagccgtttcctttttgttttcttttttaattcttgatatttttattgccatgtccttgagcaatattgctatattttcaagcaacacttctgttttctgtaatatctaatctgccattaatcctattcagttttttaatttcaaatttgtcatgtttctgttcatgctagtcatatcctctaccttcttgaagacatgtcatatattcacaatagccgttttccagcctcttcctctccactcttggcccctcatgttctagccactgtcggctccctgaactccacactctgtcttctcaccccagtgggactgctgggctctgtttgagttcccctttcctgcactgcatctggaaactgcaagcagtaagctggacacggttgtttgtatttcttctctcaggatcactgtgttgtactatctgaaaatcattgttttctgcattctgtctggttttctaattgtatgccagccacacttccaacttttcctgtgtcatttctttcttcccaccctctgccccatctgctactccatgaaacagaatgctcactccgtttgcatctctctggtttggttgtgtttgagatagaactttcaggacttttatgacttgccaacatgacttcygtgagttttagttcatagaatgattataccctttttttagttttgctgctgtttgtggctttttgcttggctttgtttttgctcatttcatcaggaatgtagaatggaaattctgtaatgcattttcaatccaccagcttaatcaagacttcctctacctttattttccagttaccaaaatattcactgtactggtggtaattttcactgtgtcaattgattgccattcctaaaatggtagaatctcatactagaagagtcctgttttcattggtctgttttggttaccaagagtagaaactcactctggccagctcacagaggagtsgccacagatgctggctcacacaagggatcatgagagggacagggacctcagggaacttggagaccggaaactgcagtccagcctcatgacaatagcaagctgttcggaaacctggcagcccccgaggtagctgctcctctctgtggaacaggggtctttctgcttatctttctgcctcttctccattctgcttcctctgctggctggctcgttctgttcactcagagtttctactgctttataacttgttctggccttggtctgttctttaccatatcctctaagcatttatttcaagtactcaatctatttgtatttcctgcctcagcctagccttttagctgcagaccagtggtcccgataaacctcctcttgtattaagtgtccttggatcaggttctccccctgctttaatccactttgtccaggaaggtattgtcagcacaaaatatggctccctttagtggctgtttcggttatctattgctgtataacaaaccactgcaaaactagtggcttgaaacaatgacttctcatttctcgtgattcttgggttagctgggctcagccagatggttttgctgctccatgtgatattagctgggatcacttaagagatttgttctgctgggaactcagcttggcctggaacatcgaagaaggtactcacatggctggatctcatctggggtggctgggatggctgggctttttttttttatagcatctatatcgtatcttggacttgaattaagcttgttacaaccgaagatgttttccagatgaatggctgccaggctagctctcctgacctgtgcccctctaccatcagaaacaaggctatcaataaaccctaaaagtaattagagattcattctctttaggaacctaaaacttctgccaaaacataaatcaataaaccagatggtttttgcacctggtagacatttgtcttgattttcttcatytttacctgaggtacagtgcttatcttgaagacttaaagactggcatttgtttcctttttgaaattaccatgatggttgatgtatgactccttttattgaggctcatatcttttagttatttttatttattataggtagtatagtatgttgtctcttttcctgaaaagctataattgactgaaagccatttctctatttagtgtgtgaaaatttctcagaatggctcagaaaatcaaactatagtagcgtttgtcattaggcaggctgttctttctggtccatttgaaatacagtaaaacctcaaacattgggaccccactcatgtggagtttgtgattactcagctaatgtttgactgtgtaaatggtgtgcttgaaagattaatagcgcgaaggaggtgcttacgtgcatgctattttccctggtgtttccaagggctctcacgcccatggcccagccccacttgcctctcagtgtcccctcgctctctgcatcctctctctacacagctgggccaccctcccctcccctctggccctggtccctgcctggaaccctctcctgacaccccaccttctgtgcttaggtcatggctcacctccactgtctggagactccaaaggctgctcctgaatgctaaccctacctctgccaccagagtggccagctctgtgccagacgaggccactgtcctactgcatggtggaatttagcccttcccatggccaggtctgtagcagagggagatgtagtcagtcagaacctagaaagctttgtagcatagaaatcatgctgctaaatggttgggctccagaggtgccatatgttggagtcacggtcactcctctgtggcaggcagcatcagcccctgggcctgccgccgtcctttcctgccctgagtttccccaattcagacaccgcctcctccgtggtgctgccgaggagcccccaaccctccgtctttggtgaaggaaaagtaaaattgtttctaaggatgaaggcattcattctgaatttaaaaaattgaatcatatttaaaattattaacttttgtacaaacctctgagcacaaccatgggaaaattggagactaactgtgaatgtgatgacagcccaaatataggcaaaaagtgtggcaggcaaagggagccacatggaaagtcagatccatgcagcccactatcccttcatcatcaagacactgcctcgaaccacagaaacatctctttggatccagcaaaaaccaagggcaggagctgtgcttagagggctctcctttccgctcctgcacagaacccttcatccccctctggcagcttctttgcaccctttggggtggaggtcagggtggagggaaggcggtcttcctgctgtggggagacaagctgatttgcagctcatgttccatgcccatcaaacgtgtgagtgcacatacaggaagccaaaaggacagaaaacatcacgcactcttaaaatgagcctaacgtcctgtacaaaagcctgtgtcctgttgctgtaggtttaggtgactgatgattagggagtcttttttcaaccgtaaggtttactgagacttcagtgggaagtggacctgaccaagctaggaggccttccttaattctgatgaatgtgccacgatctcagccagcctcaaaagaactcttgaaaggggaactatcgatgtataataatgagaggcgatttagaatccgtagccaagactcctacaatccattcattcttctttttttttccagacggagtctttctctgtcccccaggctggagtgcagtggtgtgatcttggctcactgcaacctccacctcccgggttcaagtgattctcctgcctcagcctcccgagtagctgggattacagtcgcccgccaccatgcctggctaatttttgtatttttagtagagacaggatttcaccatgttggccaggctggtcttgaactcctgacctcaggtgatccgcccacctcggcctcccaaagtgctgggattacaggtgtgagccaccacacccgtttcattcttttgttcactcattcctcattcaacaaacacacagtggaaatccatatttctgtttctgcttttaatcacaggaagagtgaattgtctacacagttgttgatgtgctggatacatgaaaaatgtagtgtgtgtttcaacctgcttgctttaaaatattgcatgcagtctgtggggttcaactctctatagttgtggcctcacagtttagtttatccaacaggaaaataaaacaaacataccagagagaaaggtgtgtgtgtttcagtgtgatttgctgttcagactctacccgtaatctctctaaactcagtgtcctttttatgaaacgagaatggtaatagcacttcccttgcatcccctctttgtggagcaggtggtatcagtgaaggtatctaaattctgctgtgttcctctctgcattcccaaatagataagaaagacaggaaggaggagtatttttgtgcctcagactcccataatggtatgagtaccctcctccttctcctccctcacactgcatgtgatttggaagaaaagtgtctgctggcccccagggaatggaaggtgctaatctttgctgtcttcaacatccaagcatgtggccattacacaggtggcagagggcaggggaagtcttagctgccgcactggatccctcacctcagaagtaagacaactgtttttctctaatagatagttggacaaaaggactttgaaaaaattagccagatgtagaatccctgttgttttgcccctacgtctgaataaaagcaatgacttgtgattgttaaatggctcctaaaatgtagcactaacagatgtgtcttgaaatatttttaatatattaaaaactagaacatcttttgtggtcatacagaaagtatggtgattagccgagggttgagcacagctggggtgcggttctggcatttggagctgccatcattcttttcctggctgctctggcctctgatccaatcccaggtaagccacaggctcagccagaaaaagcacagtcacgccagactcgcagcaagagctgctgggatccagccactgcccttagttacatcttttaaagattactttctgggcctaagtaagaaccttaaatattttgacctaaggttgttataactctttcaagatgaaaacaaaatagaataagttaaaaaaattcaaaccagaatgtgcgaaatcaaatgacatttgagttgttcaactgaaaacattgcaaagccagctttgtggaaggagtcttcaaaaccagacaccctgtgtcagtgggtggcagtgttttaagtaacctttgctcttttcaagtcttttgaagcaatgaaatatgaacactgctacaacaaacacccccacctctttcagagtttttttttttttttttttttgagacagagttttgttcttgttgcccmggctggagtgcaatggtgtggtctcagctcactgcaacctttgcctcctgggttcaagcaattcttgtgcctcagcctcccaagtagctgggtttacaggcacccgccaccatgccagctaattttttttttttgtatttttagtagagacgaggtttcaccgtgtactcctgacctgaggtgatccgcccgcctcggcctcccaaagtgctgggattacaggcatgagccaccgcgcctggccagaattgttcttcactcatgctacatgccttacctccaagacatcttaaacatgtagtcttagacacatagaacaaaatgaaagtgatgtggacaaagttcagcagctcctcaagcccagatttattgcctttgggagtcctttgtgtctcgccttggtaatgtccaaaggcctattctgtttaagataccatgattacttctctgaagttgagaaacataagattcaaccagatgaagaattctgttattaccacattaattatcatatgccatctggggatttttgtttttaaataccctgtcatcatgtggtagatctatatatgctgacacggaaagatcactaagacataacttttcgtgaagaaaaaaggaaaccaaagaacaatatagattgcttgattgtatttacattaaaagtaaaataaaatacctatttgtaatatatatataatgccragaaaaagacaaaactcattgtttagggggcagctgtgagattaaaggggagactttcacattttactttaattacawtactttaattgcattcaacagatggttatggagcccttactctgtacctggcactgttctaggctctgaggatacagcagtgatcagaagacaaaaattcctgccctcgtgaagtttacatttagtggaagagacagacaataaaccaagcagtagagtatggcaataggtgttatggaaaaagcaaggcagggaagcagtaaggagaattatggacaggaagtgggagttctaattagacaagatggggctgtcagggaaggcgctgctgtgaagagggcatcagagtcaagatggcatcaaggggaggggaaggagctagctacgtgcatttctggggcaagggcattccctgcagagggaacaatgagtgcatagacattgaggttggactagagaggacctgatgggtttgaggaacatttaggagcgtagcatatcagaggctgagtgaacaatacagggtgggtaggtgagtgaaggaagtcagatgaggctgtgggcaaggactttgactctcactctaagttatttggggagctgctgaagggttttgaacagagggaaagggatgtcctgtgttttaatttgagctctctggctgtcacgttgaacatggagaaagaagaccagtcagaataaactccaagaaagattatggtggcttaaaccacaatgttggcagtgaagatggtaaaaagtggtgagaaactttatatatatgttttgaagattgtgacactaggacctactgacagatgggatgatagatggaagaaaaagggaagaatgaataatgacaccagggtccttggtccaggtcactgcaagaatggagttgctttgactgaagagtagctggtagtaggagtagtagcaggatatcagaaactcaactggacatgtgatgtccaaaagaatgatgcctagataggcattttggtaggtactaatttttattaataaaaataagagcatacatcaatgacattaaaaacagaaaatacatagagaaaaatcagtaaaaccaaaagctagtcctttgaaaaccttattaaaatcagtaagtctttagtcaagctaactaagaaagagatgatacaaattactaatgtcagaaatgaaataaaggatatcaccacagattttatggacactaaaaggataatgaaggaatattatgaacaattctatgcccacaaacttgaaaacctagatgaaataggccaattccttgaaaggtaccatctgccaaaactcatatgagaagaaatatacaatctgaataattctatatctattaaggaaatcaaatcaataattaataagcctccaaaacaaaaagcaccagcacagataggttcactggtttctgctaaacatttaagaaagaaatgataccaattctctacaatatcttccagaaaatagaagcagagtgaatacttcctaactcattctaccaacccagttttaccttaataccaaaccaaagacattacaagaaaagaaaacaatagaccagtatctctcatcaacacagatgcaaaaatccttaacaaaatattaacaattaaaatccaaaaatgaataaaaagaattattcaccatgatcaaatgggatttatactgggtatacaaggttgatttaacttttgaaaatcaactaatgtcattcatcatatcaacaggctaaagaagacaaagctcgtggttgtatcagtagatgcaaaaaaagtttgacaaaattcaactcccattcatgacaaaaattctcagtgaastaggaatagagaggaccttactcaacttgataaggaacatctacaaaaatcatactgcttacatcatatttaaaggtgagaaactgaaagcattcccgataagattagggacaaagcaaagatgttctctgacaccactgctttcaacattgacctggaagtccagtcctagctaatgaagaaagacaagaaaataaaataaaaggtatatatcttgagaaggaagaaataaaactgtctctgttcacagatgatataatcatctatgtagaaaatccaaaagaattgacaaaaaaatctcctcgaacaatataatgagcaattatggcagggttgcaggaaacaaggttagtatacaaaaatcaattgatttctttttttaagaaaaaaaaaattttgagacagggtctcactctgtcacccaggctggagtgtactggcatgatcatggctcactgcagccttgacttccctgggctcaggtgatcctcccacctcagcctcacaagtagctggtacttcaggtgcacaccaacatacccagctaatttttgtatttttatatagagatggggtttygccaggttgcccaggccagtmttgaactcctgaggctcaagccttagcctcccaaagtgctgggattacaggcatgagccaccacacccagccaatttatttctttttttttttaaggcggagtctcactttgtgagacagagtgtcgctcttgttgcccaggctggagtgcagtggtgtgatctcggctcactgcaagctccacctcctgggttcacgccattctctgcctcagcctcccaagtagctgggactacaggcgcccgccaccacgcccggctaattttttgtatttttagtagagacggggtttcaccatgttagccaggatggtctcgatctcctgacctcatgatccgcccgcctcggcctcccaaagtgctgggattacaggcgtgagccaccatgcccggcccaatttatttcttatataccagcaaagaacaagtggaattcgaaattaaaaacacatgaccatttacattagaacccccagaaataaaatattcaggtataaatctaacaacatatatatgacttatatgaggaaaactataaaactctggtgaaaggtatcaaagaattaagtaaatggagagatattccatattcatggatgggaagacttaatattgtcaagatatcagttcttcccaacttgatatatagattcaacataatctcaaacttccagcaagcataaaaatagataaataaataaatccaccaagttattttgtggatattgacaaaccgattccaaagtttaaagagagaaacaaaagacccagaatagccaacacaatattaaaggagaagaataaaatcagaggacagactttatctgactttaaaacttactgcaaagctacaggaaataaaacagtgtgaaaagaatagacaaatagatcagcagaacaggatagaagagcccagaaatagacccacacaaagcagttamtcaatctttggcaaagaggcaaaggcaatacagtggaatagagacttcatcttttcaacaattcatgctggaaaaactggacatccacatgaaaaattcagtctaggcacaaatcttacacccttcacaagaattaactcaaaatagatcatagacctaaagataaaacacaaagctatagaattcctagaagataacacaggataaaatctaggcgaccttggatatggcagtgctttttcagatacaccaccatagacaatccattaaaggaagaatgggtaagttggacttccttaaaatttaaaacttctgctctataaagacaatgtcaagagaatgagaagagaagccacagtctgggagaaaatacttgcaaaggacacacctgataaagtactgttttccaaaatatgcaaagaactcttaaaactcaacagtaaggaaacaacctgattaaaaactgggcaaaagtctgagcagtcaaagagctcttaaaaaatgcaaagaacccttaaaactcaacagtaaggaaacaacctgattaaaaactgggcaaaagtctgaacagtcacctcgccaaagaagatatacaaatggaaagtatattagcatcacatgtcactaggaaattatatattaaaacaacaatgagataccaatacacatctattacagtagccaaaatacaaaactaacatcaccaaatgctggcgaggatgtgaaacaacaggaactttcatttatgctggtggaaatgcaaaatggtgcagacaatttggaagaaactgtcaaactatctgtagttcttacagaactaaacatactcttaccatatgatccagcgatcataccccttggaatgtacctaaatgaattggaaacttatgtcaacacaaaaatctgcatacagatgcttatagcagagttatttttaattgccaaaatttggaagcaacatagatgtcctgaagtaaatgaatggataaataaactgcagtgcatccagacaatggaatattattcagcactaaaaagatatgagctatcaagccatgagacgacatggaggaaatttaaatgcatattactaagcgaaagaagccaatccaaaaaggctacacactgtgtttccaactagacgacattgttgaaaaggcagaactgtggagacaataaaaagatcaatggttgccaggggttgggagtggggaaggatgactagcaaagcacagaggaattttagggtggtggaactattctgcatgatcgtgtaagggtagatagatgttgttatacatttttcaaaacccatggaatacacaaaaccaagggtgagccctaatttaggcaatagacttgaggggatgtggcaacataggttcattgattgtaacaagtataccactgtggtgcgggatgtggctactagagaaggtttgcgtagggagggagcgtaagggaactctctgtggtttctgctctgttttgctgtgaacctaaaactgtcctaaaaattaaagtttattaattttaaaaaataatatttggagttttaaaacacaaagactagttagtctattaaaactgtgaatgtgtgtagcaattctgcttgtgaagggaaatacactatttaacatgaaattatactcctgacacaatatgctatatatacaaagacctcataactagtaaattttcaacatgtgagttcagtgactagtaagaatgaataaaaatgaagctcctttagttaatctacgcaagggaacatctatttatagttactaattaaaggactctgtaaagcaggaaaaccatgcatggtaagtggtaggcagcaaactgttctgtggatttgggcctcatgacggtttaaaattgccttgcaatttgatctcaccagtggctgacatttgactatagtccatttgccagccaaggtaagtccctacccattgctctctgcagctggccccaagctcctgctggacaggaatgccttaaaggggacccacactgggaggcagttcagaaagagggaaaggcggaggaggtgtaagtaggacaaagaaaagtcaaactacagaggaatcataaagaaaataatagaataaattgagaacccaaggggatgggaaaaaatagcaagcaaggagagtgagaaagaagaaaaggtaatagtgtaagtagaaaaaactgttagtggaaggcaggttaaatttggaaggaaaaatagaacaaaaaagcaaagtaggagtgttggaatttacagcaatagagcaccacatcatctcttctgctcgataattttggaattgttggctgatgcattagcccagtggttttcaactgggggtagctcaccctcccactcaagagacagttagcaatgtctgcaaacattagggtatgctaggggtgctgctaaatatctgaaaatacacaagacagctccccacctccaaagaattctctggtccaaaatgtcaagagcaaagagggtgacaaacttcattggcccattgtcagcaccgattccagactcccagtgactgtgcttcaattcgcccactgttttctgacctatatcatgttatactgcatatagatcaagttgatggtcagacctcagaaaagaaattaaaatttggctgagaaagtatatccaaagtagaaaatcctttgcttcactctttctttcagcaaatgctcagtgaggacctgctgcgtgcccacggctgccagcacttaccaaaggctgtgtgggcttcagagatggagaacagattagtggttgccagggtttagggatggtggagaggaggggtgggtgtgacttcctggtggtgctggtgcagtgctgtgccttggttgccacggtggttacgtgaacccacacatgtgatgaagtcacacagaagcataggcacactttgtacccccatcagtgtcttggttttgatattgtgctatarttatgtgagacataaccattgggggaaatttgggaaagggtatacaagacctctctgtactatatttgtatccttctgtgagtttatacttatttcaaaataaaaagttttttttttaatcaaaccttaaaagggaaaaaacaagattggccaaacaactaatgaaagatgtaattttaaccaggatagacaggaatagttcatgcacacagaaccccatgcagatctataaatagaaagggccagaaaggcagcatactcttggagtgtggtgttgaaactgggaaaacaaactcactttttattaaaattgacctrttcagatgcagtgccaataagaaataattatgccttcttgtggaatcagaatacttctatttcagtgaaagatagatattgttgaagtataacactaagttatgtcatatctaatactgtttaattgmatgttttgttatagggacaagcagatcttttgaaatatgctaagaatgagacattggagaacctgaaacaaatccattttgctgctgtttcatgtggactgaataaaccaggcaccgaaaatgctgatgtccagaagccacgccggagcttggaagtcataccygaaaaagcaaacratgaaactggagaakgaggaaacttacaataaaycattatggagtttataactctaggaccaattgtagtcagatgggacatttgctttgcactcactaatgagaataatattygggattttaaagcacaactggaatagctaattacagtctattaaaactgtgaatgtatgtagcaatcctgcgtgtgaaggcaaataaactctttaacaggcaattatattgctggccaaaatatgctatatttgtatacaaagacattctaactcagttccagtatgaagaaagattattcactctagctccactgagaaacattttcctaagtgaaaacaatttcttaagatggaaatggattggattgtcaaattattatttattggagaaaaaaacctgatctacacatttttacttatatggggttgccagagtctctgggttctagatgattttggtggcatgcttgctgagccataattactaaagagaatgtaagtggacgggttccctgaatccccrgggtccttggagagccatcgaggagaatgtgcaattggactgaagctccctggctgaagatacatgccgagtcagcacatgggtagagatgatgtaaaagcagccaatctggaaacaatacattgtaaatagtttttcattgtatgaagtagtgttcacattaaaaagatgttttatgatatttctccaatagcagtacatgtgtttaatgaagccttaacttttaagatttctagctcaaaatattctactcttaagtgtagccacttacttgaacagctttgtcaaaaataagttgcttgtcggggctgaccttattttgcttttggtaaggtttcaacagctttaagcaacagcagctgactgtaaagtgaaccgagatacccacagctgccctcttgatgcttctgaattaggtctgtagtaatgtgcacctcagaatctggcaaagagtaagtcaaaagtagttagaggggcaggagaaggtgtagctttcctccagttctactggcaacaaattccttcaatttatgtttgtctgagaaagtctctgtttctccttcacttttgaaagataattttctgccagctgagtttttaatccaagcttttattttgcaaatcagtgagacttcgtgctttcaagatactgaacactgcagcctaattactgcttctcccaaaccaaaactgctttcaaattttggaagggtaaatatttactctaaatcttcaacaatcccttcttttctattcattgactcaggtatgtgagccagataagtatatgtaatcttcagctgagtatcttattagtgatttcctcacagttcaagagatgctcaggcgctgttgttcatttgtttctgtccagtctcctcaatatcctcttaaaaaaacaattctttgctcagttcttgtcatttgcattctaatagtgtgcttaagttaaggtacgccatctccactgcccttctctggatataattcgttggaaaataagcctgttccttggataatgttgctgttccctgcacacccaactaaccaccagccagtagcttaggcccttagctcagaaatgaactctacacggggtaaaaatgaatagaaaatagagaactaaaagtaaacttacagaatgagaaatgaaataatgtataacttagattgttaaaaatacttaaacttagctggaagtaaatagcaatattcaatttaaagtgaaaaatccagaaatcatgaaaaatttctatcttttaaagtataatgaaattgaaaaaaattctacatttctagtaatgacaggcattatctaatatgtgatttgaataactgatagtaagacacatgtaatttattgtagtttatacaggcttagagtcaacaattttataattgaaggagtctgagagatcattcagtcctacactttctttttcagatgccaaagttgcagatgaaaataaaaaatgcattgcctggtgtcaaaaagtctgttagaggtagtgttggtgctgaacccagcccggggtttgctccacctttccatgataaaatgtcaaccttcttttgacccatctcatcagaggaataagccaagtgatgggaatagcaggcatgcctgtcgggagttgttcccaaagcctcagcgtttctcctgtttatctagatcttcccccagtaaatgcaccatcctccctcgaggatgatgactcgtatcagcagagcacaaattcacagccaattgagctattctattctttttttcccattcatatggaaacagaaaacattcattaaactggtaagggccaaggttatgatttatggacctttataaacagctttttcttataaaggactgactgatccactctggattgaatctgtggaggccttattataacccccgcagatcaaataaaagtgagatccctgctcctgggttgcataagttgtagtgacagcaggggtaacatgcttgcttcctcccattatctgcattccataaatgggtgggggggcacccatttaagttactcattgtaaataccaataattccttgtgaatttgactaatgcatacatagggcacactatagacacacacacaaactgcattattcccaattaggaggaatatatacaatcagaggtagcatgaaaacaactggtaagtctctgctgaggacacaggaaaattcagatttggacaaaaatgcacagaaatcatggaaaacacctggtcaattcagtaggaaatgaaacgtcacactgcaatcaagcccagtgtcacatttccagcagttatgttgatgtcagtcccacagagtaaatcctgaggcctctaggaacacactaagtacattctgcttcctctttccacatacatattcagtgtatcctctcagctacttaaaatcttgcaggcattggtctattttctgtctttagcaggcatggcttctaaacaatgggaaagaagccatctaaacacaaatgcttaccatctccgggcaggtgtgacccagggaccagggcatggagcagagttcttagggtggtgggcagcccctagggaggctgctcttcctcacccacatggagttgggctgtgaagcactgaatggggaaagccatccagcttgcaaatgtttccacatgtggtctttgccatgcggcctcatttagtatgttgaggtactttgaatgtgttgaatcttcaatcaagcgttttaaaaagttataaatgcaaatttagtgcagttacagcatagttctgatttacccatccaatgaggaagaatgctgaagctggatatatctgtcttcaggttcagtggttgctcatgtctcggccaatatttgctgtgaacagacctaacatttgctgtcagttgtaagaattttctatttctaatatttgacagtgggactctttgttggggctgtgagccaaggactgtgtccaagacactttgcacatatcatttcatcttctcaaccggcaaagtacttgtctgatgttacagatgaagaaatgaagactttagacaggttagttaacgtaactaaggccatggagtgctcaagtcaggatttaaactcagctttgcctgctccaaagcctatattcccaaccattcttctgaattccagatatatatatatatatatataacctctaaactacaagatgggtactatcttgtaaagtataatgaggcagttggcattttcctcttctttttttttttgaaacagaatctcgctcagttgcataggctagagtgcagtggtgcaatctcggctcactgcaactcttgcctcaggttcaagtgattctcctgcctcagcctcccgagtagccagaactacaggtgtgygccaccactccctgctgatttttgtatttttagtagagacggggtttcaccatgttggccaggctggtctcgaactcctgaactcaagtgatcccaatccttggcctcccaaagtgctgggattacaggcgtgagccaccgcgcccagctttattcttcttaaatgcgatacatgaactctctagaagccactgagactctgattttatttagcacatttgagacaccagggattcactctggatgaaaacaggcatggtcccagcccccatggaactcacagtgtaattgggaagagagatacatttattcaaataattccaaaggtataggtgcaattaaaactatgggaagtgctatgaagaggccccactgagaggctgcctgggttccatcccatcacttcctagctgagtgctgagggaaggtgtgcttaacctaccttacctctgtaattgtggaagtattttgtttagtgctgtcttatgagttgtttgtaaagcacttagaccagcacccagctcgcagtggacttgttgtaatgttgccattcgttattgataggtgggaccatgagggtgtttaacggggcctcaccactcttgagaagatggagagagtatttactgctctgtaacccaacccctaaaacctgaaacagtcatttgttctcatgtctggggcttttgtgtgttgactgggctcacctcagttttcttacttagggtctcttgtgcaggcgctggcagatgttagcaggggctttagttatgtgactgggctgaactgccggctggctcactagctggcacagccactgcagggagctcagctggggctgtggaccagagcatctgcataggtctctccatgtggcttggagccctcactgcaggacactgcattccgagagggattgtcccaagggcaagcattccaaagacacacatggaagcagcttttcttcctgaggctcctggaggcctatcctcagaagcctcggcatgtccctgttgctacatcctattgtttaggcaagtcgctaggtcctgcccaggtccaagagggtgaactcgaccagagggtggcaaggtcacattgtggaagatgatatgggataggagatgttaagactatttttggaaaatacagtctactgtggaagcttccctgagaaagcggtatttgagttgagacctgaaggcaaagatgctctccctacttgccccaccccaaagaaaagggtcagcagcaggggatagaggagtggaaagcaattcaggcaatttagaccaagagcccagcattctgcaaaggctggtggcaggagggagtgcagccttgcttgaggacctgaaaggacagtgagactggggtgcagagaaggaaaaggagagggtgtcgagggagttgcaagggcacggggacctctcagggagggcttggcagtccttgttagggagtttgttcttgttttcctaaaagattagtgccaaccatttagttgtattatatttaacccactttgcattcgttttacttaattacaaaagaagtacatgctcattgttaccaaaaaaagtcaaatgctgacaaatgtaaatttaaaaagtgcatgtgccccctcacactgcccttctcccactccccatgggaaacagcatggccaatgcctccttacatggcaatgttcagatgccaccaacaaatgccctcctcctctccctgagaagttctgacttttactgtcaaggaaacgcttagctctttttaaggatcagagaaatcaaagcattgagtacataagtgaaggcaatgagcaattcagttttatcaactagaatatttatgtatttattcaaagccacagatgttagatgttaggtagaaagtagggatcaacagtttaacaacttatgtttagatgtaactattcaaatgtataagaacaagtgtctcccctctaaaaatatttttaaaatctcacacaagactctaaaccaaaaaccattgtaaaaaatcctttggaaatggatcattgtagccattgagatgacaggtcaaggtgagcattctgaacatataacaaaatataagataggtgataaatattcaaagcatgaaggaggtataatatgaagagtaaagtcctcccctcatctccccaagcctcagtgctaagaacttatcatgtgtaatttctggttttgattcttctgacaattatctcacaaactctggaccagtgctgtaaaatagaactttctatgatgatagaaacatctaaatctgtgctgtctaatatgataggcatgagctacatgttgctataaatttaaattttaattaataaaaatgtaatacaataaaatatgtagtttcacagctgcacttgccgtatttcagtaagtcagtagccccatgtggctagtggctaccataatggacagtgcagtgattgacaatatgtttatacctctgctttctgctttatcaactttaaaaagacatgctgacatcacacgaagggagatgaaaaatgtggctcatttcactacctcttctctttgctctccttccattcccaatccctattaagaacattttcattttagttctactggattaccttaataacttttaataatataattaaaattgcttattgatgcatcaattgttgactttcatactttgatccaccacatgttaaatcagaaaattcatgttctctattgtttccctccaaaacttctgcacttttatttttttatttttattttttaattatam

SEQ ID NO: 95340 - DNA, 15906 bp, Homo sapiens
tacccctggatttatgttattttcctttttatcatttttttttgttttattctttgtgaactacctcacatacctactatcttaaaaaaaaaaagatagagggggctataactaaataatagtaaaataacccagaaagtctttgggacagaaatcaagagataattataatgataattagatgtgtttttggaagtaaatccaatgagaagagtacactcgttattgtaaaggcaatcctggctgtcaggggtcacaagggagcagcccagccagtgatggtgacaatcaagcccaaggaaagatgtgaatgatgaggccactgatgttgatgtgcggcagagacggagttccttaggatgactggctctctagaaaccagaatttaaaagtggggattcaaagagaaagccccattgtaaggacagatggagaacaaggcacagggacaaaagcatgaatgaaaccaaatctgtaattaggcagtaagccagcctgtcaattagagtttttttttttgtttgtttgttttgagatggagtcttgctctgtcacccaggctggtatacagtggcacaatctcggctcactgcaacttctgcctcctgggttcaagcgattctcctgcctcagcctcccaagtaactgggattacaggtgcatgccaccacgtctggctaattttttgtatttttagcagagaaggggtttcactgtgttggccaggctggtcttgaactcctgacctcaagtgatccacctgccttggcctcccaaagtgctgagattacaggcatgagccactgcacccagccagaaatttttgattgtaaataacagaaatggacggtgagtaacataagcaggaggcgaaagggatttggggaagcatttggggtagctcacagactttaaacaaagaacaaacaatagtcttaaaaagggtagggtcccttctgagagataatgagccattgctttagggctctgctgttggcccgagagggcagcaaccattttccttcttatgaatctctctgctaaagattcagattgcttggcacatggtgggaactcaatacatataggatgaccgaatgagtgactgagtgaatgaatgaatgcaactttcatggagagaacatctaattggttgagcttgggtcatgtacctgccccttgggaggaggggaggagtactttggctgaaggtcccaccaaatccacgtacaatggggtgcattggttcagatactgttaccacagaaaagaatggatgtgggtcaggcagaacccaataggatgcctaccacagggaacagagcaatggctggcagactagagaagtcagtggttataggtgtggtggcggagcatctcctggtccagctagctagctcctgtcctctaatatctggaaggaaaaaactgcaagaagaagccacaggctttgttaccaatcttccaggctggggtgagacccgggaagtagacagctgggctaggtctcaaaggtgaagatgcagaaaggctgaggaactccaagtggagtctggggaagagagaggggtgctcaaagacaacaccagagtgacacatttagaaattagctacatatgttcttagagaagcaaacctgtgtgcgcttctcccataacatccattttgtgcttcttctttttcttatttccccttcctgccccctgccaccacctcctccttttttctgagacagggtcttgctgtatcactcaggctggaatgcactggcacctacatggctcacttcagccttgaactcatgggctgaatgaagtgagcctcccacctcagccttcgagtacctaggactacaagcctgtgccactatgcccagctaatttttaatattttttgtagatatgggggtaaggggtagtgggagggttttggggggcgggtctctctatgttgcccaggctggtctcaaactcctgggctcaattgatcctcctaccttggtctcccgaagtgctgggattataggagtgggccactgtgcccaatctgtgcttcttaacaaattgatttttaaagtctatgttaaggaaaccccttcaggttttgtaaaccaggcataccccaatcaggtagacagcataatcgcattcactgggctagacctcatccccactcaggcttctgcacttgcagtatcgtctgcatgcaactctcatccctcagttttcatctggctgcatcctcattctttgcaagggtcacctcccctttgcaaaccttactttcccaatttaaaaatagctgtttccagtcactctccatcacattaatattttatttcttctatagtacttaccattctcaaaaataatcttatttgtttaaatgtgtgtgcactgagtatctcccactctagagtgtaaacttcatgaaggtagggtctaggcctgtctgcttcacttttgcatctcacatagctagaccagcacctggtacattataggtgcttactaaatatttattgtcatccttatatttctgggataaacccaaattggttctagtttattgtccttttttccccacttgagtggatttgttttgcttatattttatttaagagttttatgtataaattaatcagagacagtaccaaatttcttctctgaaatccctctgtagttattatcccctttgaatgagttgggggaaatattccctcttgttctcttctctgatagagataagactgaaacaatctagttcttgaaagtttggtggaaccctcctttaaatccctctggtaatagtgttgtttcaatttataagtactgtttttcttctttttctttcttttccttccttttctttttttttgagacagagtctcattctgttgcccaggctggagtgcagtggcgcgatcttggctcactgcaacctctgcctcccgggttcaagcaattctcctgcctcagcctcccgagtagctgggactacaggtgcgcaccaccaaaccaggctaatttttgtatttttagcagagacggggtttcagcctggtctcaaactcctgacctcgggtgatctgcccaactcggcctcccaaagtgctgggattacaggtgtgagccaccgtgcccaacctctttttcttttttttttttttgagactgggtctcactctgttgcccaggttggagtgcagtggcaccattatggctcactgcagccttgacctcctggggtcaggtaattctcccatctcagtctcccgagttgctgggactacaggcatgcactgccacacttggctaatttttttgtagtttttgtagagatggggttttgccatgttgcccaggttggtctcaagctcctaggctcaagtgatatgcccacctcagcctcccaaagtgttgggattacaggcatgagccaccgtgcccggccataagtagtcttgtatctttttgagattgttaaagcaagttgtttttccttcctgttagaactttatcatttcatctcagtttctaaactaagtagagcggttactcttggaggtttttgggctgtgtaatgggttcatgcatattcattatattaaaacataggacatttaaaagggccacttggactaacaatggcagcatatcttaaatcaaggattatgagtaacctgaatctataatctcaagttctattgaaaatgcatatttgttcaaaatatgagggagtgaatctatcttggtgcccaggggcaaacattttccaaaggtgaatcttctaggattcacacagataggcccaaatgggaactgttcaggtaacccagccttgcatctttccccagttcagactctggaagaaagtccttgaagatctctggacatttgtccaggattaagcaaaagccacagcaagtttctttcactcgcatcagtgtgaagagaccaccaaacaggctttgtgtgagcaataaagctttttaatcacctgggtgcaggcgggctgagtccgaaaagagagtcagtgaagggagataggcgtggggccgttttataggatttgggcaggtaaaggaaaattacagtcaaagggggttgttctctggtgggcaggtgtggagggggggatcacaaggtgctcagtgggggagctttttgagccaggatgagccaggagaaggaatttcacaaggtaatgtcatcagttaaggcaggacctgccattttcacttcttttgtagtggaatgtcatcagttaaggcaaggaccagccatctggatgtgtacatgcaggtcacaggggatatgatggcttagctttggctcagaggcctgacagtttccaatagaacataacaggcagcagagaagacagagactgaaagagcatcctgggggagatggaattgtgacaaactaaaccagtgagccgaaattaaggctagccctgtggcatgactggctcttgtgcaagtgacattattatgtgacatattatatgtctgggtcattactatgctaaaataagtagattaaaatgaaaggaatttccaaacaaatgcgggaaggmaggcattatgaagttttcagatgtcattagctataayaaagttcagaattaatcatgacaccatgcaaaatgggaaaaatttgcaagcaaggagagggtggagatgccagaacccrtaaatttatgccagctgagcactgtgggggcacctggcaaatggatttactattttgccaacaccagtaaagtgttacaaaattgcaaacggaattatttctatgcaaacarttgtttttaaaaagggtccctacatcgactaatgcaattcagtttttttctgggtaagcacaaagccagaaactaaatgaaaaatattagaaattatttttcttggaatcatgttgaatattaaaattgagatttactttcctccccaattccctctctctcccatcagtcttttcatgcaccaatgtcattttagttttcgtggtaaaagaggtggtgaaaaaggggcaggggcatttgagagagtaggcgaagggaggctggggattccagaaaaggaaaagatggggagtcgctcaattaaactctaccaccttcatctgttaacagggattcttgcctgtctcgacccacttccagaggcaatgccatattatttgagaaagctggatataaaatttgagctctgctgtccttgtcccaatccccctccccaggagaaaaaataagctgaactgtactcgtgacattatgggtttttctggaaaacaaggataaataagttttttgaacatttttctcccctgaaactaaatccgtaagagagttaaaaacccgtggaaagcgagttaagtcacttttcaagtctttgtactcaggggattctgtaagactcatggaagaataatggcgcaaacagcaatattttaatgttagaacggtcctctgaaaagtctgcccgaaacgctacaaagataattgtgcagtaacttctaaaaactctactgggacaggaggcaacaaaactccggatcagcgagagctctgtttatccgagggtgctgagcctcaggccccacggagattcccttttcggcacttggaggcctgaactcaggtctaacctttcgtgtgcgcgctctgatactcaaccaccgttcagtctccggaggctgttacaactgtccccattctacagatgaagttgaggctacagcttagtgttcttggggagggagggagttggggggagagagagacgcttttcctcataaccttaaacaaaagtacttaaacctaaagcaactgaaaaatgattttctttcaacaacggtgtttcctttggggtcaagttctttgatctcatctacaaaaccaagaagcgggacaagtatttttctgcaaattagaacggggcgttcccctcccccatcaccccaattccagaggacgtcaatcacagtggacgcagcaccgcgagcggaaatgcggagagcatcggggctccgcatgtggggcacaatgaaacaagagcagccccggccagaggtccagtaaagcggaaagacggtcccgcccgcacacccctccggaaaactgaagcgtctcctctgacccccaaggtcagaaagatttattacttccttcgagagggcgcagccacagacccactagagagggcgggcagggtgtcggaagccagagaacggcgctccgcgtcctcccaccgctccagggcgcagaggtgtcctcagtgcccggagaggttggcagtgtcggccccgagggaagcgtggagcggacggccgacaggggatttctgcccaaacttcatcaccaactctttctgagagcaaaaacatggggccgagtccggcagctgcacgcagaatccaactctctggcagctctcggcaccgacgagctccagatcccgcgttcgcatcccggcgctttgcgcgcagagctaagccttcggacccgtggactgcagcccccgcgcgtcgcggtaaagcgggtcgcgtctccagcccccgaggcgcagcgacggtgggagccggctcggcgttgggggcgggggcggggccggcgaagggggagggctgcgcggcggaggggaggagccgcggcgacagacggcggcgcgcaccaaccgggcgccggctggcaggagccgcgcagaggctggtccgagcgcgttgcgggcgcccggcgtaaggggagtcgggtagcagcatcctcctgggcgccgctttcgcgcggcggcggcggctgcggcggggtctttctttgcttaaatacctcgttggccagaagcgctggtaccgggggcgggttgggtcgggtcgggcagtgctgcacacctgggtttccttgcctagagctgtgtgttcggggtcctttggtccagtcggaggctgcggagcggcgggggttgcctgcgctgtccgcccgggcatcctcccggtgatggaagcagccgccgccgccgctgcggggtcgcgctgtgccccatccaccgctgccagagaggtgggaaaattcgccgcacggaggccgaaagcgagaggggctgcgccgctatgccgggagctgagtcccatataagccgcccccagccatcgcccccagccggcttcgttcccctgagcgagacaggaagctgcggtcccgagaaagcggaggagacgtcgctggagccgggaggcsccgggttcggcggagcgcggagyggggctctgggccgcgtgaaagtttttcttcccgagccgcagggckcccgctgcccggaaactgcccagggataagtcggccgactccccagacccctcgaaggtgcgggkacccccagcggaagcgagagggagcgaaatcgagsaacgagtgacagccggacagtccgccgggcrgtgatccggggccgctcccgggcgcgccctcggctccaggtgagcggaggaaccgggcagaaccgagggtgggcgttacttaggaggaggaggctgggagggagattggggcgcatccgctcactccgcttcccctcgcaggtcctacccggagccgctgccatgggagagccagccttgggcgctggggaccagccgccgygcccgcctcggagtcgcggcccgagtcccggcgccagcagccagcccgctgcgtccccttcccgggctgcagggctgcctccgccgcgccgccggcccggattgtgcctgtgatgagccgcagcccgcagcgagctctgcccccgggcgcgctccctcggctgctccaggctgcgcctgcagccgcgccgcgtgccctgctcccgcagtggccccggcgcccaggacgccgctggcccgcgtcccctctcggaatgaaggtgttccgtaggaaggcgctggtgttgtgcgcgggctatgcactgctgctggtgctcactatgctcaacctcctggactacaagtggcacaaggagccgctgcagcagtgcaaccccgatgggccgctgggtgccgcagcgggggcagccggaggcagctgggggcgcccagggccgcctccggccgggccgccccgtgctcatgcccgtttggacctccgcactccttaccgccctcccgctgccgccgtcggggcggctcctgcagccgcggcagggatggcgggggttgcggcccctccaggcaatggcactcggggcaccgggggcgtcggggacaagcggcagctggtgtacgtgttcaccacgtggcgctctggctcgtcgttcttcggcgagctattcaaccagaatcccgaggtgttctttctctacgagccagtgtggcatgtatggcaaaaactgtatccgggggacgccgtttccctgcagggggcagcgcgggacatgctgagcgctctttaccgctgcgacctctctgtcttccagttgtatagccccgcgggcagcggggggcgcaacctcaccacgctgggcatcttcggcgcagccaccaacaaggtggtgtgctcgtcaccactctgccccgcctaccgcaaggaggtcgtggggttggtggacgaccgcgtgtgcaagaagtgcccgccacagcgcctggcgcgtttcgaggaggagtgccgcaagtaccgcacactagtcataaagggtgtgcgcgtcttcgacgtggcggtcttggcgccactgctgcgagacccggccctggacctcaaggtcatccacttggtgcgtgatccccgcgcggtggcgagttcacggatccgctcgcgccacggcctcatccgtgagagcctacaggtggtgcgcagccgagacccgcgagctcaccgcatgcccttcttggaggccgcgggccacaagcttggcgccaagaaggagggcgtgggsggccccgcagactaccacgctctgggcgctatggaggtcatctgcaatagtatggctaagacgctgcagacagccctgcagccccctgactggctgcagggccactacctggtggtgcggtacgaggacctggtgggagaccccgtcaagacactacggagagtgtacgattttgtgggactgttggtgagccccgaaatggagcagtttgccctgaacatgaccagtggctcgggctcmtcctccaagcctttcgtggtatctgcacgcaatgccacgcaggccgccaatgcctggcggaccgccctcaccttccagcagatcaaacaggtggaggagttttgctaccagcccatggccgtcctgggctatgagcgggtcaacagccctgaggaggtcaaagacctcagcaagaccctgcttcggaagccccgtctctaaaaggggttcccaggagacctgattccctgtggtgatacctataaagaggatcgtagtgtgtttaaataaacacagtccagactcaaacggaggaagcccacatattctattatagatatataaataatcacacacacacttgctgtcaatgttttgagtcagtgcatttcaaggaacagccacaaaatacacacccctaagaaaaggcaagacttgaacgttctgaccaggtgcccctcttcttmtttgccttctcttgtcctctttctcctatttcttaccctgtcctccacctgccttccattttgaagtgggatgttaatgaaatcaagttccagtaacccaaatcttgtttacaaaatattcgtggtatctgtgaacatgttaagagtaatttggatgtgggggtgggggtggagaaaggggaagtggtccagaaacaaaaagccccattgggcatgataagccgaggaggcattcttctaaagyagacttttgtgtaaaaagcaaaggttacatgtgagtattaataaagaagataataaataatattctttttaatatttgcctccattactttggattcacctgtgttacttgtcctcagcttcagatagaatctccttcccctccctcgtttccatttttccagtctctttcctgaaaggcagctaaactgggtgggagcaatttttgcctccttggtaataacctgggggatgttttctcacatgtaaatctcagcctgttaggtgtccaggagtgaaacacatctttgtattctaaaggcagaaaccaaacagggcagtggaagaaaaagcacactactctcttcaactttgaacacaggaagaagcaactccttcaggacttgaaggcatttggtttttcattcctcttcagttaaaatggggaaccttgaagcagagaccaatgttttggtcctgaggctggttcagaaaaaggatttttaaaaaaagtatgtaatttttaaaagttctgatgattagaacacagacctcaggaaagtagcgtgaacatactgctggcgatggtagcagcttcgttggtttagcaaagtgacagaagtatctatttggagtgtttttctgaccctgacacggtatgtggaggtggatgaaagcagcgaagtttcatctgagaaccgtaagggttttcccttttcttacttgcttcccatttaaatcagtgcaagagagaatatgaatttataatgctttacttgggatgcctgtggaatatgttgcttttctttatcatgtttcctaaaagtaaatttgcaaagaaagtaacatgctgcagacagtataaggcttcagccaagagcttcttttagatatgataatgaattgtggtaaagaggaaatgaaaatgaactagtgtgtaggattttgaaatttggtattttccagggagaaaaccgttacattttcctgtagtggttatgatgttgtgtcctgaacccatttggtactgaaacattctgcagaaygttatactatgagaagaaattgtgaagcccaaatgggaacaagagacagtgtagttgtatatgacagtaaatacagtacaagttcactatcatcatggttttatttcactgtgattttttatgagatctctgaaagccaacatgcataggttaaatgctgagaattttattttagggaaaagatgataaaaataatctgtacgtggggaatattttaacacacaatgattcttaagtataattaccattgcaatacaaaatctagctacgctggtaagaattccaaggtaaagaagcataaaggtttaaaaaggggtatatttagaaatggattttataacacaatctagaatgcttatttcttaatttactaaaatagtttttagtattgtgtttctgaagccagattacatctataatacattgatcatgttttccatatttttgtggtagtgcctatgctgaattagcttcaccagcagtagaatatttgtaatagatttaatttaagaatactttaaagttaaatgaacaaaataaatactaatattggatggctatagatgaaacagatttaacaggaaattaagagagcagcattaaaaagcaaccactctgaataaaataaccatttataaacaaattttgtgtggcattagaatcagctcttaacaattgcggtgaaattcatgcctagttgttgagtgaaggattttcaagcagtgaattcattcttctttcagcttatctaaggacttggactgtgttaaagtagaattatgatgttttggatcttgtatttaaaacaatattagatgctagatagagcctttgcagctggcagagcatttgtggcctctgctcagatgaaattttaagctaaacaccaacagatcctctgcttgctctgtttgaacagggtttccgttcgtaatcttgttttgtagcagctgcattctctccactctgccactcctgtgctctgtaatttgaaaaggtgaattgttgctcctggagatttgwacctagctgccttctaggaaagtgagacaggtggtgttcccactaagggctgagctagtcatatcagtgacattcagcttccgaaggtttgagaaggagagagaagaatttttggcgttaacaagcttctgtcaacccctagtgcaagcagacctgtgctatgacaaattgcaacagagcctgtgaccattcttgaggcagcaaatatgaacgagatcctttcacatttcccaagctggcaatatgtccgtcagcaagagaaaatattctttagagcaggttgtcagagtgattttcattttcaaattctgctcaatgatagcactccttacttaccgcttggctttggaatgcctttgttaatgagtaagctgtatttataaaacaaagtttacccagtgcgtttagtcaacaaatttgagtttggaacaaggcagaggcacaggctgggggcttaaatttcaaggagctcagagccactcaaagacctcattcagactgacagtggataccttgcaggcaggggccagagcaaatctatacccttcagtgtccaccacatagtgcatgataaatatttattaaataagtgaatgaaatatgcaactatcaaattttgaaaatacttggaagggagagagtggaagagtgtattacctgtgtggggaaaatgccagcctgttcagtaaagtttgctgaaggaaataagccataggctctatttagatgtggggagtgagcaataggaatatcttcaagatttccagggcaactgtttatagactatttcccagcgatgaattagagaaaaaatgcacaatttctaaatgtggagaggtaaatgtttcaaagtaaggaatttgattgttactgttttcccacttgcatgaacaccataagggcggggatcagaacaaacctgcagagcagatgttgtccaggggtctcagggagggctaaaaagctatttatttttgcagaagtcatgtggcacttattgttttgagtgctgcaaatgtgtagtttgatggactgtgatggagcaaatgttgtccaggggtctaagggagggctaaaaagctgcttttttttttttttttttttttttgcagaagtcatgtggcacttattgttttgagtgctgtgaatgtgtagtttgatggactgtgatgtgttaggttggtgcaagcgtgattgtggtttttgtcattgaaagtaatggtaaaaaactgcaattacatttgcacccacctaatagattttctgcaggtgtagggatggttactttcaggaagtttgtcctattgtggatgctgagcgagacaatggctgcctgttcccatacattccctgcttggccacagccagttttgtccaggatttctgttgtacacagtacagttgcagctggattatgtgattggtttgaaattaatgtgaatttgggggaggctattaaatattccctaggtcttgaaacgcagactctagagatgactctaggaagagcaagagggaaatgaaaagcgtgtctcatcatgtaggcatggtaaataaggacaaggtgtcactttaccatcctcctccaactttctttcttccctacacacaacacacatgcacacacacatacaattgagtttctgcatcgtcttgaagagatctggatgagagaatgttctaatcccagctaacagatgcgtggtgaggcacacttttgatctcaggcttctggagagtgagtggtcggccaattgttatattagaaagcttgacagttctgcgtcaggatccaatggggataggtagaaaatgacaatcacaatttgaggaatgacttgaggtgtgtgatgggatgtcctgaggtaaatgcgcagtttatagaccccttttgtccttcaccttgaggaaacccttttcaaatctgtcacagctaagaaaacaattcattcagacactttccctgctttctgtacattcagttgctacttttgcagttcaagtatgagccactgagctgctcaggtacaggctttggtacaagtatttaataattgaaattacagggcttggcttttattacatctgatgcaattctgcacatccttaatcaaattatgctaagaaaatgttgaactttgcataacacattaagtttatagaattggaaactgtatgaaccagtgtttggggtagggggtgctggtattgtttctaaatgaaggagctttgaaggagcaggagcctgtctgtacacatggtaacaggatgataaaggatggccaaggataaaccttaacttttggtcaaaccagttatctgtaatcaaatatcaaaagtatttttgggctgcttgaacttttaggttggtaatagtcaccctaccaagtgaatggcaatgaaaatgatcactggggctaaaagctgtactcagaaccagtctgtaatggctcccatcccaggtgtaaagacagggcttgatagaaattcaccttgaggcagttagtcttctagacaggatcaactacataatttgcagggctccgtgcaaaatgaaaatgcaatgccgttgttgaaaaaacaattaagcctttcaagatggcagcagcacagaatgaaaccaagtttggggtccttctgagtggggggccctgtgtaactgtgcaggttgtatatccctgaagctggccctgtttccagatgcagaggatgaaatgcctggctataggagacagcaaataatggtgtcctacaagttctcggaaaatgagtgcaaaggtatgagttattgtgggtaactataatgaaagcaaagacaagcaagcgcactttgcatgatggaattccaaagaggtcagtgcatacatgacaaacaatccttgatgattgcagcaagagattgacagtgccccctcaatcattggttgggcttgagaacactcagaactgatccggctggaggctgagagagcgtgtgttgttcctgggattcctctcagaagaacaggtcagatgtcttgcatgaggatgaagaacatggtgtccttgtcctctggctgttcccttctgtaacttttgtagggctctcccttgatttgcgtagtatgtaatagagacagaaagtctatgcatggaaaagcaaaaggtcaagtcacaataaggtcaaggagtaaatgtacaagatgtgctaaacaaactgatatacctctttattatgttaagtatagtcagctaagtttttttattgtaggcttgatatgtcccattttcctctgaataacttctccacgctctctactgcaccccctgcctcccatttcttctccactttgtgaatctcattattaagaccctggatctttttgaaacttttattcatcagccctgctccaagatgcagaaatgcctttctgtcctgttattcctccgactgcctcctgcatagatctgtcagtgtgtgctgctacagattggaattgtttgtttataggcccgtttcctctcttgtcctggacttcatatgtatggggcagacagaagctgaaaaagcaaggcaaattaatatagacaaaaaggaataccaaataatgcccatggaaggcctcaaatgtttttccacattaatgtttgaaagagaaacaaacaaactgaaggccccaaacgaaaggtaacaactgaattacagtccaacacattttttgagttgaataggaaaatgtattacggtcatgttggctgaggctgtatttgtttttgacatgtagaggtcatggccagtatgatcatcttttaaccatttcaggaactgaaaaatttttcagaaacaatgtagaagtctaaatattacatttccattttcagatgtcccagttgctctggcaagctcccagtctttctatgaatgaactagctcctgggaggaattaaaatgtttcatttctcatattggtgctcagtatttttacatgaaggatgctgttacattattcctctctaaaggaaaataggaatgagaacatatctt

SEQ ID NO: 95341 - DNA, 83585 bp, Homo sapiens
ggcatggtggctcacacctgtaatcccagcactttgggaggctgaagcaggcagatcacctgaggtcaggagtttgacaccagccttgccaacatggtgaaacccagtctctactaaaagtacacaaaattagctgggtgtggtggcgcgtgcctgtagtcccagctacttggaaggctgaggcatgagaatcacttgaacccagaaagcggagattgcagtgaaatgagatagcaccactgcactccagcctgggtgacaaagtgagactctgtctcaaaaaaaaaaaaaaaaaaaaagaatctgggcaaggaaatgagtgatacagcatcaatgcaataatttttaaatatttttgaggttggctacttaaccttctttcttactctgcgtgcacacttaatttttcagtagaggatggaatctttgtatcttcttcaatgcctattagattttatacatacttgcctcttagtatcatctctaacaattttctgtttgaaatttagcttttagtgattcaagaatttatcattcaaaatccccaaatacagtgaccataaagaaggtggatgagccgctggtagatatcagaataatctgggaaacttcccaaatactacctagaacctagaaattctgcatatcagcagaggggaagaataggagtgtcaggcacgtgtagttacaaaagaactttccaggtgactgagtcctatcccttgcccaacactgggaactaaactcctctaatttcttattaggaaaacagaaaatgtacagcaaatcttcactagaagatgacttaggatttcatggtttctattcagaggactttgtaaatttaagaatcatattggaaagacttcctctggttttgcaaggacatgggaaatactgtcacaggttgagattctagggtattttaataatgtcccgattgtttttgtggtttctcatatgcaaatcctccaggcaacaaggacataattatggaattaaaatcttaaccctggcatccaaaaagctaacaaaggagcaagttatcctgtttatgttatatatttcacaattctggatatgtggttcccagcctatccccacctaaggatacccatttagtactttacctagtaaagcatatcacaattaaggacccacaaaatgctgtcttagattccggaaaagtaatattctttccaaagaatatgaaattttaaaaatgagaaattaaatagtaacaaaaacctcctggttaatgttaattatgtggaatttttcgttagtcatgtgttgagattatcaactgtttggctattgttttagtaccactaagtagagataaagctagtttattcaaataaagtgacactgcaaatttaactatgttgataacaaatcatcaaaaaggtatctttggattacctacacgctttttaaaaaatgaactggcaagattgttgcaattttccacctactgtgtacttctgcaaagcaataaagtatgattttactcgaaatctaaatctccaatgttcaatattttattacaaattgggcaagatcttttttcgaatagcatgtttgatggcacaatacgacagaatagcatattcaatggcacaattagtagtaaaaaaacaaaaaacctgcctgacgtgcttccggaaaacgtaaaatagactgtatatacagtaattcttttcataagacaatgacaaaatgtcagagttgtaattgaggactttattaactgaactatacttctgattacaacattctgtgtatgttaatagtttctctggagaaattacgggcacaggaagttcctctcattaaggatattaacataaagcttaatatgaaaaattagcactcagttcagaaatgacgacttcagaaatgacttcagaaatgacgatttgtatgatcttttcattcctcacaacccagtattaaaactatctaatattgcaaaggatggtagtgttccacttcgttttgctattcaattattgctgatagatacatgttttcaaaaaggccattggcatctgtttgctttctcctacttctccaagtgaatacacccttcaatatgtagtaaatacatatgtggagttatgttttgagatttttttgaaggatttgaaccaaactgtttaaacagctggtagcctaaaactggaatatttcccacaagggaaaaataattatttggggaatgtatgttaccacaaactcatctgacttggaaagtgcgcctttacaccaaatcaaataactgaacaatgggattagaaacttttaattattattaacctcggccaccgggcgccgtggctcacgcctgtaattccagcactttggaaggcagtggcaggtggatcgctcgagctcaggagttcaacaccaacctagcaacatgacaaaacmccgcctctacaaacataaataaaaaacaaaaatcattaaccttgagtgagtcaagttcatctgcagactgaaaaaaataaagtgtaacagaattttgatttaaaaaacgctttcaaaaaagcatttcaaaatgctctaagtatgtttcaaaaatacacttaaaaatatgtttccaacacactgaagggatttaactaagatccacaattacagttacgatacaaactgtaagctaaaaggcagcaacttaagctgagacagttactaacatccctcgagcagcgttttttgttgcgattcggcgccgcacccgtcaccccgccctccggggaggaacctagaaaggaagggtggtacatttctaaaccaggccacccacacatgaatcaagcggcatcacaggctgtcaacaaccgggtctctattttctctcctcctccggcgccccgcccgtgcgggacatcagctcccaggatgcgtcaatcgcagatcgcccaagcgtaagaggtggcgagaggccaccacggttgcccaacagttgcgttcccaggctgcctggtgtgacgcagcagcccccgcccggaccctgaggcctggcgctccgactgagccgaggcctgtgctacccgacactccttgcgacccggccccttaggcttattcagcgcggcccttcccggcttcccgagtcccatcgcagtctctccccacccccgttcctccccggttccttgtcagtgtccgccgcgatgtccttgcgcaaccatcccaagtgacattagcgcccatacccgcacggagcgagcctgaagctcccacttcccggaattcaacgccgggccgctaagggcgggcacccaagcgaggatcagcggactaaggccgcgaccagagtccagcggtctccgcgcagtcagagtccgacagcctctgcgcatccgccgtgcgcactcccattcgtgcgcgtgcgcgcactcgcccccccgccccgccccagcaccaatcgcttttttcctacgcccacgacccttcaacgtagtccctcccgcctcccgcgcgcgagcagaaaggcttcggcgtgcgcgcgcccgcccgcctcgcgctctgtcgggaaggggagtgagcagaggcgcttacgtcgcgcgggaggcggaggcgacggcgacctcggtggcggcggcggctacgacggagacggttgcgctcgcttgctttctcggcgtcatggcggctgccgggggcagataagcggagggagcgggagcgcgcgcgcgacggcggcggcggcggcggcgacgactggttacttatagctcttgctgccctcgcccttggtgcttcaataatgaattgttagctccactccgcaggggatcgcgcgttggtgctgcggaccggggcttccccttcccctccgcgtctgtccccttccccctcccccgcacggactcttgcttaccccgagacgccggagccctaggactgggcggcggagatcccgggcctgggygcgggggaggccgtccacccgagtcggctccctccgccccgccaagcccgccggtaagaaagggggcggcgggcgggtcaggatgtggcggagaggacaggaaccggccgggcggagggcgggcgcggcgcggtgcccaggcggcggcccagcggccgggtgaaggccgggtggctctgtgagtgccggtggcggtgtacgggcctggcgcgcagggggcgtgtgagcggcgagtacaggccggggccgcagaacgcatccttgcgccggcccggcggccctgccccggcctcttcggcttggtgccgaccgggccgcgagaggagacccgcgaatggctagcacttagccggtgcgtgggtcctgccgcgacccgggctcccagcacgtggggagcggcgggagggggagggggcggcggctcgggcgagcctgggagggcgcggggcgggtctgcgggaagtttgaggcgggaagagggactcctggaccgggatggaggccctgggagaggggggcaggtccgcgagggaggctgattggagcgcgctggatggatgagtgaggatggtttccaaacctctttcgagtgccgctttaaaaacttagcaggagcaaagcaactgctaaaagacagaggattgaagaggtttaataacttagggtagtcattgtggagacgcttgagaggacacagcgctgtgtgcgcttggagcttcagaactcagggttgtgaaaagggtctcagaggacttattcggataagggagatggaggggaaaggaagttaaaatgtacagagaaagccattttgagggacgaaaggaaggtgaaaaggaaagaacgaaaaggggagtgaactttttaaaggaagaaacgggaaaggcagtttgttaacatacttagattttttaagacttaattgttcagtaaggcactttgactagggttgagattaatatttaacattaggaataaatgttgagtagaacggttactttttagataacctgttcttgcagagtctactggacagtagtctagagaattaacatcctgatccagatgcagactttgctatcattgagttggtaacaatctgtttccctccctctcttgtggaatggaaataatcgtaggagtgaattctctttgctgaggtcggaggacagctctgctctcagttggctgtctcggtactttctggctggggaaggatctgacgtctccttcccccgcttcttcctctccctcccctgccagagatctcctttgtttattcgtggatggcttgtaggtgattcttcagtgttgtactgaaatctttaaaggtggaaatggtgtgtcttggttcattattcttgccccaaattttttacrtaaaaaatcagatatagtgtatattctattaccttttcaatttttttcacaaaataaaaaccaagtgcaaactggttaagtattatttaaatgttatcatcccactatccgtttacctgttaaataacacatttattttgagctatgcatttttgttgagagtatatggtatcttttatttgcctgttcctcccatgggagcgttttcagaactttctcactcaagtgtatgaagttcttggtgataggagtgagggcttgattaaaggtaacctcctcccacccccccccccacttcatttattcgaccaagttatctaataagactccgttatctactcttgggatgtatgcatatgttacatcgtatcaccttgctttaggagtctataaaaacattgttagttgcagttagtctctaaaaatcctttcactccacaaatattttaattttttctgtccgaagtatattagcagtagcatactaaattctagttagcagtcaggagtgtagttattacaagtctagatattttaagtatttaataaaaggcccccacttcttccttaacagctgtagtctaattggcctacgtagatttatacgttttagacagggcttaatttaccttttttctgcaggaaattttgttaatttattaatatattttctttaggtgaatcaaaggagagtcccagaaaacctgtgactgttgaagaaaattcatctgtgaatttttatattcaaggagtcagtatttatattcatcttttaaactgggaagatttatattttactttaaaacttcttgataataatttacaatgaatggacacagtgatgaagaaagtgttagaaacagtagtggagaatcaaggtaagtaagcactttgttatcaattgtttactatgaagagagttgaaaacttgacttttttctttaktgttattgttgttatttagttttcctcataggtagcagagttttcaggttttcctcttagctatccaaatactaaaaaarttctgatatacgaaccttttttcataatacaggttttaattatatttttcattcagatacacagtagatcttaaatatagaaagtttttgtttacttaaatctatttggaagtttatatttgagctaataattaagctggagcatgtataatagatttaaattgttttgactgttagtgaaatttctagatgaaggcaataaaaattttttcactcatctttttctggcattttgtcttctatacctgtactgtccagtgtggtaaccactagccacatgtggctatttgaactcaattacaaaatattcagaatttacttagtcatactagatatatttcaagtgctgaataatcacatgtggctagtggctaccatattggacagcacatagaaaacattctatcactggagaaagttttagacagtgctgagccagacatttgttgaaatattactgtggcccttttttattttcagattggagttttaattatctktgaaggagttaagagttcttgcttgggtcaagtgtttgcaaagaagattctttaaattctgtagctctcaaattttgagttatctgcacattagtttacaatccatgtagttatatgcattatcatatatagaaattaggaatgtgggcactggagtcaaactgtttgcttaccctatttctacctcttattagttgtgtgaattagggcaaattacttaatctctgaggctctgatttttgccccataaagaggggattaaactattgtttatcttatttaaagttcacggctgggcttgttggatcctgtttgtaatcccagcactttgagaggctgaggaaggaggatcacttgaactcaaaagttggagaccagtttaggcagcatagtgagactttgtctstaatttataaaaaataaaatttaaaaaaaatttgaggattgagatgcttcatgtaaagggcttaaaatattttctgagataatgagcactgaatatttgcttattgtaaccagcatgttttgtgtaacacaggatactatataaaaaaaacattaattacagtgatggagacatgggggtggacaagaaacaggaaagttttggcaattaggaagattaagaaaaaatgttagatagaaaactaaatagtggtatttgtatttkatctgaaacttggacttttctttttctttttttttttttgagacagagtcttgctctgtcgcccaggctggagtgcagtggtgtgatcccggctcactgcaacctccacctcccaggctcaagtgtttctcctacctcagcctccrgagtagctgggattacaggcgctagccaccactcccagctaatttttstattttttttgtagagatggggtttcgccacattggccaggctggtctcgaactcctggcctcaagtgatccacctgcctcgagctcccaaagtgctgagattataggcatgagccaccacgccaggcctgacacttggaattttctgaccttgctagttatactttagtttatcagctttcatacatactgtttggataagcaagaacatcatagagaataaaataaggaacagttatggaaagcagcattattacttgaacaagtattggtctaggagttatacaacytgagttgatgctatctctgcattaattaaaactcatatgattgcctcaactctaaggattgaactgatattgaagtttcattttaattaattacaaagtgcatcgtaaagtttcaaacagtaaagttttactagaatcaccagagttgaggtttaattaaaagacttttgaatctgagctttgattcaaatctctataggtatgttgactactgactatagttaagtaaatagaagagtcatattgtccacccacaattttttttttcttttcttttcttttgagacagggcctcactctgtcacccaggctggagtacagttgtgtagtctcagctcactgcagcctctgcctccacctcctgggctcaaacgattctcccacctcagcatcctgaaaggcgtgcatgccaccrcactcagctaattttaaaattttttgtagagatgaggtctcaccatattgcctcagctggtcttgaactcatgggctcaagcagtcctcccaccttggcctcccaaagtgttgggattacaggtgtgagctgccacacccggcctcacattttcttattcrtagttggaatggaatggttagtaggtagaaatacctagaggaaacaaaggaaccaaactattcataaaataggagataagactcgagagtaaatcttctagttggatatgcagacagatcatgtgctggtatattctgactacttacctgttccaatattttatatatttttctgccatatctaaagcgaggaggagtaataagtccaatttgatactacaggtgaaaaaaaattaaaccttgtggccgggtgcggtggcttaygcctgtaatcccagcactttgggaggccgagcaggcagatcacctgaggttgggagttcgagaccaccttgaccaacatggagaaatcctgtctctaccaaaaatacaaaatgagctgggtgtggtggcctgtaatcccagctgctcgcraggctgaggcaggagaattgcttgaacccaggaggcagacggaggttgcagtgagccggagattgcgcgattgcactccagcctgggaaacaagtgaaactccgtctcaaaaaaaaaaaaaattaaaccttgcgaaatcaaatttaaggaatcttttacaatgcatactcatcttaaataattgcaaagcatatttctttaattattcggagttgttaattctgctatacaggttttgtgtgcttctgaaaagtgtggttatcaagttatctagtttttacaactgccttggagtttatcaggagagagacyttcttttttgccttcattttctttcttaccgctgctatactatgctctactgtcattaacactcaattcccactcccttccccagaagcttttgtcataagacattacaaagaagggagattgtgcctagttaaaagactgaggaggtgaactttagaggtagagggattttcttgcaaaaaaaactaaagtttctataactatgaatattaatatagagtaattttttttcttttttttgagccagagtcttgctctgtcgcccaggctgcagtgcagcggtatgacctcggctcactgcatcctccgcctaccgagttcaagcaattttcctgcctcagcctcccgagtagctgggactacaggcatgcaccactgcatccagctaatttttgtatttttagcagagacggtgtttcgtcatgttggccaggctggtctcgaactcctgacctcaggtgatctgcccgccttggcctcccaaagcactggggattacaggcatgagccaccgtgcctggcccctaatataattagattagaaatatactttgtttctaaagttgatattcattgtaagtagctttttaaagtaaattttggttttttagtggctagaattctataatgtatttttgcttcaaaatttcctttttcttttgtgaaagtttattaaacggaatagaattaagaaagaattcatttggcatttgcaggttacagttagctttctactgaaaaaaaaaawttttaactattctttctgtctggagatctctctataactattcactgaaaggaagaagaatacacaggaaaaatatgtctcttttgctatgctattgctgacagtcttgaaatttagttactaagaaatgtgggccaggatgcacctgtataacagttacagctcaacacaaagttttatgtaactgaagttaagctttttaaagataatgctggaagatttcaaagcatcaatttgcagctgtgtggatttgtggtggtatttgcragcaaatttttcaaatcctggtagacttttttttagtgtgtgtgtggtttgtttttttttaattgagatggagtctcactgttgcccaggctggagtgcagtagcacgatcttggctcactgcagcctccgtctcctgtgttctggcagttttctgcctctgcctcctgagtagctgggattataggtgcccgccaccatgccccgctaatttttgtatttttagtaaagatgggatttcaccatgttggccaggctggtggtcttgaactcctgaccttgtgatccacccacctcggcctcccaargtgctgggattacaggcatgagccactgcgcctggctgactttttttagttttaaataagttatcttgagtgatgatttacttcaggaatggctatatggttaaagatcagaatggtgtatgagttacctttcaaagattacttttctgtatgtagtcataatgtgtgggcaaacattaatgtgatgttaccccttttactctgcttaagtagctgcttgtttaagatcttgatgactgatkggttatatatggtgcagttttgtgttttaaaatgagtattactttatgatgaatggagaaaatgtttaacctttttttaaaatgggaaatatttaaaactacagaaatagaaaagttgcaccagttgtggtccgtggaccagcggtgttggcatcatttgggagcttattataactgtagaaccttgtgcctcgccccagacgtactgaatcagaatcttcattttaacaagattctaagtgattcttatgtattaagttcatatacatttatatgaagctattcatctggagtcatagcatcttgccactttgttattgatgttgttatacatggttttcattctctgcgaacctccaattaattgtgtcttgagcaggactagcaagaggctaggtaagtttcgtttctccggaagcagtaacaatggcaactgatgattgttgagctcttgctgtgccttracctagcatgatgcacatagggcattgtgyattacttgaattgtcacagttcatcctcacaaaacttctgtgatgtatacattgttatgattcccactttccagatggggaaacaagatttatagccattttatttatttttttattcttttttaaaaaactattacctaaactctatacttggatttcattgatttttccattaactccctcttttctgttgtaggattaaatccagagtgccacattgcatttagttgtcacgtctccccagtctcctttcatctgtgagagtttctaagtctttccttagttttcatggtctaaaccatcttgagaaatactggccaggtatcctgtagaatgtytttgaaatctagatttgtctytttttttttttttttgagacggcgtcttgctctgttgcccaggctggagtgcaatggcacgatctcacctcactgcaacctccgcctcctgggttcaaacgattctcctgccacagcctcccgagtgactgggactacaggtgtgcaccaccatgcctggctaatttttgtatttttagtagagacagggtttctctgtgttggtcaggctgatcttgaactcttgacctcaggtaatccacccaccttggcctcccagagtgttgggattacaggtgtgtgagccaccacacctggccttgtctattgttcttaggataaactagggttattggtttttagaaagaataccacaaagataaagtgtgctagtcacatmatatgggaaacatgttatcctcatgacattactggtggtgttaacctctcacttggtcaaggtagtatttgcaagtttctctactgtaaagttactgtttttccctttccataatatattctttggaagcaagtcattttgtctagcctactttcaagagggttgggataggaattaaattccatctcctggtggggggagtatttacatatattaaatggaatttctgtaaggaaatttctaaatcgtttatatatgtatggatttatgtatgtgctttgagttgtaatccagcttagtggattacaactctataaaatatatatttgtatatatttatgtataataggtattttatgtatctattgtataatagttgacttttttgttacttaaattgatctagccttggctcttggaagcttttttaggttggctcgtatgtttcttttacacactgccttacttttaccctagaatcagccactctccaaggagccttggttccatttttttggagaatggcattagaaaccaagatttgggtactgggtgtgcttgttgatattcaagtgtcactgcttttatttcctctcagtgaacaaagtagacagagctaggtaatatatgtagatatattatgtatacctacgtatctatagtcatttctgtatccttacgtctgtatacatattatctcatacataaacgtgagttcataccgatggctccaactctaatcctgtgctatagggttcattctaacctttctttcttattgctttgtaacttccttactcaacattgagaaacctggctctgaccatccaccatttatctgcttatatattcactcataatatacatgtaaagcagttttagaatttttaggatatactttatcaagagaaactaatttcgcaactaaaatacggtgtttacatacagtacactttaatatttagcctttaagtttctagtcaaaacactgttttctgatgttggtcaagttcatttttctctcacccctttgagtgtaattatgtgataaatttataataaaattagattcatttgtcacaatctgcattccatcctgtgatcatcatcatactggttgatttttaaaatttgcatatattaatgcttattcaatgatgcacagttctttgggtttkgacaagtgcatagaatcattttttctgtactccagtaatgtacagaacaattccttcatcttaaaaggtcccagatctactgagccagaatttccattttaataagattcccaggagaattgtattcatgttaaattcatatgcatgtatatgaagctattcacctgtagtcattcagcatcttgccatgttgtaaagttatacattaacttcaagaaagattattataatctaggggtgataatggaatagccagtttaaatatgcaattgagtatattcaaatttgtggggccaaatgggcatgcaagtgaggtaaaaagaaaatggagggtagattactagagtcatttaatgagctatttggaaagttttcatagcatgctttaacttttgtaattttcataatgatgagaaatgtagtttgaaaagaaagaacaaatgatatatattcagaagggtgttggagaggaagtttttttttttgtttttttttttttttgaagagtcttgctatgttgccaggctggagtgctgtggtgtgatcttggctcactgcatcctccaacaagtgattctcctscctcagcctctcaagtagctgtgattacaggcacgcgtcaccatgcccagctaatttttgtatttttcgtacagacggggtttcaccatgttggccaggatagtctcgatctcctgacctcgtgatccgcccrccttggcctccctaagtgctgggattacaggtgtgagctcccgcgcccggctcaggaagatgtttatggaagtcatagtcccccattaaagaagtatgcaagtcccctaataaggagaatgtatttgacatctagctttgcagttctttacctgaggtttattcattgttaaaagtttttggccaggcgcggtggctcacatctgtaatcccagcacttttgggaggccgagtcgggtggatcacaaggtcaggagatcgagaccatcctggctmatatggtgaaaaccccgtctctactaaaaatacaaaaaaattagctgggcgtgttggcgggcacctgtggtcccagctactcgggaggctgaggcgggagaatggcatgaacccaggaggcagagcttgcagtgagccgagatcgtgccacggcactccagcctgggcgacagagcgagactccatctcaaaaaaaaaaaaaagtttttctgtgacttagttccaggtgaaggaaggaaaaaaaaggaagcatagcagaaaaaacactgccaatggggactgtattccccacgtgaatgggttggaaccactagttttagggagagattccaggaatcttgtaccagaatcaacttgtatatatgactgagaaaattagtgtttatgattgaaaatatattatgtatcactatggtatgaggtgactgttgagtcagaagtcaactttaaatgttaaattgcactcagaagtttctttggtgtagatagattgagatctaagttattgagattaaaatatgtagagacaaagctggagatgtgcaaagttctattcaaacagtactgacttctggaattcagtgtctacagtatctctcagaactgaggcataaggcacaagaatagcggggtactcttttcttaatgagaatgactccaaatagctatttctcagttccactgttgttgctttcagaaatacaagtgtttgttttcagatagttatttagatgattgagcaactactacgtggtagatatcatgggattctaaaatttgagttcctttaaagcttataatcaagaaagagataaaagtcttcaaaaatacatgtatatgtcaggtggatactgtaaatgcagagagatactaaaatctgtggccaatcaaatgtaggagtgaagtttgatcataaggacaagtatcaagcccaatattaattaagaggtkgttttttttttttgtttctttktttttggagggatgggcttaaaaccatgataatcttaaatttcacgtatgttaaaaatgtcctggtgatgtgactttggtggtaaggcatttagacaggcttaagcaaaaagcagagtgatttaatttttatactaaggaaaagtatgttagtaaaagctaatgagtcctaggatcaaaagtttttatgtcaaggcatggggccattggagaagagtgaagtaacattctaaattcctacaagcctaaaacaaggagtctttttgtttttatgcttgagattgattactattacttctgtaatactgttttcacagttctaaatgattcagtcctcagttacattagtaaaaggcagaggtyggatatgaaaggaaaatttataataaaagaatcagaattagttgtataaggggtaccaaaatttctaatcatcttttatctattccagttttagaatgtattttatagtgaaggattaacccattgtccaccctagcatctggtrcatactacattgtttatttcacattttttaaccaaatgactcacaataaaggcagttttttcttaggtgcagtacacacccataggtatatgcagacagatgaaatgccacataacaaataattttgtttaaaattacatattgctggtaacttcatttttttgtggcagtattcattaaagtaatttaaaagcatataaatatttttaaaccttttttttttttttttttttttttgagacggagtttcactcttgttgcccagactggagtgcaatgttgcaatctcggctcaccacaacctctgcctcccgggttcaagcgattctcttgcctcagcctcccgagttgctgggactacaggcatgcactaccacacctggctaattttgtatttttagtagaaacaggatttctccatggtggtcaggctggtctcgaactcctgaactcaggtggtccacctgccttggcctcccaaagtgctgggattacaggygtgggccaccacacctgccaaaaccttttttaaaaagcaaactaaatatcaataatctctttaaaattgaacttttatttatttattttttaagatggagttttgctcttgttgcctaggctggagtgcagtggtacagtcttggctcactggaacttccacctcctgggttcaagcgattctcgtgcctcagcctcccaagtagctgggattacaggcatgtgccaccatgcctggctaattttttgtatttagttaggacggggtttcaccatgttgattggactgctcttgaactcctgacctcaggtgatcgacccacctcagcctcctaaagtgctgggattttgggtgtgagccaccgcgcccagccaaaattgaacttttaaatgtaggcattatttgcgttaacttaaatattattatgaataatttgaagtttatattaaagtactgacagtagtaaaatgagccccatgtacacaccatatagcttcaacatattttatttcatagcccaatctaatttaatctcttaactcctgttaccctctcccacctcacttgattttttggaaacataatttctctatgtgttagacttctgcctgaaaaaagtcattaaggtttgccttgttgttgtaactataaattagagaattagagattttcattcatgtcattgatactataataaattttagatgtatgttaggaaactatttttcagtgacttttcagtgtatatatccatagcccttatttctcatctgctcattctctgcttactagaaaatatttacttttgagtttatcctgggttcaacacaactaagtaatcatctttgaaattagtcatgttaaaagttactcttcctagtatctctccacttttaacagttttaaatttcttcagttagaaactttaaggagatagaatcatattgtactttaagcagagtttataatacagttttgtcttggattgatagtttagaatgctgaaaggaactgttgttttgctggtcagtgcttaacaaagcagtggaactacctggttttcagagttgtacaaatgagaagatgttttccaggttttctgaaaccttttatagtttttatttgtactrtttcatcaaactttgtatttatgtgtgtgtatacttcatcatgatgtaaaatrtattatataggtcatggtccaaaaagtttgaaagccgttgcttgactttggccactaattgtttttttgttgttgttgttaatgtttagcattcagtcattacctactactttccagattctttctacagtcatgctaaagtggacagtggtctataaaataactaaaataaaggtcctgacttaatgatcttcaagacctagttagggagagatatatgtataaaaataattgtaatactgtgaaggaattattagtaacatsagcaaagtattgtgggaacatgagctagggcaatgatctgtgcctggggaaaccagggaatggctacctaaaggacatagttttgaatagtcttattttttaatagtcttgaagagtgaaaagttttattgattgctttggagagaaagcattctccagacagagggaaaagtatggagaaagataccgttgctgaattctgaaatcactccctataaaaccatacatgtaattgcatttcccccatttccagttcctcagtcaggaatcggaccagttgtattttatctttttactttcacataaggtattttttttttctatggcattttgttcccaatagaaactctagctcagtactcattagttgaagagatgagcaagtgagttaaaattgtgtatgtataaaacctgttctttccaaaatgtttatttcacaaatgttagtacagtgtgttagctagagaaacagggtactatattagagaactaaaaacacaggggcttaaatataactacttctctttcactcctaggtaagggagttcaaacctttggacagccttactcttcttaatgtatggcttccaatactagtggttgcccttttcagctagcagggagaagatgcaaagggggaggatttaaggcaagccacttcatttttaaggctgtgatgtagaaatcacacatcaccatcacttctagttgtatctcattggccagaacctactcacatgactacactgagctgtagaagatgctgagaaaggtaatctttagctgggtgggcatgtgtcaacctaaaytggggggatggttgttttactagaggacaaacaaaatagatactgggtggatagggaggggcacattttctgccacaaacattaaggaattttttaaaaaaaaaactactactctcatcrtaagaaatgagtggcttttttctgaacttcctttcagttctccatatatattcgtaayttgtacacttgttattacagtgttggcatttgtttacacagccttctctgagcttgaatgtatttgtattatgaaaataaaaggattaaataagaacctaatatctggcacatagcaccaactaataacatctyttcctttttttattaaataattaaataattagttctatgtggcagaaacctgaggctcatctaaccagtgtacagatataaatacaactagaaggagaagaaagggctagagagctaggggaaaataatttatggttgaacttcagaacatcaagttagtcccaaatttaccctatgggggaagtgtgcgtccaaaaattctttcaagaattccctaaaagaaggctgcctcccctttttttaagagttagggtctggctcttgtccaggctatagtgcagtggcacagttgatagctcattgcagcctcgaacccctgggtttaagggatcctcctccctcagcctcccgagtagctaggactgaaggcatatgccacctcccccagctaagtttatatattttttttgtagagatgggatctcattatgttgtccaggctgatctcaaactcctggcctcaagtgatcttcccgcctcagctttccaaagtgttgggattacaggtgtgagccaccatgcctagcaagaagctctttcgaatgacattgacacttaagcagtagctataggtggaagggaacaagaggcataggatgagaatttagtacactatcctgtattctttagtaaataaaattctttgatttgtttatttatagctctctttgtcaagcacacaatcctccattataattctgtggaaaattagtttaccttctatcagggtttccccagcacccccaactggaatctaattcagctaatcactgttaacaggttaaaaataaaggaaagaaaaagtagggaaattatatgtacaagaaagaaaatctttatgtgctaaggacagaagtaaataaatgtatatgttatataattgaaaataaataacagatctaaggctttggtataagctgtctaatttacgtataatgtttaaatacacgtaaacagtctcttctctagtgctactagcacttgccgaggtgacttttgtatacatttgactttgctttctttattttattttattttatttttttgagacagagtcttgccttgtcgctcgggatggagtaccatggctcaatcttggctcactgcaacctctgcctcctgggttctagtgattcccgtgcctcagcctcctgagtagctgggaacaygagcatgtgccaccacacctggctaatttttgtatttttagtagagatggggtctcaccatgttgggcaggctcgtcttgaactcctggcctcaaatgatccacctgcttcatcctcccacaaagtgctgggttataggtgtgagccaccgtgcccagtttgacatttgccttctttaatgttcatttttatcttttcggatttttttaaaaagttttgttaagttattttatttctgttggcctagtttggccaatttattgacacattatacattagataattgtattttcatttttcataaattgaatgtttacttgcctgttatgttcacttctgtggcttttaaatttttccatcattgtacattttcactacctgcaaagaagatttcacaatcttggatgttaataaagaaaacttgtgatatagtaggttgcagaaatcacacctcttacacttcagtatatattttttaatttttttttcttttagaccattctctgtaacagtcagtatgtattttagaataaaaaaagtattcttttactcaaggcctatattgtttattaagttcaggaaaatttacactgatttaagagtacttaaattctcagtctgcattccagtttggtcaatcatctttccgtacagagattacatattgcatttgactgtcgtatctctttaatctccttcattctggacagttcctctttctttgtctttcatgacattggcattttgaaagactataagctagttattttatagaatatatttctcaatttgggtttttctggtattcacttatcattagatccaagttatgcattccttactctgcgtaccaggctggagaaccgtgttggtaatgatatatcttctaaagtgtttcacagctggagctcacattgtttgtctgtccctattagtgatgctacattcaatcaccaggacatggtgtccggtttctccactgtgatttctaattcatctgttacagctaagaagcaatttgtgagaagayactttgagtctatgtaaattatcctactcagcaracttcccctagatgtagtatccattgatgattttttgcccaaaccagcattttctgtgatgattgcataattatggttttctaagactaatacccttaccagttgacattcagagctctatcagagccctcctctgtgtgtctgtttctgtcatcagcacagactcaagggttcctgttttatttactgagcagtgatccttaactgtctttatttttatgctcaaatcagatttggtcaatggaagccccttcaagtgggctctcatgtccttttgtttttcctctgtcctttttgacatgcctctatatatatatatatatatatatatatatwtttttttttttttttcattttagcacaggaaggttgttagactcatcttgtatcttccctattgcagccttagagcctgccatttctcaaaggagctgtagtttatttaagtgtgcagtagtatttagaagtcaggatctaggtgctaggtgattgtaaatttaaaacttcagagaggatgagtttacattggttgataaatagcacatcaaaatacacactgtcataaataaaaaagatatctgcagagggccatttttttttgtatcactatttgtagaatcagagaactgaaaacaacatgtacatccttgaggcacatgaaacgatggtgcatctacaaaatggagtatatgcagtttcacaaagaataatatgtccactactgcagaatgatctccaggatataatgtgtatataatctgctaccatttatttaagagtgtaaaatatgttaatgattatttgtgaaaggggaatataaacattcttattcgtaatttgctcatgttaaaaaaggggaaaataaaaaatttttgaatggttactataggggaagagaggacatagtgtagaggagtcaagaatggaagctgaacttctgaccatagcttgttctgtagctccgaagttggatccaagtaaataaagcaacataaaatcaaaattagtaagaaagcagtstctatttaaaaaagcagatggtcctaactgtgccaaattggtggtcacacagagataaattattttacctgactttatagcagttatttgactgtagaagtgagtattcctgaaaacaaaaagaattgcatagtcatcttaactttaataatcatattgtttatgataatggtattattttgaaactattaaaattgaaataaagcaaataaatagtgccatttgcaaccaactcaacccgagtgatgacatgaacatacaatggaagtaaaaagcttgcagttttgaatttgaattacatgaattcttaatgtagtttctctaaaaatacacacatcctagctcattccattgaaacatcctaaataaggcaaccagtccagtagtaataggttcacctagtacttagattgcaacttagtttctaatttattataaatagaagggctttttgataaaatggctgggttatagcctcaggcaagaaatacgcaagatgagcctggtacatcctgtcatactagaaagataggcaggttatcaaagactacttcaggtcttgtcagaaggacttaagagctaataaagggtttcctgttggaaaaagatgggagagtttggaaatcaacaaggatgctgacagtagattaaaatttatamaataagttcaaatccatgagttcataatgggacttaaaaaattattggtctactttgaaggatgctggcgatttaactcattttgaaaactggtaaataaggaaaagaaataaaaccccttttcttcatgaactatacctcagagttaacaaatatgatgagggaaagtttctctttacagaagtgtaatgaagaaaagatgttttgggtaactgatgaatgatrtcaccattttactgcctcttattaatggaggaagacataycatcatcagtggctgctaaaaatgctaggtatgaagtgatggggagctttataatggatggataaggctggcagtacctgaatccacagatttatactaaatctcacacaaaagaaaacaacaaaacattaaatgccatctggtagaagtccacaacaccacgtataaactattcttgtcaagaagaactgaatttgaatctgatcaagcctctagatataatagccagtttataagaaatacaagggatagaaaaatatgttaaatgataacacaagggtgcgcttagcaaaatctggaaagcagaagagtggaagaaacaattatgagactaaagggatagcctgattggatatttaatattcagtgtacttaatttaatgtttaataatattaaatatctttaatattaacgaagtgatcttttaagagatattggtattgcaaatgtttacaaatagtttcttagttgaatcaagattggtatgagttgctaattgtggagctgggtgatagattcatgataattcatcatattgctcagtttatatttgaaattgtatattaaacttgaaaagacactttaatttgaattactattttatcttttaaatgtggtatttctccttaatttaccctaagaaaacactatarttttatcacagtacctattaatggtggtttttctttcgtgaattgaggaaaagaattcaatgggtttatttatttatttatttattccgtgggtgtattatctgaattaagaattcagtgtttttagcaatctacctaccactttaatactgttgtgctggtgagatttaatacactttaaggataattcaagtgttgtacagatatttcagttttataaaagattagtaatactggttattacctaaaataaaatattaattggagatcagagatttaatagccaaatttgtgagttttacataaaatatgtaaaactgtgtcccctatatctctttgatttacttatttattcatctatccatgaaacattgtactcttcatttaatgcttgacataagagcagcaaaaagcaatcccagcgctcaaggaacataaggtcttaggtagggtacctgaaaactacagtgattattacatcgtttgctcataaccaagatagaggtatatattccagaagttttgggagtgctgtggaagtaaacctgatttaacgttgggttgggatagagttggcagagatttgctggaggagtagctgtgaggtgggactcaaaaaattacataataaaaagaaaagagaaggaatggtacaaaggcaggaagtggaaagagtaagtggcttttagagaattacatgtagcttgccatagcttgaacttagggatttaagtgagcaactagttgaaaatagattggagaattagagagagatcctgaaaggtctcatagatgtttgttgaactttgttatagaacagaagacaaaaaagaaaggccaccatcagctttttattttagaaagagcatttgcagcagtaggtggaaataaaattactttattagggagaggcttttcacctattttagctcaaagttttaagtctaattttttttctggccccatgtatatttttctttcatttttaaaaatctctttttaaaaaaatcatgtaaaacatttacgtaattctaaaactgaagactcatttcaattgctgttccttctactcttccctccctctctttaggccatcattttcaaattagttgggttattctgccattgttgcttttcaaaaaatacaagcaaatatatataaatatttttctttcttatgcaaaagaaacattctataaacatttggtatctttttttcacttaaactgtatcttagatcattctatagcagtaaataagatattccttactctttttgctttttttttttttttttttgagatggagttttgctcttgttgcccaggctggagtgcaatggcgtgaacttggctcactgcaacctccgcctccagggttcaagtgattctcctgcctcagcctcccaagtagctgggatcacaggcatgcgccaccatgcccagccagttttgtattttcagtagagtcgaggtttctccatgttggtcagactggtctcgaactcccgacctcaggtgatccgcccccctctgccttccaaagtgctgggattacaggcatgagccaccgctcccagctctttttgcatattctttatcgtactaaagaacaactcaataaaataaatactttattcagtatttctaatacccaaggtaaagacattctaacaataaacctgtgcaactagagtagcatagcctcgggctgttgcttttatctccagccagtactactgcctaaagaatatgaaaggaaagatttctgtattcatttaagaattttgatttgttaacaagcagtttttactagctatgcatctggaatgactaatgactaatgagaattacaggcccacaatagcccccacaatttaatcattcatctgtctactgttcacatatttattgagcacccatctgtgtgaggcactctgctaggtattctggaaaaaaattgagtttcataaatatccattgtgtcatagatacaaatttaagacatcatgaggtctacttgttaaccttactgtgtatgatctctactttcaagatcttcagaggagatactttattgctactagcagaataatttaatagaactcacattcctcaaaagaaagagatactcttttatttctttgctgaagaattcatttaacagcactttcttctaagtgttttctgactactgtaccaaacttggttatatctttagtgctccccatacatgggaatcagttgtcttaaacatagcaaagaaggatatttattcatttatatgactgtctcgaggttaaatagttcttttgatgataaagacttcatctcatctcagtctgtccccagtgcctaacacatgatagttctcaataaagtttattgartaaatgaaatattttgcttayctattatgttaagggaaaaataaagttgtatgtcaggaaaaaaaatcttttaatatccttgctaaaatttctcgcaaggtatgcaagtaaaatatggccttaaaaattaaaatttaatatgctgtttttggacctctaaactatgtgaccagagaggagacatgatggcaaaaatgatcttcatagcatatgcctttaagaagcaaattttaatttactgtttctatgaatacaacatttattccattagattgaaaaacacaacaatgcttattcatactttaagcatttatatatctcacctgtagaatcaaaattcttcctgcaaacttttatttctctgttctcatgcagaaattactaaattcttgctctggaaaaagagaattactgtgttgtcttagagtaatacctccatctggtggcattttagaaaattacagaagaggacaggaaacttgtaytttcttgtatatctgtaaactgtattacctgtggtttctcataaagccaaatgaaattacatcaaaagcggagtcaaccatatgtaccagaaatttaatgccctagttttcaacatataaacaaatgaccttggggataattatataatcaactgtttagtccagactatttctgctctatcttggactaaaaattagaaatggaaaaaaggatagkttatgaaatgtyaattgcttttttatgtgtgtgtatacacgttaggaaatatgagaatttgctatttcagatttattgctacagatccacaaagaacttattaataagtgattttctcagacaagcagtgttactgattttttaaaataaattatattttatcatagctcggttataataaattatgttctcctggagtgatagagatggaaacttgaaaacaagcagaaactacaaataaatttctgcctgttactgtaagaattttttttaacacatttaatcttttcttcacacatttcttactttattattgctagagctttataaaggtaggtaccatgccttcaacttcttgacttctcaaagtttctaacccaggattttgtacttagtagattttgcatattgtcttagaagaagattacaatcttaytgcttatgttttagccayaaaaatctataaaatatgtcataaatctatcaagtatgtaataatctatcacgtataaataaattatcaactatggcagttgttactatagattaaatcaattcctttttcttttttttggccaaagatagttgaaatattaagtatgaagtaaaatttaatgatttggggctttctgctgacgtctaagaaaaattaaattcctaatgaattttgtttgaaattgtttattttcaaattatagccagtcggatgatgattctgggtcagcttcaggctctggatctggttcgagttctggaagcagtagtgatggaagcagtagccagtcaggtagcagtgactctgactccggatctgaatcaggcagtcagtcagagtctgagtcagacacttcccgagaaaacaaagttcaagcaaaaccaccgaaagttgatggagctgaggtaatcaataaaatacccaatgaaaggtagattgcttgtattactttgggaaaatttagaggattggtttataccattcttaatctagcttttagagaagacaacattttaaattaaaatttacttttagtgattctcacattcatggtggtacacctgtggactaattggcttggaatagatgcattttcgaactagaaaacacaaagtgtaaattacacacaggcaaataaaacgttttctgcctcttaggcagaaattgagtttcataaatatccattgtgtcatagatacaaatttaagacattgtgaggtctacttgttaaccttaccgtgttatgatctctactttcaagagcttcaaaggagatactttattgctactagcagaataatttaatggaactcagattcctcaaagataatgatggaatagggtaaggggctattctgtttggaaaaaactacaagagatacaaaaacttgtctatacttcgtggtagtatacagtgttactcagagtaccagtctgtgatgagataagatgcttgagggccagaatataaatcgacacacagmttccttcatagagaaaaatgttgctaccggccccccgctcaaatctgagctaaaacaatgtgcctagtgacatcgttgacgtatattctgactcagcctcttcacctcacactgataaaataggtaaccacactatgagtagcactaatacaaataatactcttagcatcaagaggatattgattaatattgtctgtggaactcaacacaccattttttttyatacataactagagctcagcattttatttaactatattgcaatgataattgtgttacatataggtaaggaatatagtctttattactttgaggcagtaaagatggtggtatagtttttcaataaattaacctttttttgcagttttcttaatacttcttcattcactggtttatatttctattatagttttggaaatctagtcctagtattctggccrttcagagatctgcaatcctcaagaagcagcaacagcagcagcagcaacaacaacatcaagcctcatctaatagcggatcagaagaggtgcattttcatcatgagctattattttaaaagtggacatgctgctgaatcagttaactagtatttgtgaaattattaaaaataataagtgctttgaaagaataagtaggaaatactttaagtgtatatatcaagaatcttgaaatacagattttgcattatccagtaattccaattttagggattaatccaaaataagcagtgggacatttgtgtgcatttgctcattacagcaaaattagaaataaactaaatgtgaactctgtgggaaataattaaatgtgatatgcacctacacgcatatacatgtatgaatgaaggaatattatatcattaaatcatatttgtacgaaataataacagaaatctcaacataatatttttgaaagagtagatggccactatacacaatgtagtttgtgtgtgtgtgcaagcatgcatacatgtatgtttgcacaaaaacattcaggaaaaattataacaaaaagtaatggtgaagaaaaaattcaaaatttggcatgttggcacctaggatttcttgttttggctatactaggcaacaataatggtctccagtgagggtagattttaaggtttcatacaaagtgctgacattttgctatttacttaatttcactggctatattaatttgcaataaaaatgttattactttcagctagttaacataaataaaactacattgaaaaaaggcttcacaagtgctgttatttgtaaagtgaatgttaaatagtatagcaaataaaaatttaatatggttaaattctaatcattagtggatgatactgactttatttcttttctacaggattcctctagcagtgaagattccgatgactcatcaagtgaggtcaaaaggaaaaagcataaagagtatgtcattttgttcaactgactacttcattttagaaaaatcctgattatttcatatttctttctttatgaaaattgttgccaaaaggagactcttctaaattcttagttcatggcattttatgaagttaatttacaccattacacaatttaaagataaatctttaacatttatctttctgtgaccacctgagggtattatgccatttctttatctcctgtaactcmccctatatatttttaaactttaatgatctccctagttgtaatatcagaaaatcttaataacttgggaatataggagtatagggatgacaggatgactgattttggatggttcttataattatattaatagctatccttactattcagttgcatgtgaaatttacttcataccgtagaactcattttagaaactcactgtaatttcctaaagatctggacccagaaagtattaagaatacttcagattctcaatccatgtttattttaatgatttggaaacattattccattttcttgtcttttattttcctatttgcctttgatattctgcatattagatttgttacttatttttcccaaaaaaagattcatgcatttttaatgcgaagatttgtatcttttattagtctgttctatcttttattctgaaaattcaatcatttatctttggattttttttcctttctctttctacaaatctctctggtcctcctattaatagatgtatattggatcatccagttttttttccattataaaaatacacaacggaaactttttttcggtgtgcaagccctgaaaagatctcaaagtaaaaaatttgcttctactatgtttttatcataagcagattttatcatatatgcttgtttatgtagccttcatcatagttacaattggtgcaaaagatacagagcaatgaagcagaagcatagctgaaataggatatagtgtatttgtaagaattcaatgtgtgcctttcatttgaacttmttatgatagcaaaatattaacatccattatttttctctacatgttgattggaatgaaatagacttaatagactaaaaataataatacaggtaaggtactcagattgaatatttgagatggtactactgttgctcttttttttttttttaatttttctatgtttcttaatgaacgtgcactatttaaaaaatcagtttaaacaggtgtttttcaaaatcacaacctctcgaggattaaaatggcatggattagtatctcttttttgagagggcaagtagaataattttatgagattttcatctataatgaaaattaaaatatcatttatttgctgttcactgacgtataactaagtgattagcaaaactagagttgtgagagaagtctatgaagaatattttccagagtgtttttgttttataaatatttcatttttagcatgagtaaaagcaacagtatttttgatagcgaatatagtttggttgatttgatcatctttgtattagggataaaacttgccatataagtacaaataaaaatactttataaattttgtctgcagtgaagattggcaaatgtctgggtcaggatctccatctcagtctggttcagattcagaatctgaagaagagagagagaaaagcagttgtgatgaaacagaatctgattatgagccaaaaaacaaagtcaaaagcagaaaacctcaaaataggtatggtctcagtttggtgctgaaaattgattgtggaaagtatttgttctttttgtatrtagtttctcaaatcttgtttttttttctctttgcactttcctagatctaagtcaaaaaatggaaagaagattcttggacaaaaaaagagacagattgattcatctgaggaggatgatgatgaagaagattatgataatgataaaagaagttctcgtcgccaagcaactgttaatgttagctataaggaggatgaagaaatgaaaacagattctgatgacctactggaagtctgtggagaggatgttcctcaacctgaggaagaggaatttgaaaccatagaaagatttatggattgtcggattgggagaaaaggaggtagtttttaaaaaaccatttattgtttggttatttaaataatatttacaggagtagagggctgggcacagtgggtcgcccctgtaatcccagtactttgggkggccgaggccgatggatcaggagttctagacctgaggtcaggagttctagaccagcctggccaacgtggcaaaaccccatctctactaaaaatagaaaagattagctaggtgaggtggtgcgcacctgtagtcccagctacttgggaagccgaggcaagggaattgcttgaacccacgaggctgaggttgcagtgagctgagattgcacgactgcactccagcctgggtgacagagcgaaactccatctcaaaaaaaaaaaaaaaaggtaaagtatttaagatttttctacagtgttgaaagctaagagggtggattttttgttgttgttgttttacttatgttttataaaagctactttgcttagcctgagtaccttcttaataaccacctgaccacatttcttttttctttttttttttttttgtgacagaatctcgttctgttgyccaggctggagtgcagtggcacggtctcagctcactgcaagctccgcctcccaggttcacgccattctcctgcctcagcctcccgagtagctgggactacaggtgcctgccaggacacctggctgattttttgtatttttagcagagatggggtttcaccgtgttagccaggatggtcttgatctcctgacctcgtgatccgcccgcctcggcctcccaaattgctgggattacaggcgtgagccaccgtgctgggcctccagctgaccacgtttcatatattgtggataattatagaataatgctgtgggatctcaggtggatctctgtctttttattttttctaattcgaaaaaggaggggattatattagataattytgaaattctcagttttatttatgagcaatagaatttcccataagtttctatacccccartactttatttaaaagagtatatatttttgtactcatattattgaaattttgagttgaaatataatcctrcaacagaattaattacatggaaggatcttgtgcttttgttttcagctactggtgctactacaaccatctatgcagttgaagcagatggtgacccaaatgcaggctttgaaaaaaacaaagaaccaggagagattcagtatttaattaaatggaaaggatggtcccatatccacaacacttgggagacagaagaaaccctcaagcagcagaatgttagaggaatgaaaaaattggataattataagaaaaaagatcaggaaacaaaaagatggtaagtatgctgtatatcatatacttcttttaatagttcaaagattactaaacctttatgttaataaagaatacatagtaacattaaatgatagcctaaaatagctatagactttataatacagttggctgtctttgtccacagcttctctatccttggtttcaaccaaccatggattgaaagtattcggagggaaaaaaaacaacaataacacaaattaaaaacaataccatgtaacaactatttgcactgcatttacgttgtaaatgtaaaattgggtattataagaacatctagagatgatttaaagtatgggggaggatgtgtgtgggttatattttaggtaccatgtcatttcatataagggacttgagcatcctcagattctggtatctgtagaggatcctcaaccaatcccctgcaggtagtgagggatgattttattccatctcaaggtaaaactcctagaggtatacctatctaaacctatccttggtaacagtcacatagagtgtgtctcatacattataaattacaaatttttagttaaaaattaatgatgctttattcctgtttgagtttctttattactcaaacttggcccacacagtggcaaaatgggagattttgtgctacaaatagtgttggggatgggggagtgaaaggttatttatgggagatttttaagtctattcctggattaataatttttcaggttgaaaaatgcctctccagaagatgtggaatattataattgccagcaagaacttacagatgatctacataaacagtatcaaatagtggaacgtataattggttagtgataaatgattctagttaaactttctttttatgcttgaaataatctgaaaaaagtcataagtttgccacttacatatcaaacacagtagcttgctcttactaaaacagtattgtaaactagatagctaaattttacttgtgtagcctttactaagaattatgtatctgatgattaaatgtaaaaaaaaataaataaataagtaaatgcctgattctctcacagctcattccaatcaaaagtcagcagctggttatcctgattattactgcaaatggcagggccttccatactcagagtgcagctgggaagatggagctctcatttccaaaaagtttcaagcatgcattgatgagtattttagcaggaaccaatcaaaaaccactccttttaaagattgcaaagtgagtattgtctaacattttaaattaytaaaaatatatttatacattataaatatttacaagcctaaatacaagagttggatcctgatttcagatagactaagggagaatatttcttggttaataggtcttacaggaagtgaacttctgcaattgctgtgtgttttttagttttagttttataatwttttatttcaaactttctcttaaaaaaattgtaaatgatgttttcgtcaatgtatcttcttaagtgttgtcttttatcttgttgagcatcactatgtcagaaagatgagttggttatggtgattgtcaggaagggttgggagaataaacagaaaaaaacccttggaaactagagatatgctcaattttaaagatagtggatattttcttagaaggtagagaaaaaggagagtgatataggaaagtatccagaactaccttgcacaatactttctgcatccttgtaacttacccagagttactagtgatgtgttgagatctatggactactagactttctttccttattacaagaattacattcttcatagggataacttggaattcagaaattgaacggtaagctaagccagttttatggtttgtagcttaaggctggagtgatggttttgaacaatttaacgtaggttttgcttgtgaaatacatgagactcatattttggcaggaagttaattttctctatacatttttgtttaaaaaagaaggcraaatatttcactgttcatttttgtagagtagtagaaaacagtattgactgaatcctcaggtacattttgagtaatggaatctctgagcttgatgattagagatgaaatttaagaatttatggtaaagctgaggctttcatcttttagtataatttcttatatttaataactctacataataatgtttatttctactaaaggtattaaaacaaaggccaaggtttgtagccctgaagaagcagccatcctatattggaggacatgagggcttagaattaagagattatcaactgaatggtttaaattggcttgctcattcttggtgcaagtaagtatattttgaatcatctatttaatttgacagagtaagaatttaccaatacaggattcagaaaagatttccatttacataaagrataagactctttggcagtttatatgctagtctttgtatttcctagtttgtataaacaatacttactacatactaggaagaaaatccagtggagttggagtttaacttgattgttgcctttttaaaatatgtttttattcagtttaaaaatcaaaatgcatatctgttctcatcccatgctattcctggaatatttctctttttcctagttattttaatatccatttactcttctacattttttttctatcttctatggcccccactctacttttgtgaatctcggttgcaatttagctatagttttttttttttaatctgtgttcttcctatatactttttacttatttaatatatctggactctactactagtagatgaattgcattattggcttcataattgattaaacataatactattaatctttaagcctcttctggcccaaaacggtcatctccttttacttttcttacagcattagtgattaagtctttagccagatacctttacatttattatttgtagttaataaaagtrgtatattctatataatacctatcaattttatttaacttcataaaaacatatacacatgatgtaaaaaggtttctttgtatatttgaatatttccttgcatgctaatttttttttaactttgtagaggaaatagttgcatactcgctgatgaaatgggccttggaaaaacaatacagacgatctcatttctgaattatttgtttcatgaacatcaattatatggaccttttttattggtagtaccgctctccactcttacttcctggcaaagggaaattcagacttgggcttctcaaatgaatgctgtggtttatttaggtgacattaacagcagaaacatggtaagttgtttccctgtaaatgtagaaatcaaaatgtacttgtctttgagatcaagtgtttttgttgttttgagatggggtttcactctgtctcccaggctggagtgcagtggtatgatcttggctcactgcaactgggaccacaggagcacsccaccactcctggctaattttttatattttttagtggagacagggttttactgtgttgccaggctggtcttgaactgagctcaagtgatctgcctcccttggcctcccaaagtgctgagattacaggcatgaaccaccgttcttggcctaacaaggatgagaggttttgttttgttttggtctgtataacagtctttgtttctggtatagaacttgccacaaataagttctcagtacatgtttaattgactgtaacmaagtcagttttggtttagtgttacttagtatatatatttgactgtttttttggtgggtttttttttttttgttttcactctgtcatccagactggagtacagtggtgtgatctcggctcattgcaacctccacctcccaggttcaagtgattcttctgcctcacccttccaagtagctggcattacaagcgcctgccaccaggcccggctaattttcatatttttagtagagatggggtttcactatgttgcccaggctggtctcaaactcctgacctcaagtgatccacctgccttggcctcccaaagtgctgggatttacaggcgtgagccaccataccagcctattttacatttttaatggaaaatttcaaatatgcatgagaacagacagaagaatgtaataaacactcatgttcttaagtttcacaaatttactgctagttttgttttgtctatacctctacacacgactttcctagttactgtgaagcaaaccccagacatcatatttcatccataaacattacattattaaatgaattaatcacttatgttttcttaaataagaccttttcgtttgtgaaagatgtgctttaaaattgtgtttacttcgttttttaagaaatgctgtggtatttatgttttatttataagatttacatagcattttggactatataaagaataactctggccgggcatgccggctcatgcctgtaatcccagcgctttgggaggccaaggtaggtggatcatctgaggctgggagttcgagaccagtctgaccaacatggagataccctgtctctactaaaaatacaaaattagctgggcgtggtggtgcattcctgtaatcctagctactcgggaggctgaggcaggaggatcacttgaacccgggaggtggaggttgtggtgagccgagatcacgccattgcactccaccctggacaacaagagcaaaactctgtctcaaaaaaaaaaaaccacaaaaactcttttattacataaacatatattaatagttacttacatatttgaatggattttaatttttagatatgtaagtaaaagtataatttgcttgatgtttgtcttaaaaattgtccttcaaatttcttaatagataagaactcatgaatggacgcatcatcagaccaaacggttaaaatttaatatattgttaacaacttatgaaattttattaaaagataaggtatgtatttatttctcacgtgttttggtctcttgtatatcagttttttctttatcatatgctgtggacaagatgagagaatagcctaaatcgtgagtcagcaagctatagcctgtggtcttatttttttaatggtgcttgaactaagaatggtttttacctttttgaaaggttacatttaaagggtcttagaaagaatatgtaacagagaccatatatttatctgcaaagtctgaaatatttactatctggctcttcttagaaaaagcttgccaactcaatcgaatgaaaccagtttgttatagtgtgtattgatttgtaagctctttaaagaagaggaagatacctaacaggattaagctaccactgtgtgaagcagtgaaggctttatagatactgtcttatttaattcctccatctactttatattcactttctctactttatggaaaagaaaatcagtctcaaaaatgtctcaaagaatttaatgaacttggctgtggtaacacagctcttaagtagcggaatcaggcctgctctaactcagagacctaagtttaagagagttctacagttcataaaagttgtacaaagaattgtacctacacttggaataagacactgttctgaatttgtgtcatagtttttttttcatattgacattaatagaggcttctattggggttaggctaaaaatcttttgtaaaaattttaaatgacactgctgatttttctccgttaattatcagtttataagctaataaaaactttggcttgatattacattctagtggttaaatttgtcatagaaggaatatgtgctgagttacttatgtattgtaatcttgagattacgattttttatttgaaaattagacaaagtttgtttttaatttttatttcattttaataattgagttcagattaaatgggaaggctaaatttgaattccgtttttctctcaaaatactgtttttctattattttaaggcattccttggaggtctaaattgggcatttataggtgttgatgaagcacaccgattaaagaatgatgactcccttctgtataaaactttaatagattttaaatccaatcatcgtctccttatcactggaactcctctacagaattccctcaaagagctctggtctttgctacatttcattatgccagaaaagtaagacaactttacrattttaatcatattgtgtggatattatgtttagtgggaataaacccaggtaataaggtcagtaagagtttttattgccctaaaagattagatcacagattactaagaattttttaaaaaggaaaatgaggtcagktagtttgtartactatttgaatttttcaattttgttaataaacttaagccatgtgtaataaatcacgacagttgattttgcacattttcaaaatataccttgtttgaaaaactaacacagtaccattctttgtatttaacagtaggagtaacaacaatgaggtgctggtaatccctttttctaaatgaggaaaactagactagacaaggctaaataagttcccaaaggtcactacttgttctctttcagtaggtccagaactttaaaagtatatttttttgagaaatattttagtgataattactcccatacttcaaaatacttcatattcacttgattcaagaatcataacttataaaacaactaattatatttcatcatgcatcttcttgggagggagatttttagaggtaactaagtttagctaatttttttttctaaaaatctgtagtattttgtttataaatgactcccctaaaaaaaaaagttcatacacaacatacacaatttgattttttctagtaattgttccaatttcttaaattttaaaggttttcttcctgggaagattttgaagaagaacatggcaaagggagagaatatggttatgcaagccttcacaaggagcttgagccatttctgttacgccgagttaagaaagatgtggaaaaatctcttcctgccaaggttgagcagattttaagaatggaaatgagtgctttacagaaacaatattacaagtaagctgtacacagaacacagttctgaacttctaattctgaaaaccttccatgtctgtgtcctgcttttggtgcccccaccttctctacaatagtgtcttagagcagttgcaattctcgagtttcagaataagtttattctgtgtcgttaggaggcaaaaggagatttaatgacatatccaaaattatgagtgacaacactgagtaattcatcttctgacacataattaattgctttcctatatatcatactgttatcttataaagagtttaagtgttaggatttccacaataataaaggtattatatgattatgacaattaacagaggccaaaaaaagaaacttagaaaaaaattttaggctctgctgctttttgaagagtattaacaaatcatagctggtataaattttgtatgtcaagatctatacagtaggacttttcaaagaatcagaaaggaaaatctgttctaatatctgtttaaacatttaattgcataaaaggaaatatattgctacatgcatttggagtttcagaaacatttatattctatggtaaatctataggtgccatacatttgaaagaatatacttaattgcataattatttttattatggaagatgtcagacatatacaaaaataggataatttaatgaactcttatacccatgactcagcttcactttctttcttttttttgtttgtttgttttttgagacggagtctccctttgtactccaggctggagtacagtggcacaatcttggctcactgcaacctccaccttctggtttcaaatgattctggtgcctcagcctcccaagtagctgggtttacaggtgtgccccacaatgccctgctgatttttttatttttagtagagacagggttttgccatgctggccaggctgatcctgaactcctggccccaagcgatccacacgcctcagccttccaaagtgctgggattacaggtatgagccactgtgcccagccccagcttccctttcaactcatgccagtctttttatgtatctctggtcatccccatttccctcagtacctgtccttttgaagcagattggaaatttttccataaatatttttctgtgtatttctaataattgatttttaaaaatactagtatcacctgggcccagtggctcatgcctgtaatcccagtactttgggaggctgaggcagacagatcacttgagcctcaagagtttgagaccagcctaggcaacatggcaaaaccctgtctctactcaagatacaaaaaacttagccaggagtggtggtgggtgcatgtggtcccagctgcttggtaggctgaggtgggaggatcgcttgagcccatgaggcagaggttgcagtgaaccgaggtcatgccactgcactccagcctgggtgacagagtgagaccccatcttaagtaaataaataacccactttaaaattttcacaatttaggaaattattgctctctcagcagaatcaatttcttgataccaatattcagtatcagtgttcaagttttctctgttgtctcaaaaaatttttttacgtttactcgaattgggattgagataggttcatatatggcaattgatttgtctctgagtttattatctataggtacttcttttttgttaaaatgtatacgatggggaaaacagttattctgtagaatttttccacaatctagattttgcatagtacttccctctaaaatagtttaacagtatcctctgtatttcctrcagattggtaggtagatgtaggtgcttgataatattcaaattaataattatgagaagagtatattttgtagtacacaatggcgattatctaattttgttatggggttctttaaaaaaagtaatgcattttgtagaatatttagaaagaaaagtcaaagtaggaagaagacacattcacctgtaattctcttagtgctagtcatatatcatggatgttgaacttaaactcttcaaggtactttttggcaactaaggtaataagatactgccataaatttctggaaaaattcttagaatttttacctcyagagaaattaataataaattttttctggataaggaaaaatattctttattcttgattacctcttagggcattgagcattgtccatgggtttcgttttgcttttcattccagttttggggaactgcctgtataactagtggtaaagaatggtaataaaagagtatgtacactagatatttgagactttcaagtcccttcaaaaactgaccttgtaaaaaggaagaaaataaaaggtggaaaaggtcatggtgagaggaaatttttcttttcttttttaaattcagcttttattttagatactggaggtatatgtgcaggtttgttacatgggtaatattgcatccaggtagtgagcatggtacgcagtgggtagttttcaacccatgttcccctccttccccmctctagtagtcgacagtgttgttacatgtttatgtccatgtgtgctcagtgtttaacttgcacttgtaagtgagaacatgcggtgtttggttttctgtttctgtgttaattcacttagattatggtctacagctccatccatggatattattttatttgaagggcattatttcatccttttttttctgtggctgtgtagtattcatgggatatatatacaaaaatatggagtgttcatggatttgcatgtcatccttgtatggggaccattctaatctctgtattggtccagttttagtataaatgctgccgaagtgagcacaggaattgttacatgtagtttggagtagtaaaatatcaccaagatgttttctataagttacatatgtattgtgtaattgcaatctagagaaggcagtcgtggctaaaaccaggtatcctcaggtttcttttaggtccatgcaaaataattcagtttcattagctgtctaatgcagtaaaagttgtaagaagattcagataaataatgcagctgaccatctttttagcaaatttgaggggaaaggattaatacactgtaataattatgttacattagcctgttctgtgtatagctaatggttcagaaaacaagttgtgttctcatgagtattatgaaagaggtttggtccgttgtatatacagctgtgaattttataacggtacagttttactttggtactatcgttggctttttttgtttgttttaatgcttttagaatttatcctggtaattgttctgctaaacatcgttttcataatttttttttttaagatggattttaactaggaattacaaagccctcagcaaaggttccaagggcagtacctcaggctttttgaacattatgatggagctaaagaaatgttgtaaccattgctacctcattaaaccaccagataataatgaattctataataaacaggaggccttacaagtaagaatttttaaatgttgtttctttgtgataaagttctagaaatgttgatttcacttacaatcgaaaatggctcaatgctttaacttattggataaaagttctctttagttaatggtgcctttctataatggtctcagttattaatctttgtagaaaagactttaaaattctaatttatgtaattattttgatgaattttctaaaaataggtctctcaaaccatggcctataataacttatccagcaagaaaatcccacagtatgttcataattatgaaaaaatcgttaatagtaattgtgctgcatttgtgatttggtaaatggtaatctaaaggacatcttgacctcacatcttaacccttcctggtacttctggaagataagtcagaagtgcgaaggcacagctgcaatccagccactgtagtgcattgaagggctaggatcagcatctagaattaatacattagaatgcatttgcttactctttttaaacctttggttgcttagttgctgctgcttctgatgtcattgttcttcagctaagatttttggagaaacactgtggtatagtaactagcaaacagagtgaacagtacttttttcctccccgatagtataacaaaacctaggtgtgatatggcaaagggtattttagcttcagtcatagagtgaaatggtaaaggtcttagaaaattttgaaaagtgaaataagttgttttctaacatgaaaatttaaaatctcaatttaaaataattcaggcaactaaagtgttacgtggacaacttaccatttatgtcttttaacatataacaacttgaattgtttctgtagcacttaattcgtagtagcggaaaattgattcttcttgacaagctattaattcgcctaagagaacgaggcaatcgagttcttattttttcacaaatggtgcggatgttagatatacttgcagaatatttgaaatatcgtcaattcccctttcaagtaagcatttaattgtatttgttgttttaaattttatctaattcctgtgcatattttacagaattaactgaaattattttataagtgtttaggtttttatataaactgtactttttctttaaaaagatgtatctgctttaaaaaatatttgtcattcccggtttttcttgactttacatattgcaacaaaacaatttttcttcctttcctgtgatttttattttcttttaattctgtctttttcttctatgcttgctttagattttaaaaactgaactaaggcagaattttcttgattggatagatctaaaagcaggggagcctttagtcttcaatctgaatgaggaaaacagccagtagtctctgaatgtgaatgctgccaagattctgatgattggtgtgctcatagttatctgacacagggtttgttgagtaaaactagacaactttacagaagaaactaaagaccaaaattcccttccatctattcaaaatttatattgaagttcattcaatataactaaagctaatattgatgagtatttaaagtcaggtgctgttttcagtacttcagatctaattacttaattctcaaagcaattttatgaacagtactaggaacatagcagacattatgtagatacagctagtaaatgctgtatatttagtgcagatagtaaaatagcagtaaaattataataatgggactgaacacacaatccctgctttgtcagagcttatcatctcttacaggagacagacatcaagcaggtgattacaaataaatgtaacattacaattctggtaagtgttgtgaagaaggacaggtatttggtgataggaatatcattgagaaataattgcagtcatttaggggaaaacgtagaagagtaccattagttgaggtttttgaaaacacctttattgatacgtaattcccatatcatacagtttactcatttaaagtatacaattcagtrgtttttactatgttcacagatgtgtataattgttcgacaggtggttttagaacattttcatcagaaagaacctgtagcctttagctattcctcttgtccttccatttgccttcctcttctgccctgtgttgatttgtttttaaacaaattattgtgtacatagtcaaacaaaaaattagtttgactaattttgagtgttaataagcgccacttctctgttgctaattccttctcattcctaggtcacttcctggagagaataatttttaattttatttggtttaggtcatgccacagtaatgagatgccactattcttaaaatttgtactaatatgtattttagtggaaaagaaaaattattttaattttttaaaactttaatagacatgttttcctactttgagtaggtgataattaagagcacttcatttaaaccacttagaatacatcatttaaaatgtttatattttttcttcgcagagttaaaattcatatagtaacaaagcaaaggtaggcatatggcttcccaaaatactagtttaattcgtcggttaaatgcatggatcatagtagacaagttatttctagtctataaccagttaataattataaaatcattgccatttctaaagtgaaatagcagctaatgtttaataagcgttcagtatgttgtaggcactgtgctacatgttttcctgtgttctctcactgagttctctatagtctatgaaggagggactactattatgtctgttttgtttaaagcggaactgacatggtgaaaaagtttgtggagaaaagtcaaatcacttgctcaagataccaagtgaataaaatactcatttgctggctgttgactagaacccatgatgcttcacatcaataattttcaaactttagtgtgcatcagaattaactggatggcctttgctaaacaccttcagtaggtctggggtaggactcaataatttgcttatctatgttctcaggtgacactaatgctgttctagtaaccacgctggacttaatcagtgtttttaaaactgaattgtaacctgttaatggatctgtgaatcagtttaatgggttgcaccaacattttgaaagtaaaatgataaaacatgagagtataacatagtatatcatgtcatgatatgaaactgtttcaggtgtttgcaaacagctatgtactcaatcacatacttttagaatggggactcaggcagaatagtatgacagcctatgctgtatttactcttgagggtgcagtcttagtgatttggagcacagactaaagacagaatgcctgagcattattttactgtctagtaagtactttctattatagttttagcaaaggacatgcttcacatttctacttaattttataattgattttaattgctttgtaatactttgattctgttatatgcagtattttaatgtgtttttttctagagattagatggatcaataaaaggagaactgaggaaacaagctctagatcattttaatgctgagggatcagaggtatgtattagtgcttttaaaattataaataattttgatttagtatcagtatattacattattatattcagacatttttaatcttcatatctagtttgataaaaaaagagtggtgttagccacctttgattagcaaatgaggttttaaagtcactattctagtttaaacctaaggattttatctttgagacagagtctcactctgtggcccaggctggagtgcagtggcacaatctcaactcactgcaacctctgcctcccaggttcaagctattctcctgcctcagcctcacaagtagctgggattacaggcgcgtgccactgtgcccagctagtttttgtagttttagtagagatggggcttcaccatgttggctagrcyggtcttgaactcctgacctcaggtgatccacctgcctcagcctcccaaagtgctaggattacaggcatgaagccaccgcgcccagccaagaattttactctttattatcaataatgtttcagcatggaacagttattttaatttgcttcaaaataaattagccagattgggcacagtagctcacccctgtaatcccagcactttgggaggccaatgcaggagaatcgcttcagaccaggagtttgagaccaccctgggaaacagtgagwctgctgtctgtacaaaaaaaaataaaaataaaaagtaaaaaaaataaactgggcatagtggcactcggttgtagtcccagttacttgggaggctgagttgagtggatcacttagctcargagtttgaggctgcggtgagccatgatcatgtcactagactctagcccaggcaatagagtgagactctgtctcaaaaaaaaaaaaagggaaagaaaaaacccaaaaacaacaaagtagcccactttcctttaaaaaaaattttttttatttccgtggatttttgggaaacaggtgatatttggttaaatgagtaagctctgtagtggtggtttgtgagattttggtgcacccttcacctgagcagtatacactgaaccaaatttgtagtcttttatcgctcaccccctcctaccctttccctctgagtccccagagtcctttgtatcattcttattactttgcatcctcatagcttagttccctcttacaagtgagaacatacaatgtttggttttccattcctgagttacttcactcagaatagtagtctccaggctgggcgtggtggctcacgcttgtaatcccagcactttgggaggctgagacgggcggatcatgaggtcaggagatcgagaccattctggctaacacagtgaaaccccatctctactaaaaatacaaaaaaattagctgggcgtagtggcgggcgcctgtagtcccagctactcgggaggctgaagcaggagaatggtgtgaacccgggaggcggagcttgcagtgaaccragatcgcgccactgcactccagcctgggtgacagagcgagactccgtctcaaaaaaaaaaaaacaaaaaacaaagagttagagaccagcctggccaacatggtgaaaccgcatctctactaaaaatacaaaaattagctgggtgtggtagtgcctgcctrtaatcccagctactcgggaggctgaggcaggagaattgcttgaacctaggaggygaggtggaggttgcagtgagccaagataaaaagagtgagactcygtcaaaaaaaaaaaaaaaawawatatatawatatatatatatatatatttagtctccaatcccatctaggttgctgcaaatgccattatttcattcttctttatggctgagtagttttccactgtgtatgtataccacagtttatcttcttgttgattgatgggcgtttgggctggttccacattgttgcagttgcaaattgtgctgctgtaatcgtgtgtacaagtatctttttcatgtaatgacttttttgctctgggcagatactcagtagtgggattcctgggatcaagtggtagttctacttttagttcctttaaggaatttccacgctgttttccatagagttctttttttggtatatgccttttattttttaaggaaataaaatttacagttagagttgaagtgtcattcctttcctatcccgttttctttctttttcaccagaagtaaacactgtattgaatttggtgttaataacatatrtatttgattttggagtctttttgttgattggtcttgctagatgtttattagttttaaaaactgcctttctgtttaattagtaccatactgcttacgttcagaaaatcaattgaaaaatttttcattttgattattcaatttcttacaggatttttgctttttgctgtccacaagagctggaggtctagggattaatttagcctctgctgacactgttgttatatttgattccgattggaatccacagaatgatcttcaggcacaggctagagcccatcgaattgggcaaaagaaacaggtatttttaattttaatttatattatattgctgttttagaattctttttttttttttggaagtgatttcagtttatcctctagaggataagatcactgtaacagtcatactactgtttaaccgataggatactgaggagcttggtttaccaaaatcacctggagagtctgacagaattgagataactatgcatatataggatcatgtattctgttttgatcccgtattctagtcgtaactataaaatgcagtgtttttcattttataataaaaactttaaaacgtctttacttgcttattttaacttgaaagggagtttgagtagcatatgctacctttctgttagtctatattttgtccatgtgcttacaagattctccacatgtaaacgtgaccccattttataattgtaacaacatacccttaaatggtggtactgaacctttacctagagaaatagggaaaatttactgcagaatctttgacctagagaaatagggaaaatttactacaccaattcttttcaattttggagagtttgttttatggtgggtttcttattaacttggggagtagttcatagaattttgcattatatagagtgatgaaacattagaatcaaggcaacgagtataagaaggctatcagaagtttacatgccccccccccattttccccagctaaatcataacataaaaattactgtcattcctttaaaaaaaaataagcaaatgcaatctccttatcaaaatattaagaaggaaggaaggatatagtttcaaaatagtcccttaagttgaggaactctagctttaaacatgttttttaaattttcattttgcttttaaccagtgaaaacttcatatagaatgagcttcaatttgtgtgccagtgtttaggcacttgaggttagcaaaacaaatcctttatactgcaatttgtttcctcatgtgtatttttacaggtgaatatttatcgtctagttacaaagggatcagttgaagaagatattcttgaaagggcgaaaaagaagatggttttagatcatcttgtaattcaaagaatggacacaactgggaagacagtactacatacaggttctgccccatcaaggtggttacttgattattaaaaaaatgtcattttagagtcagtaaactcatatttttgatatgttacatcactgtagatcattgaggaaatgtattcagagttgtactttttatattttggaagactttggactaatttctagttagaagacatacttcaaatacctggtttcatcgctacagatttgtaattttaggggtaatctctttcacttctatgcttcaagttccttattttaaaataaatatactgcactaggcaacatagtgaaaccccacctctgcaaaaaataaaaaacttagctgggcatggtgacacacaactgtagtcccagctactcaggaggctgaggtgggaggatcagttgagcccgggaggcggaggttgcagtgagctaagattgtgccagtgcacttcagcctgggtgacagaaggagacactgtctccaaaaaaaaaaaaarggattctaatacttgatttgtctaacttcttcatgtaactgttgtaaaggtgaaaatgtcagtaattaataaaagtgctgtgtaactgttatatttttaactgttaatgttaagcatttttgtttttcctgttttagttctactcctttcaataaagaagagttatcagccattttaaagtttggtgctgaagaactttttaaggaacctgaaggagaagaacaagagccccaggtaaaaaaaaaaaaaaaaaaaaaaaaggcctgcctcagaatatgtgtcatatatttgacaggatgaaaggattcaagtatatttaaatattgtctttttaattataggaaatggatatagatgaaatcttgaagagagctgaaactcatgaaaatgaaccaggtcctttaactgtaggagatgaattgctttcccagttcaaggtagatttaaacaaaattttccttgtaattacataaattgagaggaattgagttatgtcatttagtggtttgttaatctttctttaagcataatcaggaagattgctgtgttatgtaaaaactactctctcttgttcagacaaaccagtagcaaactgatttgaaagagaccaaacccatttatgaagttacatttagttgggtggaaagagctgttgtttcctaattagcaactagaatagtgtttggcaaatagcatgtccttaaatacttaggtaaataaatgaatcagtgtgatctcttacttagatttccatgactgaaagctttcagctgatatttttttgaagcagtttttgacattaacttatcacaaataagaaaactcaagtaaatcagtcaaagtaagcaataagctactatatattgatacttaatatccctggtttgttgagggtcaatgagttgaaaggagtcctaaaacaacgtaagtcaactgacctcatggagtaagttaagtgccatttgtttgaagaaacaggtttctctacatcttagctgttttctctgaactgtggtttttaaagatcaattcatttcatgtgttcatttgacaaatatttatggaacacctacagtgtaccccacacagtgaataaaaaacttttataattttaatgaatcattctgactactttgtggttgattgactgtagtgaggaaagagctatagcagggggagataagacagaatgttgagtartcctggttaagaggtgaaggtttctggaatcacaggcgtgagccacttcgcccggctgtgatagttagccttaatgggtgctttctgtataccagaccttgcatagtaccttaaatgtgctatcttatgtaatcctcacagaaattagtgtgctctcaaagagctctatgtctctgccagtagctctttagatagtgtttttgtgaccataaaaatgatattagattgttctacaatacttgataggtggactggtctgagaatttctgcagattatttagcatgttaatagtataaattacttttttrttgttctgttaactgctcttagttctgtgatgctactaattttgttgagcagtagggcaaaataaaatcattcctagaggattattagatgtcatttggtttgatctgctttgccctaatgaagaaatgaatctaggttgtttagaagttatatttggtttagtccacagccatgttcattatcctaaggagcatgccagttcttccccttaaaaaaaacttttagggatcaatttttctgtaacagttactcttaaaattctgaaatttatcaggttgccaacttctcaaatatggatgaggatgacattgagttggaacctgaaagaaattcaaagaattgggaggaaattattccagaagatcaaagaagacgattagaagaagaagaaagacaaaaggaacttgaagaaatttatatgctcccaagaatgagaaattgtgcaaaacaggtgattttgcaattttaaagatatttctrtaaagtaagagtattcaacctgggctgattttgtttgtttctacgaggtatcagtccatagttttcttttcttgtaatggccttgatttgataatgtttgcctcatgaaatgagttgagaagtgtttcttcctcttttattcatcttttcaaagaacctgctcctggtttcattgatttktgtgtgtgtgtgtgtttttaatttcatgagtttccacaatttattatttcttcctttctgcttttgatttaatttgctgttttytttcttttcttttcttttttctttggtgacagcatcttgctctattgccaaggctggagtgcagtggcacaattctggctcactgcaaccttaacctcccggcctcagatgatcctcccacttcagcctcccaaatagctgggactacaggtgtgtcccaccacacccagctgatttttgtattctttttgtagagatggagttttaccatgttgtccaggctggtctggaacttctgggcttaagtgatccatctgccttggcctaccaaaatgttgggactatagcacgagccactgcacctggcctcttttattcagtttcttaaggtgcaagcttagatatagaaatgtaatctctcttttctaatatcggcatttaatgctacaaatttttctttaagcgttactttttctgaatcttccaaatctatttttatattttccttaatttaaaaacattttaaaatttcccatatgacttatctttgacccacaggtttttttagaagtatgttttaaaatgttcagatatttaggaaatttttcaactatgtttgttaatcattggtagtttaattctgtcatgttcagaaagcatattttatgtaattttaatttttaaaaatttgttggtgtttattcagtggcctaagtaaacaaataccaaaattttgaataactgtaatagtgccatgccaagctatattgccaaaaaggaaaaaaattctaagactaatttctttttctagtatcctttggtttttaggatataagattttttgtcttgattgctgagttttttcgtgcttccttaaattttaagcctggggcaaatgaggggcttgccccactctagtccctgccctgctaccattccccgaagggtagagctttttgttttttcttttcttgcaaccgtattagatcttattctgttccctcagttgagcagatgrgaaaggtctggcarggcttccttcctgtttccacaaaggtgactgctcactttctccaaggctgtaccatggaggaaagttttctccagtcttccttctcatgagcacctggtggaagttcgtggcaaagtgcttgagagtgggtgcaggtcctccgagttttggctgttaggtcctgtgatctcacaatagcgtacactcagccattagcagattttagctgatctcctcttacctgcttgtatggtacttgatttctgtcacctgtgttcttcacaaatgagccactgttcaagtcctctttttctctttttgtaatctcctgtatatccttacatttagatgtgtaggttgccgtgtgatttcatctctctgatgttaaacagaaaaattatgattttgtacatcagatttgttgttagagtaggagcagtgcccctaccaagtttctacataacagccagaagtagagccaaaaataatgcttttggcctgaaagtaaccatgcatgttatttcttgtttctgtttatttctccaaacccctaagtagttttgttttagagtgtgtgagaatgcagcattgcattagatcttgtgaaaggatcaagggaggttagaaaaaaaaggtctaaataccattttttacttcatttaactttcagcatattagaggttcggaatatgtgccaaggctttggaaaaactcccaagacttacagaatatatgttttgatgtatcttattaaaattaatggatgttacaaatagccttttatgtgggttcaactggcatttttttctttcaaatatctgatttgtctagttagaatagcaatatgtggatattaagcagaacggaaaaaaagacagctaatcaatctgttcatccagagataggactgataacattatcacagtgtacatcattctaatttttaaaaattcattatcatttgccaaattaagttggagttgtattaatttggaactttttcttctttttgacagtatgtcatgaatgttaattattctacaaccccatttttaatggtgtctcagcattctatcgtatagatttgtctggtctctctttgatgaatatttagattatttgctttttgtttttgagacaggatctcactgtgttgctcaggctgaaatgccatggtatggtcatggctcactgcagcctcagcttcctggggtcaaatgatcctcccacctcagcctctcatgtagctggaactacgggtgcatgctacaaaaatacctggctaatattttaaatttttggtagagacaaggtctcactatgttgcctaagctggtcttgaactcctgggctcaagttatcttcctgccttggcctcccagtcatgctgggattacaggcatgagctgctgcactcagccacatttttcttttatgatktaaattactttattgatcaatgtttcttcacagttctgatctcctcaggaaaaatkcctagaggttatgttgctgcgtcagtagaataacttttggaggcttttgatataatgtctgattaccttttaaatcaaaatatccaccagaggtatatatttttctctgtttgctctttaattttgtttatggaatgtttttgatacatttaataacatttttaagattccgaccatcttttataatggtttttgctcttaagatacaagctgtttttacactaaggttgggtaaatattttccaattccagattagtttcaatggaagtgaagggaggcgcagtagaagtaggagatactctggatctgatagtgattccatctcagaagggaaaaggccaaagaaacgtggaagaccacggactattcctcgggagaatattaaaggatttagtgatgcagaaattaggcggtaaggtgttataagacaatcgcttcaacttggttttagtagagtgtgaaactaaaatgtaaaaacgcygtaattttcaaaaattgtgatgaagttttagaagaggcaaatctgttatttgagtaggaattgggtggttctgcttttgggtatttgttataactgaacaaaacaagtttggtgtctaatctttgcatgttatttatttatcrctaaactgcttagactacacaattttttttattaatttgactcaatagtgatcctttcgaataataaaagtagttttgatgcatttgatttttaaaaattctcacggtgtttatgactcccaaagttactaattttttgtggaaattctgtatttttctagtttcttaacaacagggtaatttcctttttgaaagtaaccctgttaaaagcatttctgatatgttcaagtaggaattgagatgaggtaagattggccaggcaggatatatttattgtagtgtccattcagaatatgtttatatatacacatttatttaagaggaatgggataacagcttacttttgtttatgtaatagttttggatatgacatttattaaaatcttattcagttttgtattttgaaagtttctttgaagccattgtaacttttttcttttaaaatcttagacctgacaaaattcttccttattctttctaccagaaaatttaatacattgttagtctttttaaaaggcactttcatgaccacctgaattgctgtacttttcgtctttagttgaggaagcatttcgacttctactttacctggatatttttcctcatttattaaccacttacgtagctttcttaagtaaaattttaattttgcattgttggtgtaatacacatctgaattaaagcyattcagtgaatttttatcagcacttggaatgtgaggaagtgtaatataattgataattattgtggagacacttcctgtggtagcttcagaccttcttttggtcttatgaaaataatgaagtaatttttaaaacaaaatttagcttctattgttttatttatactgatatctaaacatcatcttggatgttaatttaccttgtcttacctggtgtatcttaatgttttaacatttttgtttttagcatagtttattcattcttcttagataacagtgccttgaatttttatactaacaagtattttcttatatctgtaaatatcagaaatacgtatawttttagtgaatactgaagctcacatttaccaaacaattattttctcttaggtttatcaagagctataagaaatttggtggtcctctggaaaggtaaatacgtttattattctcatagaataatggaatgtgttacatgctgtcacctttatttatttgtattaacattcagtttagctactttgttaaatttgcttttaatcggcatttacaaaattaatgtacaagggaaatttcagattgtttttaaaaatgtttttatactgtgtttaatttccagtctcaaatttctttcctgtaaattatctatacatgtttaaattgcacttttatgacggtaaggcactttttacaatctttatctcatttttcatcaataacttaaaagtagcacgagcagatttatccatagaggggctgagttgctaacccagccttttttttttttctttttaaatggagtctctcactgtctcccaggctggagtgcagtggcgcgatcttggctcactgtaacctccrcctcatgggttcatgtgatcctcctgcttcagcctctcgagcagctgggactacaggcgcatgccaccacacccagctaattttttttttttttttttttttttagtagagacggggtttcaccatattggccaggttggtctagaactcctgaattcaggtgatccgcctgcctcagcctcccaaaggctaacccagccttttaaccagctctgctttccctaagtagagatattttcttaagtttctcaaattcattctcttattatacaaactgtattaaaattcaaattaagatagtttttttgaagttatcagataatctcagtaattattgtgatttggatattctttgccctttgttgtggccaacccactgtctgaatatagatcagcaaagactcaaattagtttatttttttactcttaaaaaatcccttcaaaaatagatatattttgttttattttgagatggcatacttaaaatataatgaaatacttgcataattattttagatgaaaaaatgtcttgagtattaatcattcatattatctatttggtgcacagtaataaaaagttacagaactttactcagcttttgtgtttacaattataaagctttaccacttcattctgaacatcttaaaatttgatcagttattaaaaggttttacagaattggtatataatcttccatttgctctataatgaattaaactcattattattgaatatataaatgaattgtttgtctaccacattgtcctggyttttatgtgtttcctgccatttatgtgaacaagaatatatagagcatgcagtagagtgatattcagatcttgaaatagagtgaaacttaatcttaaatggcaccacttcatttaacatatttacctgaaaattggattattttgttacagattagatgcaattgctcgagatgctgagttagttgataagtcagaaacagaccttagacgactgggagaattggtacataatggttgcattaaagcattaaaggatagttcttcaggaacagaacgaacaggtaacattaaactgagagtgatttaaaagagaagtaaatgaaagcttcaaaatatgctttattgagctagatattatatcttaaattatttattcatcagtctcaaaaggttatttataaaacaaagtaaagctattctgggtaataggaaatggagaacagaattgcaattcraaggcagtagaatctgtttttaattcccctgacattttctgtctgggaggtaaggtcagaaattactgttttatacacacacatatgtacattcatagatatatgtgtatatatacacacacacagtacaatatgtatagtatctataggttttttagtatagatgactgggaaaatataatgcaaatatacacatatgatattggtttgggacataattattttattattatgcttattttgctgttcatttacctgaataaaaattatttagataaaatttaataagcagaccaggcatagtggctcacacctgtaatcctagcacttttggaggctgagatgggagtttagcttgaacccaggagtttgagaccagcctgggcaacattgtgagaccctgtctctaagaaaaatgaaaacataaaaattagcagggtgtgattgtgcgtgcttgtagtctcagttacttgtgaattgaggtgggagggttgcttgagcccaggaggtcaagactgcagtgagcaatgattgcaccactgcacttccagcctgggcgacagagtgaaccctgagtcatcatcctataattctttatttagaggctgacggtattagtagattgatccatcttatgtaattggtaaaacacttagagaaatacttttcgtgaatttgcatctgcaagattatwatcacttgttcatatgtaatgaagttcaaggttttccagtaatctcttaataatataaataaggaatacttattgttaaataacataagtaatagcatcagttgcttggtgttttgtagaattatgttttatacttttaaaaatactggtttttttaaaaaaaatcaaggtggtagactcggaaaagtgaagggtccaacattccgaatatcaggagtacaggtgaatgccaaactagtcatctcccatgaagaagaattaatacctttgcacaaatccattccttctgatccagaagaaagaaagcagtgagtgatttattttctccattgtaagatttttgttattcaataattgcaaaatgaatgtgctgaatttttatggtgttattggctagttttgaaaaaaaaaaggaagaaataaagcatattattttgaagttctaatgactcacgtttttcaaaattaatttttcagttaaggcaattacaaacttatcattagttattaactttgatgccaggtatactatcccatgccacacaaaggcagctcattttgatatagactggggcaaagaagatgattccaatttgttaattggcatctatgaatatggatatggaagctgggaaatgattaaaatggatcctgacctcagtctaacacacaaggtatttatctatttctgattctgttaaccattcatgttgaatttaatttattctaattcttgcttttaaattatgttggaaataatggaaatctggaaaccaaggcactagctggttgtgtgaccttggtgcgtttagaagatgctttgcatgaaaggatcaaatttaaatgatttctgagattttgcgttactgtgaaattatatgttattaaggcattaggtgtattatttttcaaattacgaggttaaaagtcttattccatcattagctttaaaaaaatttttgatgcataatagatgtacatatttttggatgcatgtgataatttgatacaatcatataatatataaagatgcaatcagggtaactggaacatttatcaccttaaatatttatctttaggaacatttaagtgattcttttctagctattttataatgtatagattattgctaactgtagtcaccctactcacctatcaaacactaggtcttatttcttccatctaactatatatttgtacccattcatcattaattttattattccagtaagacaaaatccttaaaatcttttatatttatttttaaaaaacatcggcmttgtagtatttttggtcatttggttgcactgtgctagctgaaatccttttttttttttttttttttttttttttgcctaaaatgggaaacactgggagaacttccttattgtttatcctgtgtgttgggaacctttagatattggtgctttgtcatttgttactgtgaagaaaaaattaagtagtctagattcccctgtaaaactttcctcccagtgtatgctttaggtcttcttctagaaggatgacatcttgtagtctaggaatttctgtgtacattatatataagtacacttttactgagaagggaaggtgtttaaggattatataacatttaatagtggatgttaagtacacttttgtatatttgaaggaaatttacwaccttatgctttctrttttcattttgaaagataatctgagggtttttgaagtttagaattcattctcagaaaaattaaatttttggctctggcatacgtataaaaaatacattttgcattgagtttattcctacaaatattaataattgaaacttgttggtgaactatatatatatttaaatggttaagcattttttagccagtacatttctcatgttatttattaagacaatctgaaaaaatttattgctttttcagattcttccagatgatcccgataaaaaaccacaagcaaaacagttgcagacccgtgcagactacctcatcaaattacttagtagagatcttgcaaaaaaagaagctctttctggtgcggtaagttaaagcccacatgcctaagaccagtttactttttagtaaggtaaattttgtttacttcaccatgctaaacatctgaagtcaatatgagcttatataaatggatttttctgtaattaagtagttttatttgatgttgccatatttaaattttaccttaaattatctcagcatacatgttaaaactgatgaatcatagctttcagaagtaggattctgttttttttttctagttttagagagggatagagaaaactcrtttagygtgcggagtactttttgagaagtcaagccttacatagcctacatgactgttttacttggagtcattagaatgcttaagggacagcgtcataggttgccaascttactgaaaaagaaggaaaaagacaccaaaaaggaggtgattggaaacttagagcaactgttagaagtttacctgtgaccataatgtcaataactacctgtgtagcgttaaaaatcattcctaatgcagtctcttgtgctatagaattaagctgaaggccataataatctcagagggtaaaaaatttgtttctacttctctctgatcctttttttaaaggaataataatggctagtatttattatttacattaatattatatttgactcattaagttatawcacctttattgagtttctgatgttggtacagcttattaccaatagactaaggatcaggtaggaatatgtgttctagcccttggatttaatgtttatgaagtttttaaaaatgaaatctgtagaattggttaaaattaaaataatgatttttagggaagttcaaagaggagaaaagcaagagctaagaagaataaagcaatgaagtctataaaagtgaaagaggaaataaagagtgattcttctcctctgccttcagagaagtctgatgaagatgatgataaagtaagaatgtgttttagaacaacaaccttttctatggaaagggaatatggcatgtttttgtgtactttacatttaaaatttatattttaggtaccgaagtctgtgtgtgtgtgtgtgtgtgtgtgtgtgtycycacgtgcgcaygcacttatagttcataacagtctcaattatagaacagaattctaactgtccagtagatattatatagcactagaggcatagagcaaaggtccttccttttcaaacatttgccaatttgatgagcttctgtctcttttaattgtattatgaacttgaatgggactggcttactttagtttataggaaggtaaacattgcatgtatcattattagggggattctgggctctttcagaatccacatacatgcaatctgtagtcatatgaagaaaaattagtckttgttaaaatttggttagtaatacattggccatacttgcactttccaggatgagatcagttctgtgaaacatccaaataaaaaaattaaaacagaaagagacagtgaagaaaaacctgagccagatgtttatataaagaaggaaccagaagaaaagagggaagcaaaagaaaaggagaataaaaaagaacttaaaagggagataaaagaaaaagaggataagaaagatataaaggaaaaagattttaaagaaaaaagagaaaacaaagtaaaagaagctatacagaaagaaaaagacataaaggaagaaaaggtatgcaaatcataataaaaaatgtagaaagtaaaaacaatcagcatatttacattttaggagactaaattgcatatcagcccttattagtctcaataactgagttcttcagaagcrtgtttgggtatgcagtagaggagaatagtagrtctgaacastctttaatgctttaccttcagagtaacattacagagtagctttgattgtttccccaaataaaattggggaaaaaaacaaattaaaatagatgaggatattcaatgagaatgagcacttgtagaataaaatgagacagtaattattttctggaagtgttagtcattttgcctttgttgctattggggttttgtttttgttttcttttcactttttctttagttgagtgaatccaagtctgatggtagggaaagatccaagaaatcttcagtgtcagatgctccagttcatatcacggcaagtggtgaaccagttcccatttctgaagaatctgaagagctggatcagaagacattcagcattgtaagccttagactttctgattattagtattaactcataaaacatttaagttgaagtttgtcatttatagcatttaatttagaactgcatttgaatttattgtagattgataaaagcaatgtatttgaaatttgaagggtgtcttttttttttttttttttttcttttttgagttagcatctcactgtcgcccaggctggagttcagtggtgcagtcacggcccattgcggcttcaacctcctgggctcaagtgcccctcctgcctcagcctctcgagtagctgggactagaggcatgtgccatatacccagctaatttttagttttttgtaaagatggggattttttatgtcacccaggctggtctcgaactccttggcgtaaaagggagataagcctgggcatggtggctcacacctgtaaacccagcacttwggaaggccgaggcagtggatcacctgaggttaggagtttgagaycaacctggccaacatggtgacactctactaagaaaaaaaacaaaaattaactgggtgtgttggcgagcacctgtaatctcagctactcgggaggctgaggcaggagaattgctggaacctggaaggctgaggttgctgtgagctgagattgcaccattgcactccagcccgggccgacaacagtgagactctatctcaaaaaaaaaaaaaaaaaaaaaaacaaggaagataaaaggaggccaaggtgggcccaggtgctgggattacaggcatgagctatcgcacccagctggtgtcttaaatttaraagcaactcggaaagactttttaataaagacttttaaraaraggggtttaacaagtactttgagtgaatttgttttcctccagctcgtatttcaaatttttaaattcccaatgccattaaaaaataaatatgtacacacayacayacacmtgtgtaatagtgcttcttatttatggtgaaggactagtttttttcccagttttttgcagaccaatatattttttaaaaaatacaagaagaatgaaatgtttcactagaaaagtgaaataagaaaaaattatgtacaaaatatgagcctaatgttttgttagtagatgcagtagctataaagttgcattgtcaaattatgagtttctaaacaggctcagtttttgtaccgatgttgttttggactggcaatatctcttgtcaaatatactgattctccatgttgtcatgcctttgcgttcctcaaagtgagggagaaactatctgtgcctttattctaaagaccttatttactgaagataattataatttatgtatttatttataatttactcaatgtatgtattcataatttatttactgaatataattatatacttatgtaattacataatataacagtatgtatgtgcttaatagtactgactcttgaggcagaatgctatttggtaagtaagtatgaagattaaatgaattggtacatgtaaagtttacagatcagtgctgtcttcagaaaagctcagaaatcgataagtgattgttgtagatgttgttcctaaattcagacatgtgaagcagataagagtgagactaaaaagtccaattgcagagcaaaaccaggaagaaataataatgttagagaaaaaagggctgagtgatacgagaccgataatgtagttkggctttaactaggactaggaaatgtttccttacaagccacaactgaaggaaacacttatagtctgatatatagatgtgtcatgtttatatatagttacaatatacacaaatttatatataaatatatattcctatatttcctttttagagatttctagcatctgaatcttttatactagttggagcagttaacatacttcagtcacttgttagacttgggtgtcagctttatcactagtattaatcaaatgctatacttcaaagagggaaaatttcaccttctaaaattatatttgttttcaacccattatgtccttctagatccccagcttatcctcttgtcctactttctcttcttttgcaccgtgactagacagtgttgatttaatgaacccactaatgtatttcctactgatkccacaacatgccctaatatagttcaactattgttcatgctctttaaatatattggttttttaccatcctcttgttctccctactttgagckgttgacattcttccagtcactgggagtattggagacattcaaagctgctgcagctcctatcttccattttatttatttgagccatattttttatctctggacttwtatttttatctcctgcaggttcacaggctggaatttcttctctctttttcaagggtaaccgtttttgtttttgttttttgtttttgtttttgttttttacctactctgtattgggtgggagtcaggggaggtggtattctttagcttttttgaagtgaaaacattaaacttttcactggagctacttccccttctctatgtggtctactaatgaattaggtgaaattgtatctcttgccacyttttttyyccccacatttcttttttaatcttcggactttttcatgtaactgctggaatggaaaaattcctgctgtgcacaatgcatgaatttcctctccattaatcttaaatgatattgtgtgtatcatggaaatgaagactggaatagttcttaaacgtggactctgtagccagactttctggcctgtataggattttacctctaagtaaggaattccattgtatttgggaatagctctaagtaattatgaaattcaatggccttttctaggtcgtcactctctaaacatatttgcttcatttggcaccttgattttccttttactggttgtcttcctaaatgacagtataatttagcagtcaagaaagagcagagtctgaggtcagttagagctgggtttgacagatgtcattgtattctaagtttcagtttcttctataaaatagattaaatactattgcaaaggactattgtcagggtctgttcttattgcttccatcctactcatacctcagtttgtactccacatagcaaccagagtaatcatgacttagagggagaataaagtcacaccgttatatttctgtgcctacaacactccagtggctttccatctcatttaggagaaaagattcttagcctgaaaccagcctcgtagcatctagtcacctcccatcgttgccggccacttctctgacttacttggttccagcgacactggcattcatacttttttaaaaaacatgtcaaacaagttttaggactttcatgtttgttttttcctctacttggaatggcttgctccttcattttctttaggtgtcctctcaaacattgcccttctttgaaatcttgcttatgataagataggaagctccctgctctttcttcctttatttttctttatcacagttgttgtcatctgacatactatttcttgttcatttactggctctcttatactagagtccaggttccataaaggcaggatctgttttacttacagctctatttcctgcatctggaacaatgcctagaacatagtatgtactaaacttacatatgttggataaattattttctaacagaatataaactgccaaagttgaacaaaaaataggaaacataaaagcaatgaataaactaaaagttagaaaggaaattaaagattttccctttcttaaagcatcagatctgactgaattctaattttatttataataagagaggtccttcaaagcagtggtgtgaggatttattattttatttttttgaaatagggtctcacttttgcctaggctgcagtgccagtggcatgatcacagctcattacagtctcctgggttcaaacagtcctcccmccttgacctcctgagtagctgggactacaggtgtgcgccaccatgcttggctaattttttttttttttttttggtatagaatcaggatctcactgttgcccaggctgatctcaaactcctggactcaagtgatcctcccgcctcagcctcccaaagtgctggggttacaggcctgagccaccatgcctggcccaatttcttaataaatgatgttggattatctaaatgcattgtctgatgttgacccatcatccttatattcctagaactaaaccagcttgctttctgtgaatatgatgttaaatttttatttgtttttgcatttacaaattttatctgacggttgccttgttagtaatatttttattctgattttggcataaggttatagtgcctattgctacaataaaacatgcaattcttaatatgtcatccttttattagcatgtcaggaatgtacaggccaaggaaaaagttaccctttgaccctctactccccaaccacccaaaatatgaagagcaagccattattgccaccttctgttatcacaaaggtttggaagaatacagtttatatatctagctatattgattttaatagttttgctaaaatcattttaccctgtatttagtggatagtagggtattaagttatactctgaaatattttactatcttttaatagtctatatttaagactccttagaatagtgtgctacaatataaaaaataaccatttttgtagaagctaagtaaaatccaaaacttttacttactcaaagactgattttaaatgataacagaaaggcttgctctcctgaagaaaatctaaaggggaaagaaccctgatgtataagatttgtgaagtgaratttaattgcttattttgctatcaaacagtgttataatattatactcatgtaaatatcattgaaggaggtagaccttgttgaatttaggtttttaatacatgtgtttatattcttgttttctcattttaaagtgtaaagaaagaatgaggcctgttaaagcagctttgaaacaacttgataggcctgagaaaggcctttcagaaagagaacaactagarcatactagacaatgtttaataaaaattggagaccatatcacagaatgtctaaaagagtatacaaatcctgaacaaattaagcaatggagaaagtaagtgatacacttttcaggaagtgttaaatttrtattatataactgtcttttttttttttgttttctttcctgattctgaagtttaggtaacaagataatttttaaagaggtaacctacagatgattgttttaatttttctccctttaatgttaaatttttttatttatgagtggttacttatgtatcatggtatgtaacaagtggcatctctgcctttaaagaaatagtgaaagctgtttcattaaaattcagattgcattttatttgaaaaagtctttgcaatttaccaaattattatcagtaatatcttttgaagttggtgttcccacaaagtttattgttgcttgaatttagcaatttacctcctggatacatgtataaagatgtaaaaattaacatcctcacgcaatgtaaaatgcaaaaaattaggaaaataaaggtaatgtagtgcaaattgttcttaaagctaaatttagctaatctaaaggattatattaaaattcttctctacttttattagtgtaaaaatgcttggcttctatcttttacatttaactggaactataaaatttgaaagcctggcaacttctcttttaaataatgccttttgccaagaatgggttatcattttggaggaccactgaatgaaaatacttagttgtatcttcaccaattttttgaatccttataattagggcttagatttttgaggttcaaagagttagaatgtctaccttttctgctttctagatgagaaataaggaacatcttattgaaattacacagtgaatttggttgaaagtaaatttaaaaatgagcaaagaattaaagaatttgaaataaaattttaagtaaaataaaaaaagttacacagtgactaatacaaataggtaccatttcaaattcggtttgttataaggaaagggtggggaaacctttggaagaagagagactaatagccaggagacttaactttttcattgtgttctgtcactttacatcctaaggctgtgctctcacctcacttttctttactcagttgggcagattacctttttggttttcccctgtttggttctcagttactttgatttcatattccttattgttcattcctgctgccactctctctggttaaaccaaattcccttaagggggagatggggaaggaaagagggaaatatcccataaagcaaaatagcttttgctgtcttggagaaattttattttgatttatttatttttttgagatggaatcttactctgttgcccaggttggagtgcagtggcgaatctcagctcgctgcatcctccgcctcctgggctcaagctatccttccacctcagtctctttggtagctgggactacaggcccaygctaccaggcctggctaattcttgtattttttgtagagatggggtttcaccatgtcagccaggctggtgttgaactcctgacctcaaggaatctgcctgccttggcctcccaaagtgctggggggaattttttttttatttttaatgcagaaacaagaaaaaaaagtaccttatattaagacctatcattggctgacccgatcccctcaagaacagtcattgtgggctggrcacaatggctcatgcctataatcccagcacgttgggaggccaaggtgggcgcatcacaaggtcaggagattgagaccatcctggctaagacggtggtctactaaaaatacaaaaaaaaaaaaaaaagtagtcgggcatggtggcatgtgcctgtagaaccagctactcaggaggctgaggcaagagaatcgcttgaacccaggaggtagaggtcgcagctattttgctttaagggatatttccctttctttcctgaatgaaagaagatagagatctaaaccacaattacagaacagttggcattaagcaagtgttacagtagttaccataatgatctttttgttttttgcttacaatttttttcaatatattttttgaccaaatttcttaaaaacaactgaaatgcaagactagtttttatttaaagatgactgtaataaagtgatggccaaaatagaatgtatatttgtattttgtcttattaaatatgcctcattctagctgatccttttaatagtattgtagaaaatgtgaacagatatttactattccattttacagaagaaaaaaatggattcagatgaaaagcattttagggctgggactggagaatgasaaaggaaacacctaggacctgaactgtttaaaagaggcactaattcttaggtttgtgtaagtgctgacgcttgcctcagctctggtgctttgttcaagatcagacagtcattcggatgatataattaagaccagaatctgattcctgactagattttttggggggaaaatatatttttataaggaatttacttaggaacaaaaaggtactttattaacttcctaccttttacccttataagttaatcgtagaatgtagatatgttcgagatagtctgtgaatttatataaaggctagatgaattttccttcttctgtggatttcatttcagtaaggtatcattcaatatattctcaaagttcattttaaaaatatatttcaaggtaaatattatacctctagtgtatatttgaatcttctagggatactaccctaacttagaacctaacattccttttctttttggaggtatatttgacaattacagttccttatatatttaaggtatacaatttgatgatttgatatacacatgcattgtgaaataattacagtctctgattaattactgatgcctcccttgggatgggaagagatagcaaactgtacctcatttatggtgtttggttgtgttactcttgggaccattacattaccattattaagtgacagttaactttttaatgcattatttaagacaattctttacaagcataattcatattatctgatggtatttccactccagttattaacatacctgtcccttatatgcataatcaggatcacaatatgaatctgagtcacttcctgatttaatttatgtctttggtgcatttcaaattaggattgtactgcttttcaccctaaagactataaaatgaagcgatttggaagagaagtaaaatttaatgtttagtttcactggagtcttagtcatatatgaagttttgaaaaaatgcataggaaaattaatatccttaagagtttgttccatagagggctgtgtatgtgtatatgtgtttgtgcctggagggaaggagttccatgaaaaaaactaaataytttccaccagactaacttaatttgcctttttttaaattcttctagaaacctgtggatttttgtatctaagtttactgaatttgatgcaagaaaattacataaattatataagcatgctattaaaaaacggcaggagtctcaggtaaacttgacatcatattttttccctgaatttatataattaaaaccttgagacattctttttacagagcagtttgattaataaatacagaatgaataagataaatttaaaaaatcaccattgaacaccacagtaatgattgttgcaggcgagattcacagaagagaggtaaaattaatgggcaagaaaacaggatattggcagatctcctctgaaatgtttattagttataaagggaaaataataactttatagagaaacttgcctgacccaccttaaacaagtgatcaaagttaatgtcaccaatagttaagacatatcagcatcatgaaccctctgatactgagaaaggtacatcacttatgtggaattcttgccaaaaatatatgtgttattatgtgaaaatatcagacaagccctacttgacggatattctataaaataactgtctgctactcttctaaagtgttaagagcatgcagtagactaaggagctgtcccagaggaagacgtgacaactaagtgtaatatgggcttccaaatcgaatccccgagcagataaagaacattagtggaaaaatgtgaaatctgaatgaagtctgttcttcaattaatagtgttataccaatgttaattatttggttttgatcattatactatgtttgtataagatattaacattaggagaagctagatgaagggaactcagtatttttgcaacctttctgttaagtcaatttatttcaaaatgaaaaaatatctttaagtcatgggacaagtagttcatrctttaaaaatggagatctataaatgtcatacatgtatatatacacacataaacattctaatatcttgtgtgaagacttcattatcagtattttctaagaattatctstgcttttttgtaagtttgtgaagtcacctaaagattcttaacacgtgtgcatttattttagcaaaacagtgatcaaaacagcaacttgaatcctcacgtgattagaaatccaggtatgtaagccttactgattgggaaaataaattaaaaaaaattttttttwaatttttgttttaaataaaccaaatgatraaaaaggttcttaccttgtttttatttataagtacctttatattaaggagatacagtaattctgatacatacctacattattatgtaaaatgtattctcttaaactgtagttcattttagtttattrtccttttaatcatccttttctcagtttctagaaattgtagaatgactgttaaaatgaacaaatattcttttttatgtaatttggaatagtaatgcattctttctgtatcagagtcacaaaagtatagtctgagaaaggaataggtcccatattttttagtttttgtgacatttcagaatcaagcaaccttttttaattaatccttagtactgcttttatacaccatttctaaatgctttaactgcttgtatttgggaaccgattttgttttggcargggttgaaacgaattcttgttatctatcaactaagttttttttgccacattatttttaaggtcattaataaaagttgtacttatctaacagatgtggaaagattaaaagagaatacaaatcacgatgatagcagcagggacagttattcctctgatagacacttaactcagtaccatgatcatcataaagaccgacatcagggagattcttacaaaaaaagtgattccaggaaaagaccctattcttcttttagtaatggtaaagaccatcgtgattgggatcactacaagcaagacagcaggtaaacttggcagtcamtttagaaattttgcttatgcatgtttttctccttatcatgatgttcctgtatttgacctgtcagccaattcartcttcatgcagtcaaaacaaatcttgtgaaataaaggtgttgtatataattaagaaaaatgtatatattttaagaactgaatttctctataaaatggattttgaattataaaattgagatcaaaatatgtagtaaggtgatgtagggagttgtatgattataaattgcgtggggttcattgttcgttttgaagaatattggctcaaatactctttaaaatataataagtgggataaaagcttgatataatagtgatycaggtttggtttaggaaattttgcattccatatttttaaaaagtcgggaaaaattaatatatgtgaacacatctcattgaggtaaaacttaacctcagcaatctggaatattattggaaccaggaaggttttttgtttattgttttttgaagcctttgaacagtaagcaacctcagtgtaataacatcagaatactttttattcctttattgataaagaagtattttcggtagttaatgatcactactaaaagtaaacttgaaaactgagatttatagtatttatgcttttatagtaagtagaagaaacaaattagaagacatctttgtattttagtgttcattacaataatttctttgagaacctctgtcarcactatgaacacatcagttgtagaatggctgttatttgaaggggtcaaataattaaaaggaaaaggcagatttatagtatatatttcacaggcttatgcaatatagttacagttgtgtgtgtgtcagtttggaaaaggcactcattttagagaataattctcattaaactgccacatttattttttatcaagctgtcacatgtttgtatggagtaaatttcgtaatgattcatgtgtcgagtcttactatataactagtcaaacttgaggaagcttttaataggcatcagcaaccagtgaaaaatttttcagcatagactgcattctagcatttttaaactttttcctgcttagaggttggtaaaaggctctggtctcaggagtatttcagatagttgtaataatcttaatttcagcttccagacaattaagatgcagtcatataaatgatgtgtaaaataaaaagcagctaattatctaaaatagccatgtgaaattagatgctattttaggggttttgtrtggttcgctttagttttatgaatcaaatagtttttccaaagagatatatccagtgatttttgagttaattaagtaagttttataatgcaacactgartttctatacaattaaaaacatgttttaaggtatttttatgttttttagttatcttttatttggaaacattttaatttgcrtgatttgtctaaaattctcaatttttctttattagatattacagtgacagagagaaacacagaaaactggatgatcacaggagtagagatcacaggtcaaatttggaaggaagtttaaaagatagatctcattctgatcatcgttctcactcagatcatcggttacattcagaccaccggtcaagttctgaatatacgcaccataaatcttccagggattataggtatcactcagactggcaaatggaccacagagcttccagcagtggccctaggtcaccactagatcagagatctccttatggctccagatctccatttgaacattcagttgaacacaaaagtacaccggagcatacctggagtagtcggaaaacataacaaaaactgatacttcgtctttctggacttttcttttagccatatatcataaaccaacacagtaattgccttacatgacttgaaagatataaacagatcttctatcagtagcagtattgttacttctttccaggatgcaaggtctattatcccaacagaagagaaaatatttttatatttaaggattatgctgcactgtactacaaaattgtagtacttttttttgttttcttttttaaagaaatggaaaatgtttactattacagggacctcaacactgccctcccatacaggctggataaaactgtttttaagtcagtgattttagactgacctccatttaaattrtgtttatatatgaactttactctgacctgtgatcatgtttcaggaaggaatgaaagagagttctttcttaataaagaaaaacactcaaggactttgttcatttccaaagctacttgtttacattgtacactgcgaccaccttgccgcttttcatcacaagcttgaatatttaaattctgtacttatatctgtaaaatagccaggaatttcctgtttgtgatctattatgcctttttacaaaaaaaatggctgtaaattattgtaaatattaaaggaactttccttacttccttccctttctcaggctttttttgactgttcctttccctaccaactcaggccttcttattaaaaaaaaaaaaatcagtgtaataacactttttaatgatttgtcttgatggaatcattgtttagaatgtaaaaatggggaaaggggccacttaattccattagtcctctttttatactgaatattttattagatacatgttattcccttttttttccttttttagtcaatattgtgtttgtagttttaaaaaatggcgagatatgtaaaatctaaactgcatgctctggaaacacttttttcagatgcatctggtttaaaagggtaggtgtataaacacttttcagaatccaaaacggccaaaagttattgtaaatccgtttgttttcccgttttatgtgggcaataatgtcaaatgtgctatgcagccaggttaacattttagataaacttgattgacttttaatataaactgttacaatgcacactgattgtatataaaaacgttatatatgacaaattaaatttaagaaaaaggatatgtgggctcctgtaattttctgctgcattcttactccctcaagcacttaccaccaccaccaccgccccctacccccgtttttaagtaacattttgctgccagaaaaagtattttggtaagcagttgaatatttgtaatgtgtagcattacaactaaatctgttttggagactatgaatattcctatgaagtaaaacttaggtcatagacatttttgttggccccttttggcttcctacagatattattatgggatgctttatatttattcacagatttttattttgttttatattcagcgggaagtttttaagtcatgtggcacacattcttgcatgtatgctttgatgtaacaaatttgaatctttgacgaatataagtatgtggacataatttctatagtattgctatgtgtgtcactgttaattagctgtgggagcaacctacagatatttgtccataggtgtattttttaatattttcctttgtccaattaggtttatgtgtataaaagcttgtgggtttttttgctttttgttttgttttttgcagtaatttctctttctgatacagttaccctgaagaataataatgctttgtttcttttctggtatatgagagaacatgtgagggagtagctcagttttttaaacatctaatttataattaaatataaaagtaatgaaggtagtcctggcacacatttttgaaacttttatcacttttctctacatttagtatgactattttattccacaagatagcatttgactaattcataatgcttaagtcataagatggtggctggcattttttaatttattactaaaagctaagatatttgcattatattgtgcaaatttcacagaacaatgttgcattttctgagataaggctctaattttttaaatagtgctacatttagttgaaagtttcagtcagctagttagctgagttgaatgaaaaatatagaactgtatgtacatttatcaaatgataaaatatgttcattttttgtaagaaatcagtaagaaaaattaagacgcaatggtgaagaacattagtacataaatatagcagaacattctccataaaatattctgttttcattctgctttgttatttttatccagttatgtttaatttttcaagggtgagagattatgtatagtactgtaccaattaaccttccacttttatacaataaataattcttactaaaagcaatagcctgtttgcttataaagatattctttgtttagagtatgttagaaattaattttcagactatggaaaatgagtttgaataattttattttcagagtgagtagcttaatgagaacctttttaattttatgtaatataaattataatttctttttgtagttaatatgaaaaggttgagtaggttattcattttcatgaagtttatcaagaatatgctctaggagtaaatggcctgatttttactctaccccattactatttctaactagaaaataatctttgcaccccaaattagctgtcatagctttataaatacaaatagctttataaatacaacagcttaaaaagggatagggatttggaagagcaactaatttttaaatacaggattttaaaaaacgactttcagcttcataggaaactgcaaaaatattttaaaatatttctgagttaatatgtaaaagcacattaatatagatgcctctattaaatatacattaaatactcaatttgaaaatgcagacaaaacttagatacattttagcattgtacaataattgtagtgaatggaggatgttatagaggacacaactagatagtaatgcgacaaatattttgagatagtgtcaaaatgtgtgtgaaaatttctaagacattcaattatagatatttggaagaaagtttgagattatattttctgacaataactagtaattgattttgtagaacacttcatgctaattttctttaaaaaattaggacctaataggttgactccattacagaaattcattgaattctcataggaagatctaggaataggaaatcttagctatggtgtaaaaggatgaaagatgagattactggggaaagtaggattaatgaaaaatgttaaaaggttgttccaagtacctatacaaattctctaatggggcttcatgtgctggattttctacactaaaaggccactaaccactctgccctttagcttaaaaaaaaaattacatctatatttgaaacaaaatttgtagttccaactcccaaatgaatgaaatcattttaattcgatgttctactccacatttgagtcctgatctaaatatgaaactaaagaggtatgaacagtctaaaactcctaatgattctattaaatgagctaaggatattgtttccgttggtgatatgcaaactttatgtgactgaaaaatgtgtgatgtattatcatttcattattgttgactaatattaattagatttccaatctagaatgagctatggaactgccactagttacttttttttattccttctgtttacttttcaaatctttgatttgtctctagtgttctgcaggctgactatattaagtcctggtgtggtggttttatttatttattttttttaaatttctttttttatcagctgttgcctcttacccacttctttttactttctggaatcctatatcattgctatcataagacttaatttctgatctctctctttctcaacagctgtactatttttctcttcctgtttctagtgctatcttcagcttcaaccactaccctgaactcatctccacttagacagctaatagatatgtaatattaaaatatgtaaaaccaaactcaacccttttacactaagacattaaaagttttaaaaactgcaaggctgggtgcagtggctcactcctgtaatcccagcacttcgggaggccgaggcaggcagatcacttgagatcaggactttgaaaccaacctggttaacacggtgagaccctgtctctactaaaaatacaaaaatcagctgggtgtggtggtatgcgcctgtaatccccactactcgggaggctgaggcaggagaatcacctgaaccgaggaggcagaagttgcagtgagcaaagatcacaccactacagcatgggcgacagagtgagactgcctcaaaaaaaagagaaagttttaaaaactagggtctttgataaatgcattcacagctttctgcctaaggcacttcttagctatttctgttctttttgcttcacttcagccactcctgtcaatgcaaagaaaatacttcttggcctttgcattattgtccctctattaaaaaatgcttggccgggcgcggtggctcacgcctgtaatcccagcactttgggaggccgaggcgggtggatcatgaggtcaggagatcgagaccatcctggctaacaaggtgaaaccccgtctctactaaaaatacaaaaaattagccgggcgcggtggcgggcgcctgtagtcccagctactcgggaggctgaggcaggagaatggcgtgaacccgggaagcagagcttgcagtgagccgagattgcgccactgcagtccgcagtccggcctgggcgacagagcgagactccgtctcaaaaaaaaaaaaaaaaaaaaaaaagcttatttgtgacttgtacaaaactcgtttcctcaattcaggtttctttcagctcaaatgtcatttcaagtcttgaaattagtaccctgccccatcatttttaaaaatcccttatcttgcattttcttctagcattaccacagcttatatatttggttcatttgccattgactgcttccccactagaatataagttccattagggcagggactttattttgttcactgctatattctcagtacttaaaacaatgccttgtatcaattatattttcattttttttaatgtccttcccggaaatgctatgccctataaatggccaacattaccaaactttttgtcttaccgttgttaacctgatttgttagtattggaaattatcgtatgccttactatctcatggattacttgagtctgtttactaacttccagtttttaaacttgactgataaaaatcaccggaggtacttgagaaatatagaaaaacataagcctcatctctaggaattaaaatggcagggaaatgctccaagtaatggggctttaatatctctttcatttacctgaataattaatatagaggttaattccactgttataaataatacagtaatgcttaaatgaaaaactggtttctgtaactatatggctacttaggaaatataattgatactttgcgaagagatatgcagagatgtggtatataataggaaaatataaaacattctgatttgtctattgctttacctttcttatgaaccttcttcattattattttttaaattagaagtgaagtcttgctatattgctccaggctggtatcgaactcctgggatcaaggcaatcttcctgcctcagcctcccaagtagctgggattacagactcaagccacagtgactgggttgtctattcccttatctttcgaaaggaaatatgtttttaggtatcatgatacactatctttcttaacgcacaagaacacgacttgtaaaaacactaagagaaatatgttgtatttccaatgtttttaaagtaaaattgcaaaagcaaaaaatatcccctctcttgctgttacttgctaggtttttcccattaagaaatttacatcatgtttacccaagttaaattcaccttctctaggtgtacagcatgatgagttttgacagattatgcagttgttgtaactatcagcgtacttaagatataaaatatttccatcttatcaagtaaattctcttttgctcctttcccctataccaagcccttggcaatcactgatttgttcctatagttttatttttcccataatgtcatataaatggaatcatattgtatgttgccctttgagtttgccgtttgcttagcatgatgcttttgtaattatccatgattttgcatttatcagtagttcatttccttttattgctgagtgatcctcctttcccaggttggagtgcagtggcacaatcatggctcactgcagccttgaccttttaagtatgtctgtgattcattttgagttgatgttttgtatgttgtgtggaacacacaaagttgtgggttttgttattgcttaaatattatatatccaattttttcagtaccatttgttaataagactatcctttttccactacatttctttattatttatttatttattttgagacgagatctcaccatattgcccaggctggtctcaaacacccatgctcaaagccgtcctcccaactaagtctttcaagtagctaggactataggtgaatgccaccttgcctggcttatttgatttttattgaaaatcagctgttcatatatgtgtgagtctgtttctgggctttccattctgtcccattaatttatatttctgtctttatgccaacaccacactatggtgattactgtagtttatagtaaaccataaaatcaggtagtcgtgagtcctattttgctttttaaaaattgttttggctttctctttatttaatattaaaaaaattggatctcaggccgggcgtggtggctcatgcctgtaatcccagcactttgggaggctgaggcaggcggatcagaaggtcaggagtttgagaccagcctggccaacatggtgaaaccccgtctctactaaaaaaacacaaaaattagccaggcatggtgttgtgcgcctgtaatcccagctactcgggagggtgaggcaggagaattccttgaacccgggaggcagaggttgcagtgagctgagatcatgccactgcactccagcctgggcggcagagcaagatccatctcaaaaaaaaaaattggatctcaatgaactacaatgttttgttctaaattagaaagcatgctgggattttgagattgcattgtttacataatcaatttgggaaatacaatttaacaatattgagacttctagcccatgaacacaaaatatgtctacattatttaggtattttgatttttcttatcagcatatagcagttttttggtgtatgcaatcttgtaacatatattgttacatttatctttggtaaattatatttttgtgctatttaaatttttttattttcagtttttaagtgctcatgttttggatttgaccttgtgt

SEQ ID NO: 95342 - DNA, 207317 bp, Homo sapiens
  misc_feature (1)...(207317): n = A,T,C or G
caaggtgcttttcttttagggttgccaatacagttggaatctaacttaatatttttcatactctgcctatcctttataaaggatttgaggagggcttataagatttaaaaacaataaaatgccaaaagttaaataataaaaagtcaggaccagtgaaaatagaataaagatggtgtgtatgttgggatggtggttgatgatggacacaggtatgcaggctgtatttacatacatagtagtgaatagcagactgggctctgggctgctcagtagcctaggcaaataggggatgttttgtgtagttacacagtgtattacttcgttttcacactgctgataaagacgtacccaaaacggggaacaaaaagagatttaattggacttacagttccatatggctggggagacctcagaatcacggcaggaggtgtaaggcacttcttacagggcagtgggcaagagaaaaacgaggaagcagcaaaagcggaaacccctgataaacccatcagatctcatgagacttattcattattatgagaatagcatgggaaagaccggcccccatgattcaattaccttcccctgggtcccttccacaacacatgggaattctgggagacacaattcaaactgagatttgggtggggacatggccaaaccatatcattctgccctggcccctccaaatctcacgtcatcacatttcaaaaccaattatgccttcccaacagtcccccaaagtcttaactcatttcagcattaacccatatgtccacagtccaaagtctcatccgagacaaggcaagtcccttctgcctatgagcctgtaaaatcaaaagtaagctagttacttcccagatacaatgggagtacaggtattgggtaagtacagctgttccaaatgggagaaattggccaaaacaagggggttacagggcccatgcaagtccaaaatccagtggggcagtcaaatttttaaagctccaaaatgacctcctttgactccaggtctcacatccaggtcatgcttaagcaagaggtgggttcccatggtcttgagcagctctgcccctgtagatttgcagggtacagcctccctcctggctgctttcatgggccggcgttgagtgtctgaggtttttccaggcacacggtgcaagctgtcagtggatctaccactctggggtatggaggacggtggccctcttctcgcagctccactaggcagtgccccagtagggactctgtgtgggggctccaaccccacatttcccttctgcactgccctggcagaggttctccatgagggccctgccccggtggcaaacttttgcctgggcatccaggcgtttctatacatcttctgcaatctaggtagaggttcccaaatttccattcttgacttctgtgcacccgcaggctcaacaccatgtgaagctaccatggcttggggctttcaccctctgaagccacagcactagctctgcattggcccctttcagccacggctggagcagctgggacacagggtaccaagtccctaggctgcacacagcacagggcccctgcacctggcccacaaaaccactttttcctcctgggcctccaggcctgccatgagagaggctgccatgaaggtctccgacattgcctggagacattttcccccatggtcttcaggattaacattaggctccttgctacttttgaaaatttctgcagccagcttgaatttctcctaaaaaaatgggtctttcttttctactgcattgtcaggctgcaaattttctgaacttttatgctctgttccgcttttaaaatggaatgcttttaagagcacccaagtcacttcttgaattctttgctgcttagaaatttcttacaccagataccctaaatcatctctttcaagttcaaagttccacaaatctctagggcaggggcaaaatgcctctagtacctttgctaaaacataagaggagtcacctttctccagttcccaacaagttcttcatctccatctgagaccacctcagcctggatttcgttgtccatatcactatccgcattttgttcaaagccattcaacaagtctctaggatgttccaaactttcccacattttcctggcttcttctgagccctccaaactgttccagcctctgcctgttgcccagttccaaagtcgcttccacatttttgggtatctcttcagcagcaccccactctactggtactaatttatggtaccaagttcattttcacgctgctgataaagacatactcgaaactgggaacaaaaataggtttaattggatttacagttccacatggctatgaggcctcagaatcatggcgggaggcataaggcacttcttacatggtggcagcaagagaaaaatcagaaagaagcaaaagcagaaacccctgataaaccccatcagatctcgtgaacttactcactatcacgagaatagcatgggaaagattggcccccatgattcaattacctccccctggatccctcccacaacatgtgggcattctgggagataaaattcaacttgaggtttgggtggggtcacggccaaaccatatcacatagttttcactgcccacatgaaaacatacaaattcatcagaaaagtaaattttgctttttttagatacagggtctcactctgtcacccaggctgaagtgcagtggtgcaatcatagcaatcactgcagccccaaactccttggctcaagcgatcctcctgcctcagactcctgagaagctggaactacaggtgcatgccaccacacccagctaattaaaaaaatgttttttgtagaaatagggttttgctatgttgcccaggctggtctcaaactcttggcctcaagtaatcctcctgccttggccttccaaagcattgagattacaggcatgagctgctgcacctggccagaagtaaatattttattgatatttagttttgacataaagttctcatgtgggatttcctattgtgaacaaatcctcatttgttcctattgtgaacaaatctcatgtgggatttcctactgtgtacttgaagaggtatttgactctatttgaaatcccacatgagcactttatttcaaagctgaaataattggtctaaaataatttggtctttatattctttatacacctttatactcttaaaaattttactgaggatacaatagagcttttgtttacatcagagtttctcatccttgacactactgacattttggaccaaataattatttgttgcggaggttgtcctatgtattatatttagtagcatctttggtcttgacccacttagatgccagtagcaccctcccaatcaaaattatcagttgggcatggtggctcatgcctgtaatcccaacattttgggaggctgaggtgggaggattgcttgagcccaggagttcaaggctgtagtaagctatgatcatgccactgcactccagcctgggcaacagagcaagactcttatctctaaaaaaaaaattaaaaaaaaaaagccctccagatattgccaaatgccaaatgtcttgcgaagggcaaaaatcacccctggttgagaaccagtggtttacactgcttatatctaccaatatttagcatattagaaatgaaaactaaagaactttaaactttttatgaattcatttgaaaataaaaattctttcataacacattaacatatttttattaaaaaactatcttttccaaaccaaaaaaagaaatttagcaagaagggtgccaatgatttacactttttgcaaatctttttaatgtctggcttaacgtgaaaccagatagtggctcctcctttctgtttctgcattcaatctagtgatatgttgtttttgttgaagtatatgaagaaaattcaggctaacttagacatgtagtaggaaaagggagtatattttaatatatattgatcttatgtttaaaatatatttaacttttcagctagttacagatattcttctctgatgctagaccacatttgacaagttatgcagtttcttaatgtcagttgcaatacagactctgaaaccctatcaatgaccttttcacactgttaattaaaatccactatcacttagttttatccgctatcacttttgcacttatcaacatagtaaaataggcaaatattacattaatgttattataaaaacagatttgttgaggatccattgaagggccttgggacctgcatggtccatggagcacaatttgagaaccactgccttaaaggatgaacagagtctgacaaaagtggtaagatttatcatttatttaacatttggaatatatgaattcataaaagcaacactacagaggacagtttgctttctcaggacaatctttcaaaagcttatttaaaatgcagctgacccatataatgtaaaggtttttctggcaattccttcaaataatttaggtgggaaaattcatgtgacaagcttttcaaactgaactattaaacatttaacttaaaagctgcataataactaaagttaaacctgtcctttaagtctggttagtgagtttatttaaacattataatgtaaagcactgaggaatattacgtatgacagggaagaaccaaaaggctctgataacagactttctcattcaaaatgtttaaagtaatgattacagaatttgaagtagagtggacaaaaacgaagaagaaatgcctgaacttttgaaagaattaggtatatactgctattcaggaagctatggtgttaattataaattttcagcctgaacaaaaatatgtaggtggtaaaaaaactaggtaggtagaatatactaggccttctgttttattagtggagggcaaggcatttaaaatacagtagtactacaacaacaaaggtggaaaaaagcctgggagttttttcaccaaaatgttaacagtggctatctccggatggtagcattcctggggttttttccttttacttatctattttctaatttttctagaagaaacagcatatacacgtaatacaaataaaataatattttatgtaacttcttacatcataaaaattaaagtaacagattatcaaaaagcagaggattcaacataagctttatatttaagtgacgtgttaacaatggcagttttggtgagtttaagagtagaaactaagatgagaaggaagatccggtttcttctttaccgaaaagagacatgatagattggaaaatgtctcgtggctcaatcgtaaagaaaaataaggaatgaatatgaataatttatgacagactaactggagtgtgaaagggaaaaaaaaagctgaagcagggaagggaactcgacccctcggccaacagtgaagcagaagaaaacgcggtaaattgagtctttaagacctagtctattccagtctatatagaagacccccaagaaaaagaaagactgctcattggcctgagaaattaccttagattcatgacaaggaaggccatttgcccgcaaaatttagctacactggacgggcaagtacccctacagaagagaaaacgtctgtgagcccacacgaccggctgctcacctcaacaacttgcacaggcaccagctcctttcgccggccgccatcttccgccgacccccgaactcaggaaacgcttcactttccttttccctattggctcctgagaaagcaagccgtgctcgccccgcccccacgggccaattgtgcgttactattggttactggtagccgcttcccacggccttccagccaatagaatatgccgaggcgtagactagtgttcggcgtggcgcacacggctcccgcccccgtgggcgggacagcagtggggggttgggctgaggagggcgtggcctgtgattgacagccgtcgctccctccctcggccacctcccccactagaagcccccgcctgggcgcctgcgcccccgttcccggcccaaagcccgccgcccgttggaggccattggctggcctttgcgcacagcggatcgattttccaggtgcggagttcactcttgccgcggttgcttcctttgggacccacggcgtccggcagccaggcgcagagtccgaggagggggcagcgcagagcggacccgacgcggcgccgccgggcaccttccccgcaggcggtgggtgagccctgggagctgagtctgcggcccggctctgcgcagctcacctgccctcccgctcccgcacacgcgtgagatcccagtacagtgtcggagcgcaccagcgcgaggtggccgagaccgcggaggaggacaggcctccgccctgcggcgccggcacggcagaggacattgtggcactggcacggcagagaacactgtggcaccggcggggccggcagttccagggtgggcactcccagccacctggggagtgggcgagggtccgaggcccactctcccctcacgctctcatccccgtgcccccaggtcgggaggacggcggcgcgcaactttgaatcatccgtgtgaagagggctgcggcttccccggtcccaaatgaaggggcggttcccggacccctgtttgctttagagccgagccgcgccgatgccctcacactctgcgcctcctctcccgggactttaacaccmcgctctcctccaccgaccaggtgaccttttgctctgagccagatcagagaagaattcggtgtccgtgcgggacgatgcctgagcaggagagacagatcacagccagagaaggggccagtcggaaagtgagttttgttcccccgcgtccgcgcagcgtgctcactcccaccaggaggattttcctccccgcgttcggcgcttactcgcccccagggggtgcgcagggaaggccgarccagaccccagctccagsgatgtcttggcgtgggagaaaaggaccctttagaaaaagtgtgccgtcaactgatgtttgggagcaatggaaaaccccgcacctcaaarttcatctttatgcttttaaggggtctgatgctggagagataaagtgagcgtcgagttgctgtgctagagccctaatggctcaaaacgatgaagttagttacctggagaagttactcagagcctggtgcttggaccagatatggtatatcgaggtcctggaacttttataactgttttaaattcattttaattgtacaagtaatacattaagacagtcttttaaaaatggaaacagcacagaaatattttgcacaaaaagcagatctatttttcagtctttttctattcacgtacatatgtcttcattcggcaaatatttattgagaactttctatgtttcaggcacacagtgttgagttgatacagtggttaacaagacatgtatctatatgtaatatgcacacattcagagaaatctttaggtttcatttgtatgaggtgttaaaatttttgttttacctaaatgagatcactgtatgtgcattctcttttttcagtttaacgatatatcttagagattgtttcactaactgtctaattcagtgcaacctctgcacagtttggacgcatcatagtttattcatggtttcctagtggtggacgttctgtttgctactttttttctctctctcttgcaagtgaacatctttgtacatgatttttaatgctgacactatttctttaggatagatacttaggcctggattgctggacagaacagtaggctgtttcttttccacagatttctgaaactaattcactgacgttgctgggtgccctttagtagtgaattcatctaggctccggtgatacagaaatgaaaactaatggattagtggacagacagagagaggctggttagtaggtggtttgtagggtatgatgactatgcatttgataggagtatgaagaaatgttgggaggggtggcttgtacagaggagatttcaacttcctacagtrtccccacctagagaaagaaatcattatccttccaaatcaagctcaagacctgccacctccttgaaacgttctgtaactgctcctgcccatgttgacctgtcttctggaatcctctgataatagcgttgaccagcgttattgagcttactgtgtgctgggcattgtgttaggcactcatatccctctatgtgcactctcgcgtttaatcctcacaaaaaccctttgatgtaggtattatatcttgttatcaacatttattcaacaaatttttttgtgtgtactatgtgctcaaacacatagtactcaaagttttagacactggggatttaggtaggaccgagaccttgccctcatgaatttacatcctagttggagataggaaaaaaaaagggataaacaaatgtatagcgtaggagttaagggaaaacttttgtgccccgtgaagcgtcactgaaaaatcaactgacaaatggcagattaataggagagaaggcatacacatttactaacgtgccgtgagagtcttacaacataagatctcaaaggaaggcaaggtggttgccacaattatactatcctgaggttacagaaagtgtgggggctctaagcttggccaaaaacaggttatggttgtaaatcaggttataggagggagagaagaggagacctggctagcaaaggtggtcttatgtagatgaaacctcacaggtagcagccctcagggagaagaaatgtttcagaccttgaaggtgccaaattcagctaatctcacccagatccagacaaggaagggccctctgagaaaaactggctgcgtcaatggaggttctcaacagatgctcatctccctcacagtaggactacttttgtctgtaggccctctgaacggccatctcaaaatatttccaataagtctgttttgaggtgaaatgttttagtttccttcaatagctttatttcaggtactagtaagtactatgaagaaaataaagcagtttgggtccaggagttcaagaccagcctggcagcatatcaagacatcgtttatacaaaaaaaaaagaaaaattagctgggcataatggtgtgtgcctgtcgaaccagctactcgggaggctgaggcaggaggatggcttgagcccaggagtttgaggctacagtgagttgtgatcccaccactgcacttcagcctgagtgataaagcaagatcctgtctcaaaaaaaaagaaaagaaaagaaagcagaataagggaataagatagggattgacatgggtggagaggaagatgctgttttaagtaggtggtcagggaatgatttctcttggaaggtaggatttgagtagagacctgaatgattcagatttcagagaagtagcctaggttgagaaaccataaagtgtgagagtcctacggcagtcatgtgataagaagaaatatatacttggtcttgtcccaagttcctgacatagagyttcttaaaccgttgtaatttcctgagagatggtgataagagcatcttttgttattcataacaagtctctttcacccctacctgagtttctgttaatgagagggctcttgataggcccctagatagcttcaggatggagactgattgccagaagaaccaaccatgtgattaggggattcgaatgttcagccccgtgctccaacctctggagattgtgccaatcaccagtggacaatgatctaatcagtgatgccggcagaatagagctttctttaaatttttatttatttagttttttgagaggtagtctcactctgttgctaggctggagtgcagtggcgggatctcggttcactgcaacctgtgcctcccgggctcaagtgattctccggcctcagcctcctgagtagctgggattacaggcgcacgccaccacacccagctaatttttgtatttttagtggagacggggtttcaccatgttggtcagggtcatctctatctcttgatctcgtgatccgcccacctcggcctcccaaagtgttggaattacaggcgtgaggccactgtgcctggcctttttttttttaaccaatgcagtggatcacaaatagagctttcttaaaaaccctaaatgatgggttttggagagcttcctgttagtgaacacatcaaggtgctgggaaggtggttcctggaaaggatatggaagctcctggaaacctccattcccatattttgccctatcttttccatgtggtggtttcttagctgtattttgtataataaactggtgatattaaataaagtgctttcctaagttctgcgagctgttctagcaaattacccaacctgaggaggtaattgtaggaacctcctgactttacagttggtcaggagtacagatggcccagacccagcgactggcatgtgaagtgtgggcattcttgtggtcttgtgggcctgagcccttacctgtggggtccgtgctaactccagatggttggtgtcggaattgaattgaattgtagggcacccagttagtgtctggagagagagcattggttggtgtgaagaaaaaccccacacatttggtgtcagaagtgtcgtgagtggaaacagtacagaagacatgatgttagagtttggggaacaataggaaagccagagtggctgtggcagagggaaggagtgggagtgatagaacaggagatcagagttcatcattgctttacagatggggaaactgagccagacacaagttaagtaacttgcccgatgtaccttgcttataagaggcagatctaggattgagtcctagccaggcctgcctgactttctcagcgattttttattgtcaaaacttacttgacacttggtcataccacctggtatgattatttaatgaatatagcttttatttgcaactctgtgcttcttgaaatgggaaccgggtttttaccgtttaaaaaactatttcccacatgtaggtgcaccacagttgttcttgaatgaatggattctcgacatgatttctccacattgttttctcttcagaggcctctctgtggggcagcagtgacctggtcattcagccttcagtccacaaacattatggagcactttctgtttgcctggtactgggccaagcagggggatgcatagatgaagagaggtcagcccctgtgctggatgcatgctgggacagagctgtctacatggtacagcacccacagaaggggcagaaaaattccttcagtgggaggtggtgctcgagtgggtctttcaggaagagcaggcattgattgggcacacaggagcatggagagaagggcattgaaggcagagaccagcatgtataaaggtccagaggactggaaatggaaagaggcatttaggggactgtgaggggcgtggcaaggctggaagagtggaaggctggaaggtctgtggaagaccctgtttatcaggctaggagtttggactttaccctacaggaaaacagcgtaagtcactcctgcaaggcagagggtgaactgggcagggagctgcgggagaccagctagagactgttggaaatgatcgtccccatccagaccaaaggtggctgaaaagcctgaaaaagaactgtaagttgggtcttctacccttattctttatggaattgtcttctcagtagagaaactaggctatccaaactcaactgtcctgagtattagaggccagtggtcgttttagcagcaacagagtgcagttggtacctacggagcagggtaataaactaagcaagtgacagagatggatttaagtgcttctttacgtgacacacattttcttctcaatgggagggatggagatggcccagtaacatgaacactgctcactgatgccatagcatagatatcgaggaagtatccgtgttcagtgctgagagccccgaacaragatttacccacgaatttattaacagcaagccagtcattagcattgtttctatagatattcattaactaaaagtatcccttatgggaaaggaagggatgggccgaaataaaggggtgggtctggctagttatctgcagcaggaacatgcccttaaggcacagatcgctcatgctgtttgtggtttaaggacacctttaagcagttttctgccctgggcgggccaggtgttccttgccttcattccagtaaacccacaaccttccagcgtgggcgttacggccatcatgaacatttcacagtgctgcagagattttgtttatggtcagttttggggccagtttatggctagattttggggggcctgttcccaacagaggcacaaagggactaagatagaaattggtaccaagaagtggagtgttggtataacagatccctgaaaatgcagagttggctttggaactgggtaaagggtagaggctggaagagtttggaggtacatgctggaaaaagcctagatagtgataaactaagcattaaggattattttggtgagggcttagaagaacagagctgtagacagaacctgaatcttcttagagattacttaagtggtcatgatcagaatgttggtggaagtatggacagcaaaggtcattttgatgaggtcttagacagaaatgaggaatattttattgggaactagagaaaagcccattctgtttttatttataaaatggcagagaacgtgggtcagttgtgtctgtgccctaatgctttgtggaggatagatgatgaactagatgaagagtgatgaactaggatatttggtggaagaaatatctaagcagagtgtgcagggtgctgcatggcttctcttgattgcttataagaaaatgcaagaagaaaacaaattaaagacagaaattataatcaaaagggaagcagaacttagaaagatttggaaaattttcagcctggctagatcataaagaataaaaaggctgctgggaagaatgaccttaaagggatttgggaggtctttgggactgctcctcctgtcacaggcccagagtgcctggaccatgagggcaggagggagaggaccataccccgccagcaggtctatgggtctagttgcccagggccacctcgagcctctgcttcctgcattctgcggtgctccttggccaccccaggtgcggctcaggtgtggcttgggctgctgctctggaaggtgcaggctataaaccttggtgtccatgtggtgctaactgcagctgagcagagttcaagagctgtggagtgtggctactttcatctagatttccgaggatgtcttggagaacccggggcccaggcagaaaacgtctatggggaagagccaccacagagtgcccccactagggcagtaccatcagtcatgaattgggcagtgccagactacatagttcagggctccatctagggggaatgagggaaagactttgtaagtgttcagggaagcaaaacaaagagaataattgattggttaaagtagaaaggcctagttataagctgtcatgagattggagaaaaaaataaaaataaggaataaaaaagaccctagttagagtttagttggtggttcctgattgatgaagtctctagttagagatagttaatggattgtgattggttaagctaagctttgttttactgtttatattgagttkggtttggtttgcttacataggaacctgaaatgttggagtcatctcagcctaattgcttcctgattaatgatttgttaacacaagttaggatgcaactccatcttcctgatacctcatggcctaaaacagttgttggtgctgcagccgtgtatttcaagttgcacatagctgaaataagggaaaggcaaggataatcctgctctctctttttttttgagacagagtcttgctctgtcagccaggctggagtgcagtggcacgattttggctcactgcaacctccctctgccgggctaaggaaactcttctgcctcagcctcccgagtagctgggtttacaggcatgtgccaccatgcccggctaatttttgtawttttttttagtagagacggggtttcaccatgttggccaggctggtcttgaactcctgacctcaggtaatccgcccccctcggcctcccaaagtgctggattacaggtgtgagccaccgcgcccggccagtcctgctgtcttttagggagcctgcttaggagccctgacaaacaactttgccttatattccattggctagaactttggccagttttcaacatcttaaaatgggaagattttactatgtaaaactccagctatccaccttctctcggaagctctggtgacaccaggccttttgacaacagttggctggagctgaggaacagctgcctgctccaggtggggcatgagctcctcctgtggccgcaagccccgcatggcctgttcygctcatttaagtcactgcctacttgtgacagtacaggcaaacctttgctttattgcccttttgcagatgctgtattttttttttttaccagttgaaggtttgtggcaaccctgcactgagcaagtctactgacgccatttgtgtaacagcatatactcacttcatgccacattttggtaattctcacaatatttcagatttttcattattattrtatctgttacggtgatctgtgatcagtgctctttgatgctactgttataatcatcttggggcccgtgtaagatggcaaagttaatctataaatgtgtacattctgactgctccactgactccagcagttcatgtctctgtctctccctccctctcaggtctccctatttcctaagacacaacaatattaaaattaggccaattaataaccctacaatggattctaagtgttcaagtgaaagagtccactccctttaaatcaaaagctagaaatgattaagcttagtgaggaaggcttgtcaaaagctgagataggctgaaacctaggcctctggtgccaaacagttagcaaagtttttaatgcaaaggtaaagtccttgaaggaaagtaagtactactctagtgaacagataaatgataagaaagcaaaacagccttactgctgatatggagaaagttttagtgatttgaacataagatcaaaccagacacaacattctcttaagccaaagcctagtccagagcaaggtcctcagcattgaagcaaggccttccactagcagaaagaccatgacttactgacagctcagatgattgttagcatttttttgccataacatattttaaaattaaagtatatgtatttttttaggcataatgctattgcacacttgatagactatagtgtaaacataacttttatatgcacaaggaaaccaaaacctttgtgtcactcacgttattaggatatttgctttattgtgatgatctagaaccaaacccatggatatctctgagagatgcctgtatttgagcttagatccctggcttgaagggataaatgaatgagtaagtgagggaggagggagccagcttttgcatgaggcttgctcccttcccctcccctcccctcccctctcccctcgcctccctgcccctcttgtttcacaggttctctgttgctcaggttggaatgcagtggcaggctcactgcagcctggatctcctcgggctcaggtgatcctatcacctcagcttctcgagtagttgggactgcaggcatgtgccaccatgcccagataattaaaaacatttttttttttagagacacggtttcaccatgttgcccaagctggttttaaactcctgggctcaagtgatcctcccatttcagcctctcaaagtgctaggattacaggtgttagcccccacgcctggccctgaatgttgagtattgtcggaaagtttagcagtccttttacagcaagcacatttgtaagttgtttttgcttggcattctttgtcattcatttaacaaatgcttattgagaaattctttaagtgtcaagcactgttttagaccttggaataaagcagtgactgaacaaaatagatgtgaagaggctgtgtgtggtggttcagacctctaatcccagcactttgggaggccaaagtaggcggattgcttgagctcaggagttcgaggccagcctggataacatagtgaaacccctgtctctactaaataaataaataaataagcaagctgggcatcgtggcacgcacctgtagccccaggtacttgggaggctgagatgggaggatcacttgagccagggaggcggaggctgcagtgagccaagatcatgccactgcactccagcttgggtgacagagtgaaaccctgtccttaaaaaaaaaaatgtgaaggattcctgcacttgtgaaacttatatcctaactggggagatagttgttaaaaagagtaagtaaaagatgtattattgcatttggtggtgattgagaattctcaagaaaaataagacagggaaggatgatagggaattgggagtgtatgaaatttagatgggatcatttgggggaaatcattgagaagttgacgtttgagcaaagatttcatggaggtgaggaagtgagccctttggatatgggatgttggagggaggtatttctaagctagtagacagttccggaggcaggtgtatgctttgcttacctaaggaacagcaagatcagaatgactgtttcagaatgagtaaggggccaggagtgtgaggataagttggaaggtaatgggagggctgcaactgtatagtcttacaggtcatcattgtaaggattttaggttttattaagcacatgggaaccccctagaggcattttagaggaatgacatcttgtgacttcctcttataggtattctgacttttgtgttgagaatagactttaggggctaagagcagaagccaggaggtcgcttaggagattctaagcaatagtgcaggtgagatgagctggtggcttggaccagggttcttgtggatgtgttgaagtcattagatgctggatgcattttgttggtggaactaacaggatttgctaaacatttacatgtgggtttgaaagaagatgattcttttttactttttaattttaaattcattttaattattatttttgagacagaatctcacactgtcacccagggtagagtgcagtggtccaatcacagatcgctgcaacctccacctcctgggctcaagtgatcctcccacctcagccttctgagtagctgggactacaagtgtgcaccaccatgcccagctaattttttattttttgaagagatggtgtctcactatgttgcccaagctgttctgaaacatctgggctcaagtggtcctcctgccttggccttccaaagtgctgggattacaggcatgagcccctgcacctggatgagattattcttatcaaagagggatccaggattttttcctgggcaagtggagggaaggagttgtatttactaaggtggggaagactgtgggagcagcaggggaagggcagaatgttgagagctctgttgtagacaagttaagtttgcgatgcatatgaaacaccgaggagatggtgatgaggcatttgggtctgtaagtatagagttgggaattgtaggctataggtggtgatatagtctgaatgttaatgtccctgccaaattcatatgttggaacctaacccccaaggtggtggtattaggaggtgaggactttaggaggtgatttggccatgagggctctgccttctcgaatgggattagtgcccttataaaagaggcttgagggagccactttgctcttctgccatttgaggatgcagcagcaaggcaccatctgtgaagcaaagaacagccttcaccggatactgaatctgctggctccttgatctgggacttcccaggttcctgaactgtgagcaataaatttttgttgcttataaattacccagtctaaggtattttgtgatagcagcctgagtgagctaagaaaggtatacttctcctggcctggatgagtgtacaaggaatgagtagagatggaagaggtccaagggctgagctgggggccactgcagcacttggaggtttggggacttggaggctctggtgaaagactctgagtaggagctgttggtgggaaggataggaggaaaatcaggaggtggggcaacttggaggctgagcttggagacaaggactggtcaccttgggcagtgtgtcactggctgagagtaagtatgggggtgggcactggggacctgaggagccagagaggggataggaccactgtctcggagagcgaagggtgagcggactagggggtagttggactgccaggtggcagcacgggtcctcccgcagttcgtggtgctgaatcagagtgtgggcagccagcctggatgtgcgttctgtcacattcttgttgagctgctagaggacaggcgtgaagccaagtggaactgagagtaaagccgtgttggagttttgcaggaaggtgccagatgatgagggcagccagcgaagtcgaaggtgcatggaatgaactgtgaaatggaaacattggcttttacttttcgataatcccattgtttctctttttggccatcccatctcttcgtaatttagaactatcataatcgtttttcactcaagactgttcagccaagtgcagtttatttaagagcactccttcagtgagcttacttaggtatgtgtgtgtttgtgcctgtctcctgttaataagctgatatgaaagtcctgctgagctagttgtttcagtcttggagatcagcagcgatatggggaggagaagccaagcctctgttaaagcccaccagtccttccctccccygctcccagcacmtagtgtttgaggaattcagactttgaatactgctctttgctactgttcttctctcctaacttgccagtaaacttccaagggcagtatgtgtcttgtgctcctctcctggtcttctgttgtgcatacacttaaatacggctctcaggctgtgaataatctgctttggttaacactcccctctgttctgaaggctgggctgctagagccctgactgttggtggctgtgctgtttgcagtgctcatgttctcttcttgggaacccaacatatgcagctttaatgtcaggctctgccctcctgtcctgtcacaggatccgggactcctctccccatcttgggagggatggcctggggatttcgtctgggaagccctgcccagtgtgagcctctagctggactgagcaggtaatgtttgtgagtgctgaaatattttaaccagatgtccctcctccaaagagccctttgtcctggaggttcatggaaacatgagctgcccatctgcctttgggcccaggcttctcaggttgcaacaagattgtttaggacaccaaagagatatttatttttatacaggaaaaatccacagactgggaaggcgaataggaggtaaagaagatgaattttcttctggaaaatggctcgtgaaatttgtacatatggaagacagaataatctagtgcaaggaaatccttgaagacctagaagaaatatgtgagggactgatagagtttgcccttgtgttgtggtaagggggacaaaaagtaccatgaaattctaggtagaaagcacattctgagcagtatataattsaactcatttatttaaatatggttaaatatacttattcaaatgtaaatatgtaaatatttaactgcttaaatatacttatttaatgtctgatattgttcatcaccatgttaggtctgtgggcagctaagatatgagatccttgtgttccaggatctgaccacgtttcccaaagtgagcacatgcccataggcatcagtaacaagtgtggactgagctgactgcagcctcggtggacagagaagacttgtcctccagcagtgttacaggctgaccacctgctggcaccctgatgttgacattagtgatgctggaattcagataagggagagagctgctagcaggattccacagagaggcaggacttaaaggataagaaggattagatggtgccgggaaggggaggagcagggaagccagggtcaggtgtgaggaaaggggaaggtgctagaaagaggagtttggacttaatactgtagcctaggaaggtggcccatgccttggctgttccacacgtctcttagattctatgggagcaaaggagaagccactgtgtttaccccagacttgccttcttcccaccctccccgctcatcttggtgtactcatcaccatgtgctcaatctgcgaaactggaaatggcattgtcatcctcaggcccccactttttgtcacctgctgtgatccagcagtcactgagttgggaggcctcctcgtttgtttaatcgtattctactattaaattttctgccccttgtaatccctcctctcctgggtcttcattcttgtttctgcccaaactgtttccagatcacaaatatgattctgtgagttctctcctcagaaactcctggtgattctacaccacccacaggacaaagtctagactctgccctttctaacctggccccagcccccttttctggctgtcttctgggtctgagccaccatctagaaatggtttgaatggtgaagtatttcaatttcatggagctaacagaatagattatttaaaagcatgtgggacatatgatcccaacatattttccttattagctattcataggcacagcacagaagaagcatttatatttataatgatctcatgtcaccaaggaaaagttaaaatatgttcaataactcactttaaaaggcagcggaaaaatagatgtcacttatggggaatattttcacccagaatgacaaaatttttaaaaaatctaatgctcaaagcgatgagcttcagttacctggaaaatctacttctgatgccccataaatgaaatgtcaggtggtcagcagggcatgtgaggctcctgatagatcctttcaggaagggagagacatagataagcaagacctgaagaatcactagaaagcaatcacagatgcacctgatgtatttacatgggctcccatagaggcagctgcacagccccacagtgctggcctctggcagggaggctagggttggggctcaaggcctttagcatcaaatatacctttcctttgatgaaaatgggtttgaatgacatttcttggaaattgaggcaggttctttgttttttggctgagcacttaggagataagaaacaaacccagacacattttggaggagttggttgctcagcgtgtgctttagaagtgatagcaaccgccacaagtgtggtaagaagcagcaggataaagcaggcacgaaggggctttggtgcatggaccagccttggtgttgcctttcctcaaagagaacagatctctcagtcaggagttcttggggcagggatgacagtgttaatgggggaggaagcgtcactgtgggcaacctatgaggaggcagccttcagtgaccttgggcatgtgttctgagtgccctcaytgggtgcacaccttagtgaccccctgctggtacattctgctgtgaagaataacacggagagacagagtgatcattttaccctgaattcaattccacactcacttgcagcaggaggtatggctggaattagtggctgtggtggagctgttcctgccatgggggatgtggtctctccttctggtccccgagtggtggggtgggaatggaggcagcgctgcccgacagagcaggctgctgctggaattaccacagtgtcgtgtgtctcctcctattaatccccatgtggaacagcaggtagcctgagaagcctgaattgtgccttagttcctggccgtggtgctgcttaaacagatgagccttgttagccagtttgtgcagtcagttcttactgaagtcaagcctttggtccaagggaaaacaaagctacaggaaacatggaactttcttacaccttcttgaaaatacaagtcatgttgcctaggaaatacttctctcaccaagtattctgcacgctgccaacattggagctgtggaagaggcagctgaagcaattccaagaaagtgctagcagtttggtaataaaaggaagtggcatatctctcctgcctctagactgggtttctaggagtgcacatggccaaaaggaaactgctgcactctggcaagtgattacatgttgtgctcatggacaccttggcygggtgtccagtgtgcactgggtgagggtgtgcatgggctgtgtgcaaagatctgcagtgctgcacrcagtgtgttgagtgagagggtgccaagtgctgggacggttgtagataaacaaaagcaaataggtgcagtactgtgcagcctgcccaagttcccaaagcttgctgccaggctgaagactgctggcagcctctcctgggctgggtcaggagtagaagggtgtcttccccttgctaattaggaggacacttctaaagcatttctctctaacacaaccaaatagtctgctgaaggtgaactgctttagtgaggagggaagccgtggccgtgaactcagcgatagagaaagccaggggtgatgtgccccagagccccgagcagtccttcctggcaactctgagtgaccaacatgtgaccctgctgtctgtccacaagcagtggtcctttaggaagagccctggggttaggcattcagccaggccagtgtctactgtggaggaaggcactccaccgtcagaggaaggagaatttccacagagagttttgaatggaacctgggaaatgagttccagtcaggtcagtgcaattgcagatgggctaaaaagcctggaagggcctggacccattttaaagatggaggtttctctccatgtctcttgtgtgggatattggggagaggtctggggagcggaatgagagtgtgaatgtagcacctggcaggagtcaagctgattaattacaccatggcttggaagtttgggttttgttgctttttattttcagaatattttgtaagmctctatgaagcaaaagttttccacaatgcaagtcaaacaaaaatgaatccttccttctttttactaatatgttttatagtgtataccttattttgttaatctgtacattttaactaaacattttgaaaatgctgcaaaatgaagttccttttcttaagcaagttgaagttttgttactccaaaggttaggtcatgtccaaaagtaagacagtataacgttttgtaaaaatggtgccttttagcagcatttctgagcagactggtggtgtgtacagggtcttcttcattgacctagtcagacgaaaataaaaaacaacttttgaaggcatttactagttagatacaaaggaaggtttcataagtactttgcttcctctaagacttatttttgtgctgttcattggttaaagtcccaaagactaaaggaaattttgtgaaaagaactttcaaatgtgctatgcaagagatttacatacgttgaaatcacagggtacttggatattgaagacagaaactccttttgagtatttaaagattctgcattttgctatcaggtttttaaccaaggatataactatgctcggaggtatttattttaaaatattaaaagtgttttttggtgttctgaatttgtggaaatttccaagagactcctttaaagttttttcctaggcaaatttaaaaatatgaaatgtagaattattcagtggctgcccgtttgggtagcttctacacagaggttcgagtggttttaggggagggaagtgaggtgatagatacaattttaattactttgttttctaaagtagttttataaatttcattttatgtctctttaaactgtattaagccagtagctaaactaatgtgttaaatcacttagaattttaaagagtgacagagcgtttaatcttttaatcagccttttcatatgttgccggtttatacaatatacggtgaacatttatacttttarccatgtgtttaaaatagtgaaatactaaatatgttggggtgaaaatgcttgaggcatttttaaaaaatgtccaaactgttactttacaatttccagcctatatctgaagttttgagatatgacgtgtgctggtgatttttaaggccagcaccaatctgtkactagtggggcgacctgaagctgactaggggagcctcttcagaaaggagggctggggaagaggccttggtggaggggatctgagtgcagacccaacacaagttgtgggacctgggcaggtgagtcttggacactctcctttagattcttcattgcaaagtggatgataaatcctgcctcatatgattgtgaaagcactttgtagattatcatgcaaatgcaaaatagtgttacttctgccaaaattatgctttttcagaagaatttccaactctgagatatgtttgatgtgttgtctgaaggtctggacaggactgtgataacccagtaatctatctgagcacagttgcaactctatttttcctttgtttgtttttttctaagttttttattttgggacatggtctcttgctgatgccgaggctggagtgcagtggcatgatcatggctcatagcaccctcgaccttccgggttcaaatgattttcctgcctcagccccctgagtagctgccaccacaggtgcatgccaccatttccagtttctctttatttgtagagatgtggtctccctatgttgcccaggctggtctcaaactcctgggctcaaatgatcctcctgcctccccctcccaaagtgctgggattatagatgtgagccaccgtgcctggcagctctattttttctaaagctctgattataaaagtaacatatactctatataaaaaacaaatttacgatggaacgaggagaatacaaaaaagtataaagaaaaagcagtcgttttcccaacaaatatgaatgtgtatacgtgtatgtatgtttatgtttacataatgtatatttttaaaataaatatgggatcaaattatacatactatcttatactttgcatttcttactgaatattttgtggacatttctgtatgtcaatatatatgtaaatctgtattatctttttttttttttttttttttttgagacagagtcttgctctgtcatccaggctatagagtgcagtggcgtaatcttggctcactgcaacctccatctcctgggttcaagtgattctcctgcctcagcctccagagtagctgggactacaggcacctgacaccatacctagctaatttttgtgtttttagtagagatgaggtttccccatgttgcccaggctggtctcaaactcctgagctcaagtgatccactcacctcagccatccaaagtgctgggattacaggcgtgaaccaccctgcctggcctatataatcattttttattgcagttccacttttaaatttaggattaatttttagaaagaatttagttatccttaaatagaagaaatttgcagtagctggtttatgattataaaaaccaacccaaaagttaatttcaattgtgactcaaagtctgttataaatcagctttgcaccttgagaactaacatttagcacttggtatatggtaggaaccttactcttgtcacttaatcattttaacaactttagtaggtatcatcagtccacctttaacagacgagaaagctgagtgagagcttaggtttcctgaaaaatttaatcccaggtccgtctgatgacaagtccttgcttttccattggaacactgaagtattatttaatacactgggcaaaatagagttttgaaagtattggaaaactgctaattcatagtgaatggaaagttagcttttaggtggcacgttgttcagaaaggccgctgctatgaataaaacatttaaaaattgctgtttatgcctagcagatttgtttgcttatattttacatttctttttttttttttttacatttcttacacaatgcagagtacattctgtacaatgtagaatgaaatcatgactttggaaaacctgtttctttgattcttctatgtttcagacaggcagagaggggaaaaagatctgttttaaaaggcataactggtaamagctcagagtctggagggcacatttccgcccgctcctctcccacattagaaagtttctgtttgctgatgtgagcagggctaagcctggtgaggttcctaggaattaattatgaaaagggggaaatagggaggagggccttccccgcaaatcccctccataagagcacgctaaccagagtagaagtcaggggctcygtgctttggcccaggtgttcctatcaaaggttccacagacaacctttcaggcccagaatggtgagctggagaggaatgggtgcctgccactgaggctctcccttctctagcccctccttaactctctcctctacttgtcttggcaggtgggaaatggttggaggttactagaaagttgttccagctgtatacagaattaccctttgtttccagaaacaactgcttaagcctccttactcatgactctgttgacttctttggccaagcttggctgctgtttttttttgtttgtttttttcccgacagggtctcaccgtgtcacccaggttggagtgcagttgccgcagatcttggctcactgcaacctccacctcccgagctcaagggatcctcccatcagtgatcctcccaccctagcctcctgagtagctgggactacaggtgcacactggctgctgttttaatttgtcatcgtatcctgtatctgacagagttcagtccatggtatcaagctattgactgagtgaacaaatgaatgaactagaagtagatttatactgcagcagggaggattgatgttagacacattgaactgatggtgactataaggttgttacgtggtggacttagcatttttagagaccagaatatggaattttgttcttaggtaagtggtggttaggttcttttttttttttctttaaatatgagacagagtctcgctccgtcgccaggctggagtgcagtggcgcgatcttggctcagtgaaagctccgcctcccaggctcaagcgattcttctgcctcaggctcctgaatatctgggactacaggtgcatgccaccacgcccaactaatatttgtatttttagtagagatgaggtttcaccgtgttgtccaggatcgtctcaatctcttgaccccgtgatccacctgcctcggcctcccgaagtgctgggattacaggtatgagccattgtgccagggtgggttcggttttatttttgcctagttgaaatcaggatgacttggctggcacagatatatcccttctaaaataaaggaaaaacaataaatgaagtggtgtgatctagtcatttaaagaagttatctgtcattatggaatcatcagcattcgctattattttatttgcttttgtagagaccatttgaagtggattcttgaatttagtttttcctaaaagtagtatctgctggatacaaacattagtagcaaagtatagaagtgtagttcttttcctctcttagataaagaggactgtcttaatacagttctgcaacttttttttctttttaacatcatggaagtctttccacgtcaatacatgtaaattcacctatttttaaaaaaycatgacatagatttctgttcgatggactatattttatgtagacagttctctatagaagaatattgagatggtttccagtttttcactatttgaatgtagcaatgaacattaatatgtaattgtatatctatatggtaaaattcccagaagtggaatttctaggacaaaagcagyaatactttttgaagagcaattaggcaaaatttagytttctacaaacagtggttaagaactgtttttccttatactcttgtttactgtatcatcagactttttaaattaataaaataacatttattttattaatgttataataaatgttattttaattttaaaraagatttattagatacttaatatttctttttctaaggattattttaagtagcatttcccatcatgcatttatagagtagtgctaatttataaacattaggtttgtacatgtcttaaaggaatacatttgttttatgtgtcatacctataattctaggcagaaaccaatactccttggagtacagagtaaaaaaaataaataaataaaacctctttgttgggaaaggcttgaaatacagagtgttattagagaagattctgaagcaggaaaatgctgttaattgataaaagttagatggaataattgttacaatagacataaattaaaagcagcacattctctgaaacggttgattataaagctgtgtagcacgagattgtgaatgggttttctaagataatattgtgaagtgctccttggagacgataccctgtcttatastttgtgaatttctaaatttcattttgttgtatattgaaaataacatatttgtatgtacatatgtggtgaggtttgttaattttgtttttaattttactcacttttttttttttaggcaagtgtcagatatgctacattttgtttctcagtaagggttaatattttcccttgctgtggttgagagaagcaaataggcaatgaatagtcatttgcacagaattacccagaaagtttacagtctgtcctcagaagggcagagattgggttaatgcacacatagccctggcacatagtaggccctcctatgtgtttgaatgaatgccttcatttttaaagtagataaaatttaaataattgtcagtggaaagtctttttggaccattgtgaaacaggattcaaggccagagtgaagggcttgggggaatatgtacactacttttaataattagtttgccttatcagtaaaatggagaaaactatgtagagtactcgaaccttcctgggtcatgtttgaagatcaaatgaggtgatgtttgtcttcatagtcatttgttttcaaacatgtatgatgttaatctttttttaaaaaattatactttaagttctggggtacatgtgcagaacgtgcaggtttgttacatagatatacacgtgtcatggtggtttgctgcacccatcaaaccgtcatctacattaggtatttctcctaatggtatccctcccctagcccccccacccccgacaggccccagtgtgtgatgttcccctccctgtgtccatgtgttctcattgtttagctcccacttatgagtgagaacatgcactgtttggttttctgttcttgtgttagtttgctgagaatggtggtttccagcttcatccatgtccctgcaaagaacatgaactcatccttttttatggctccatagtattccatggtgtatatgtgccacattttctttatccagtctatcattaatgggcatttgggttggttccaagtctttgctattgtgagtagtgccacaataaacatatgtgtgcgtgtgtctttatcgtagaatgatttacaatcctctgggtatatacccagtaatgggattgctgggtcaaatggtatttctggttctagatccttgaggaatcgccacactgtcttccacaatggttgaactaatttacactcccaccaatagtgtaaaagtgttcctatttctctacatcctctccagcatctattgtttcctgactttttaatgattgccatcctaactggcatgagatggtatctcattgtggttttgatttgcatgtctgtaataaccagtgatgatgagctttttttcatgtttgttggctgcataaatgtcttcttttgagaagtgtctgttcataatcttcacccactttttgatggggttgttttttttttcttgtaaatttgtttaagttccttgtagatcctggatattagccctttgtcagatggatagattgcaaaaattttctcccattctgtaggttgcctgttcactctgatgatagtttcttttgctgtgcagaagctctttagtttaattagatcccatttgtcaattttggcttttgttgccattgcttttggtgttttagtcattaagttgttgcccatttctgtgtcctgaatggtactgcctatgttttcttctagggtttttatggttttaggtcttacgtttaagttttaatccatcttgagttaatttttgtgtaaggtgtaaggaaggggtccagtttcagttttctgcatatggctagccagttttcccaagaccatttattaaatagggaatcctttccccattgcttttgtcaggtttgtcaaagatcggatggttgtagatgtgtggtgttrtttctgaggcccatgttctgttccattggtctatatctctgttttggtaccagtaccatgctgttttggttactatagccttgtagtatagtttgaagttaggtagtgtgatgcctccggctttgttctttttgcttaggattgtcttggctatctgggctcttttttggttccgtatgaaatttaaagtagttttttctaattctgtgaagaaagtcagtggtagtttgatggggatagcattgaatctataaattactttgggcagtatggccattttcacgatattgattgttcctatgcatgagcatggaatgtttttccatttgtttgtgtcctctcttatttccttgagcagtggtttgtagttctccttgaagaggtccttcacatcctttgccaaattgtattcctgggtattttattctctttgtagcaattgtgaatgggagttcactcatgatttggctttctgttattggtgtatagaaatgcttgtgatttttgcacattgattttgtatcctgagactttgctgaaattgcttatcagcttaaggagattttgggctgagatgatggggttttctaaatatacaatcatgtcatctgcaaacagagacaatttgacttcctctcttcctatttgaatatcctttatttctttctcttgcctgattgccctggccagaacttccaatactgtgttgaataggagtggtgagagagggcatccttgtcttgtgccagttttcaaaaggagtgcttccagtttttgcccattcactgtgatattggctctgggtttgtcataaatagctgttattattttgagatacatcccatcagtacctagtttattgagagtttttagcatgaaggggtgttgaattttttcgaaggtcttctctgcgtctattgagataatcatgtggtttttgtcattggttctgtttatgtgatggatttcgtttattgatatgcatgtgttgaaccagccttgctgcatcctagggatgaagccgacttgatcatggtggataagctttttgatgtgctgctggattcggtttgccagtattttattgagaatttttgcatcgatgttcatcagggatattggcctgaaattttctttttttgttctatctctgcaaggttttggtgtcaggatgatgctggcctcataaaatgagttagggaggagtccctctttttctattgtttggaatagtttcagaaggaatggtaccagctcctctttatacctctggtagaatttgactgtgtatccacctgatcctagactttttttgattggtaggctattaattactccctcaatttcagaacttgttatttgtctattcagggattcgacttcttcctagtttagactttggagggtgtatgtgtccaggaatttatccatttcttctagattttctagttcatttgcttagaggtgtttgtagtattctctgatggtagtttgtatttctgtgggatcggtggtgatatctcctttatcattttttattgcatcgatttgattcctctctcttttcttctttattagtctggctagcggtctatctattttgttgatcttttcaaaaaaccagctcctggattcattgatttttttgaaaggtttttcatgtgtctatctccttcagttctgttttgatcttagttatttcttgtcttctgctagcgtttgaatttctttgcgcttgctgctctagttcttttaattgtggtgttagggtgttgattttagagctttccagctttcttttgtgggcatttagtcctagaaatttcccactaaccagtgctttggctgtgtcccagagattctgggatgttgtgtctttgttctcattggcttcaaagaacttatttctgccttaatttcattatttacccagtagtcattcaggagcaggttgttcagtttccatrtagttttacagttttgagtgagtttcttaatcctgagttctaatttgattgcactgtgatctgagagactgtttgttattatttctgttcttttgcatttgctgaggagtgtttcacttccaattatgtggtcaattttaggataactgcaatgtggtgctgagaagaatgtatattctgttgatttggggtggagagttctgtagatgtctattaagtctgtttggtccagagctgatttcaagccctgaatatcgttgttaattttctgcctcattgatctgtctaatattgacagtggggtgttaaagtctcccactattactgtgtggaagtctaagtctttttgtaggtctctaagaacttgctttatgaatctgggtgttcctgtattgggtgcatatatatttaggatagttagctcttcttgttgcattgatccctttaccattatgtaaggcccttctttgtctcttttgatctttttggtttaaagtctgttttatcagagactaggattccaaccccgacttttttttgctttccatttgcttggtaaatcttcctccatccctgtatttcgagcctatgtgtgtgtttgcacatgaggtgggtctcctgaatacagcacatcaatgagtcttgactctttatccaattcgccagtctgtgtcttttaattggggcatttagcctgtttacgtttaaggttagtattgttatgtgtgaatttgatcctgtcattatgatgctagctggttattttggctattagttgatgcagtttcttcatagtgtctatggtctttacaatttggtatgtttttgcagtgactggtaccagttgttcctttccatgtttagtgcttcccttcaggaactcttgtaaggcaggcctagtggtgacaaaatctctcagcatttgcttgtctgtaaagaattttatttctccttcacttatgaagcttagtttggctggatatgaaattctgggttgaaaattattttctttaagaatgtcgaatattggcccctattctcttctggcttgtagggtttctgcagagagatctgctgttaagtctgatgagcttccctttgtgggtaacctgacctttctctctggctgccctcaacattttttccttcatttcaagcttggtgaatctgacgattatgtgtcttggggttgctcttcttgaggagtatctttgttgtgttctctgtatttcctgaatttgaatgttggcctgtcttgctaggttggggaagttctcctggataatatcctgaagagtgttttccaacttggttccattctccccgtcattttcaggtacaccartcaaacttatgtttggtcttttcacatagtcttatatttcttggaggctttgtttgttccttttcattcttttttctctatcttgtcttcacgctttatttcattaagttgatcttcagtcgctgatattctttcttctgcttgatcgatttggctattgatacttgtgtatgcttcacgaagttcttgtgctgtgtttttcagctccatcaggtcatttatgttcctctctaaactgattattctagttagcaatttctctaaccttttttcagggttcttagcttccttgccttgggttagaacatgctactttagctcggtggagtttttttattacccaccttctaaaacctacttctgtcaatttgttaaacgcattctccatccagttttgttcccttgctggcgagggagttgtgatcctttgaaggagaagaggcattctggtttttggaattttcaggcttgttgcgctggtttctccccatcttcatggatttatctacctttgctttttgatgttggtgaccttcggatggcgtttctgagtggacgtcctttttgttgatattgatgctatacctttctgtttgttagttttccttctaacagtcaggtccctctgctgcaggtctgctagagtttgctggaggtccactccagaccctgtttgcctgagtatcaccagcagaggctacagaacagcaaagattgctgcctgttccttcctggaagcattgtccctgaggggcacctgccagatgccagccagactctcttgtatggggtatcttttggcccctgctggggggtgtctcctggtcaggagacacaggggtcacggacccacttgaggaggcagtctgacccttagcagagctcgagcactgtgctaggagatccactgctctcttcagagctggcaggcagggacctttgagactgctgaagctgcacccacagccaccatttgccccaggtgatctgtcccagggagatggcttcatctataagcccctgactggggctgctgcctttttttcagagatgccctgcccagagaagaggaatctagagaggcagtctagctacagtagctttgctgagctgcggagggctccagccagttgccatttccctgtggctttgtttacactatgaggggaaaaccacctgctcaagcctcagtaatggtggatgcccctcccccgaccaagcttgagcatcccaggtcgatttcagactgttgtgctggcagtgagaatttcaaaccagtggatcttaacttgctgggctctgtaggggtgggatccgctgagctagaccacttggctccctggcttcagccayctttccaggcgagtgaacggttctgtcttgctggcattccaggcaccactggggtatgaaaaaaaaactcctgcagctagcttggtgtcygcccaaacggctgtccagttttgtgcttgaaacccagggccctggtggtgtaggcacccgagggaatctcctggtctgtgggttgtgaagaccgtgggaaaagtgtagtgcctggaccagagtgcaccrttcctcatggcacagtccctcrcggcttcccttggctagtggaggaggttcactaaccacttgtgcttcctgcatgaggcaacaccccaccctgctttggcttgccctccatgggctgtacccgctgtttaaccagatgagctgggtacctcagctggaaatgcagaaatcaccctccttctgcgttgatctcgctgggagctgcagactggagctgttcctattcggccatcttgccacaagctgatgttagtcttttagggcccattagctctcaagccttcctgtacaactgtaagatggccattattattactcccgccagatgccagccggagctttcttgtatctaaacctgtgtttgttttttaaaactcatcaggagagttttttcctccaaagatcatcttaattgaagaactgaattaaaagcatacatgtgccctgtgtctacacttaaaactatccaaaacacaaacctttatacctaaaggaaactgaggcctggatttgctcagataatgctggaattcatacttaaaactctcagacataccctcaagaaattcagaagtaggaaagacagatatttaaacaaatatatgtgaaaatgctctttgaactataaagcaatttacaaaagtgtcatcaattcatcattgttgttatctttatcacagtcaataatattgttgcccaaattagaatggtttaacaaaacattttcttccttgccttagagcaggggtgtccaaacttttgactttcctgggccacattagaagaagaatgtgtcttcggccacacataaaatacgctaacactaataatagatgatgagctaaaaaaaaaaaaaaaaaattcacacccaaaaaaatctcattatgttttaagaaagtttacaaatttgtgttgggccgtattcaaagccatcctgggctgcatgtggcttgcaggccatgggttggacaggcttgccttagacaaacgggaaaatcacatttattttctgcttgtgaaagtaacacttgtttttttaatttaagtttgaaaaattggaactatgtacagatatttttaaaaatcagtatttcataactcaccaaaagataacctgaattttctctactgatatttacgtttatccccctgtatacttaatgttcatagaggttaatatgggacattgattcttcctcagtgggggttttagagaccaacccccactggcctggatgcctgggatggtttgggtgagatcctttcttgagtcaggcatcatttttgacctgtgccctcccctgtgaatttgtggcatccagagaattcttagataaggccgagcaaggcagtactcattccagatattcaggatgtacgtggtccagagctgttgtcttctctgacttgtgtcttgtgtgccttctcctgtaagtgtggttgccttgattagggatattgaggaaagtggagcgagtgtggatattttgctgtagttttcctsaggtgacagatactagtgggtgaagccagggctcaggcagctcagctctcttgtgtgttagcctggcttgctgcttgcaggtatggctgtttattttcatttcacttttctgcattgtagtctcttcctataattaacatggctgaaaagaaaaggttactctaaaagttgtttttaaaaaatacagagcctctcggatttctcagcagcatttaaatcccagctctgttacttaatgttgatttgtgctcttggataagcttctgagtcagtttcaacagtgaaatggtgataatatctccttctagaattgccctaagcatgagggatataaaatgccatcctcataaaataacactcagaawcattaattatttgttattattggatctgcgtgcatatgaaagaatccggacttttttgtattttgaatcccatgaaagttcagatgtgttaagttgtatggggggaggtgatrtattggaaaagttgccttcatgtataacatgtttgcctcataagttgttatgggtgttatacatccttcaaagtgaaagaattcttgaggataggcagcaggggactgactggtatcctatttaaggttgatgggaatccaagagtgatcaagagacctccaaagtggccagtggtccttcacttgtacatgagttagtattttttgatttgtgatcacagccactttctaacaaagcatgttgtttctgctttttcactatcagattggctttgaaagccttcatgaaaacatgccacccagtttctgatttcttcatatcagaatggcttatccagagattttgttttcctttctggcttcatcttggtgaatcagtagttatttttttaacctatattttattttaaaagccctggcactctcagcaaatttcgtgtgacttgggtacctagagaggtagcagagaattgaaattcacttttggactcccttctgtggcctcctctgcttccagtcctttctcatcctgacgtctaccatcatttatcaaaaattcaaaagctagaaaaagtcattctaaagcctggtgttgggtctgcagaaaatgtcccaaatgtctgtccgtaaggagtgcagaatctagtgggaattagataaactagggctttcacaaggctttctgggatatccatgtggaaccttggcctgctctccatttctgtgactctttgatgggcccttaaatctaaacctgtgtttgttttttaaaactcatcaggagagttttttcccccaaggatcatcttaattgaagaactgaattaaaagcatgcatatgccctgtgtctacacttaaaactatccaaacactaccagttgtttaatgaggttgttcctagaccaacagatactttagtgttttgtagagatatgttatttgcaaggctttgtcttctgtaactgcttggccttaaaaacctgcctgtctagaaaggggggcctctgagtagtgtttgataataagaaattgctttcagtactactgcaaacccttttggcagaaacatagaatcaacattctagaaattaagggctgctgttatggtttggggtttgtaaagttgtagttggagcgaggaccaaaaaatgtaaactgggttatcatgagggatttgtttttccaacaaactagatggttgagggttatgtctttcttattatgaggaagaggtttttgcctaataaggtactatatgaaaatgaatgtctttgaatatcttcttagtttttcttttatccttggttcttttttaattaaagaagtatttaattaacaccaactacaatcaagtcactgttctgagtcttctttgtgctcatgttattttaattttaaattaatttttagattttggtaatgtgtgtattgtacagttaaattatatagtgaaagtaattctctgtatcccagccacctggtccccttcagctgcctaatcttcctcaaattctgtactagcttttgcactgtcccagagataatccatgcctatacaagcatccatttgtatgatattctcttgtttcacacaggtagtcctagcaccatgacagaattgtagccctctcagtgaactacacacccttgtattcaagctcmgtgtaattcctgcccatattgactgtgcttggccgtgtgactggttttggccaatgggtgttagcaagtgtgatgcaagcagaggtttgataagagcttgcactttgaaatgtgttctagaggagtgcttgctattgtgacactccctctcagtacccagaagcccccagctgtgaggtccccacctagtcataaagagaagccacatggaagagaaccgggtccctgccaacagcctcatctgagcccctagccrgcagcaagcatccacttggcagccatgtgatgaatgaactatcttcttggaagtggaactgccagccccattcaggccacccccagtggtgctatgtggagaagagacaagctttccctgccaagccctgtccgaattgaaaaattgtgagctgttgctagtaatgtactaaagttggtttgtcatgtagcaacagataacaaacacatgctatatatatgatattttctgtgccttgcttttgttgctgagcagtatattagatatcagcttatttcattacatacagagtcacatcattcattttaagagctgaataatattccatttatggctgtacagtaattaactagcctcttattgatggacattgatgtttctaatctttctcagcatttaatatctccatggcatgctttgttttgcacatgaacaaatatatttattgggtaaattcttagaagtagagttgctgagtaaaagagtacgtaaatttgtaattttaataggtattgcaaattgccctccagagaggttacactcccactagcaatgtaggaagactgtgccagtgtggttggaatgttacatttctttttaatattttcccatgtattttaaaaaccatatgcatttcttttttgatgaactgtcttcttttttgtttggattgttggcctttttcttttttggaggaactctctgtatttaaagaaattaactcttaatgtatgctatgtgaagcaaatcttttttcccccagttttttatcttttgacttcatttgaataattttttgtccttattgtgtttagttatgtcaaatcttttatagcttttggattttcttggttttgttctggtttgttggtcatatttargcttttctcactttaagattattgtagatattctcctgtgttttcttctagtgtttttgttatttcttttttacatgttaatctttgatctgcctgaaatgtcttttgacgtagacgtttccaggtaggtgtccgaggtggctagtcatttgtctgttaatattgttataccatgtcatccttactatacagtcatgatgctttagtcaatgatggactgcacatatgacactggtcccatgatattacaatgaaactgaaaaattcctattgcctagtgatctcgcagctgttgtaatgtcatagtaatgcattactcatgtatttttggtgagctggtgtaaaccaacttactgtactgccagtcatataaaaatagagcacatacaattctgtacagtacataatactcgataataaatgactatgttactggtttatgtatttactatactctattgttattttagagtgtactccttctacttataaaaagaaaaagttaactgtaaagtagcctcaggcaggtcctaggaggtatccagaagaaggcattgttattataggagatgacagctccatgcctgttatcgcacctgaagaccttccagtgggagaagatgtagagatggaagacagttatactgatgatcctgaccatgtgtaggccgaggctaatgtatgtgtttgtgtcttagtttttaacaaaaatgcttaaacagtttaaaaataaaaaaattttaaaagcttataggataagtatataaagaaaatatttgataaagctgtccagtgtgtttgtgctttaagctaagtgttattacaaaagagtcgaaagtaaaaaaaaaaaaaaattaaacgtttatgaagtaaaaaagttacagcaagctgaggttaattaataaattattattattgtttcagagacagggtcttgttttgtctcccaggctagagtacagtggtgcaatcatagctcactgtaaccttgaactcctgggctcaagcagtcctcctgcctcggcctcccaaagcattgagattacaatgagccactgtctggctatgttgatttattgttgaagaaataaaactattttttataaatttagtgtagcctaagtttacagtgtttataaaatcgacagtagtgcagtgtcctaagtcttcacatctactcaacactcattcaccgactcacccagagcaacttccagtcctgcaagctccattcatgataagtgccccatacaggtgcaccattttttaatcttttatattgtgtttttactgtaccttttctatgttcagatatgtttagatacacaagtacttaccattgtgttacaattgcctacagtattcagtacagtaacatgctgtacaggtgtgtggcctaggagcaacaggctacaccatacagctcaggtgtttggtaggctacatcagctaggtgtgtgtaagtgactctatgatggtcacacaaygatgaagtcacaatgatgactcatttctcagaatgtatcaccatccttaacatcattaaacattcatgtatttactggattcagcaatatcttttgaactgctgtcccccaaattacttaattattcccttttttctcttaggaaatgctacagtgaatatttaaaattctatgtaattattaatcccaaacctttgtggatatagaaatcaacatttatatagtctgcattttacaagttatttaaacatttgtgttgttaagctgctcaaaagccggttggcaaggtctgcattttatgcacaggaaaaaggagaagatcattccatgtaaaggagattcatctgaagacaagcaggattgtgtacaagtagagagaaatgtgcttttttatgatgtatcatgtataaaggcctgttcccaaatttctgaagcacatggaagttctggtgtaaaaagtatatctagttaagacagctgtaggctgggagcctgtgaaaggaagattttgcttgttaatagaatgactgagactacatcatcctgtgtagaaaccagggaataacacttgtactgtgttgtgttaagaaaacaggttctttaattaagtgatgtacctgaaatttcaggtaatgactacagctctcctgaacacccaggagggcggtgacactgagtcacaggcagaactatgaaattccttgtgaaactcaactttctgttcttccagcctttcccctcccgcccctcggctcagccacaggtgctcattaaacctcgcccagggagcatacctccaaagctttttcacaggcatgtggcccacctttggattccgaccctatggtcctgggaagtctgcatttggagcgtgtacctgaagggtgttaagcacatttaacctctgctaagataatcagacagacacccctagaaagagatatagaagtaaggtgttgactattctggggtttgtatttcagcaggacccccaaagtttgagctgaaaggactaagttctgtggggaggtatcagccagaggtggggacctcttttgggatacctgtgccttcccaccgtgagccgctgtgccctctgcctctgctgcaggccagccgtgctgcattccatatgtaaagctgtgtcgtgctttccttctttccctcagaatcctccacgtctgttgtgtgagaacgacatttcactaaggaggacagacagttagcttctgtcagagaagaatgtcagagctctttcattttgtagatgctgcctttagcttgctttctgtgtatgttatgttcttctacccttgggatattttgacaccagtggcattgttttccattttctcagtgccagagaagctgggatgttgtagaaaatatttggtttcaaggttaaaaaatgttatttcttttctttttagatcttatctaagctttctttgcctacccgtgcctgggaaccagcaatgaagaagagttttgcttttgacaatgttggctatgaaggtggtctggatggcctgggcccttcttctcaggtggccaccagcacagtcaggatcttgggcatgacttgccagtcatgtgtgaagtccattgaggacaggatttccaatttgaaagkcatcatcagcatgaaggtttccctggaayaaggcagtgccactgtgaaatatgtgccatmggttgtgtgcctgyaayaggtttgccatcaaattggggacatgggcttcgaggccagcattgcagaaggaaaggcagcctcctggccctcaaggtccttgcctgcccaggaggctgtggtcaagctccgggtggagggcatgacctgccagtcctgtgtcagctccattgaaggcaaggtccggaaactgcaaggagtagtgagagtcaaagtctcactcagcaaccaagaggccgtcatcacttatcagccttatctcattcagcccgaagacctcagggaccatgtaaatgacatgggatttgaagctgccrtcaagagcaaagtggctcccttaagcctgggaccaattgatattgagcggttacaaagcactaacccaaagagacctttatcttctgctaaccagaattttaataattctgagaccttggggcaccaaggaagccatgtggtcaccctccaactgagaatagatggaatgcattgtaagtcttgmgtcttgaatattgaagaaaatattggccagctcctaggggttcaaagtattyaagtgtccttggagaacaaaactgcccaagtaaagtatgacccttcttgwaccagcccagtggctctgcagagggctatcgaggcacttccacctgggaattttaaagtttctcttcctgatggagccgaagggagtgggacagatcacaggtcttccagttctcattcccctggctccccaccgagaaaccaggtccagggcacatgcagtaccactctgattgccattgccggcatgacctgtgcatcctgtgtccattccattgaaggcatgatctcccaactggaaggggtgcagcaaatatcggtgtctttggccgaagggactgcaacagttctttataatccckctgtaattagcccagaagaactcagagctgctatagaagacatgggatttgaggcttcagtcgtttctggtacgtagtgtgtttgaggcatgtcctgagcttgtctccttttctctttgtgtcttatagctcctggatggtggtataggtgagccctgctccctgcctcccatgtcaacagtggaacaaaatcctgcaaactttccttgcatgttaaatttgttaagatagaggaaatataatctccaagtgtctagattttgcttttcatgtagttgggattttgtattagtctgttttgtgttgcttataacagaatggctgaatttgggtaatttataaagatatggaatttrtttcttatagttactgagaagtctaaggttgagggccacatctggtgagagccttctgccagtggggactccggtgccacagggcatcacatggcaggggtgctgagcatgctcacgtggttgcttaggtggctcttcctctttttagaaagcctcgatgccacacctgtgataacccattaatccatgagtggattccattcatgagggtagaaccctcatgatccagtcacttcttaaagccctcaccttttaacactgccacattggggattatgtttccaacacatgaaatttgggggacacagtcaaaccatggctgacttgaatgcgaacctccttggatttgggcttcttttctggagagaattctgattctgtatcctgaaatagagcactgtgggaccatccaggcccttttcttaccaagagaactattatcaccttctcaaaagattttactgctaaacaacagaaccttagtctcatcacctagagaccatgctggtaaaaatgagagttaaggaaaggatttataaatgatttttttctccctgtttgatgaatataagagaagaggtaaaggtgagggagccaccaggcttttatattttttaattaaaaaawtttttaatttttttagggacacggtcttgccctgttgtccaagatggaggatagtgacatgatcataggtcactgcatccttgaacctttgggctcaggtgatcctcgcacctcagcctcctgagtagctgggactacaggtgtgcaccaccacaccgggctcattttttatttttatttttttgtagagacggagtgttgctgtgtttcccaggctggtcttgaactcttggcctctagcaatcctcccgcctcagcctcccaaagtgctgggattgcaggcgtgagccactatgctcagccaccatcatgggttttaatcagaggaagcacgaagtcagattatattttagaagactggtgtggtgtcacagtacagtgtccatggaggcaatgagaccacgtaggaggccgggtgagaaagaggtgggtttgaaagacattcaggagggcagctccaccaagcttggggtcaccaagargggtgtgtgatggggagggccatggaggaaaggggtaactgggatgagcctttagctgagatgctggaggacagtgggatagaagggccttgaattttgagggagagtgtggggccggaaatgcagdgtgtgggaagatgacagagacctagaaagagtgattgtgagatgggaaagaattagagggaggaggaggggtctcctagtcaccctggacataatgcgagccgcagaggccaaggtctgaatcgtatcttcgcgggttaactaggggaggccattggaggcctcggcagctgcttcaggaccctgggaaggtgggagcccagcttggctggtggtaagggtggagaccactagtagcttagattagggataaagaggatgataggtgagtggagatggttgagagaaatgctgaagataaggagggaaggggcacatgttgtgaggggcagctgtgtgggtggtgtgttgtaaccgattaggtcccagacatgggccctgcccgtgcgtgtctctgtggactggaccaggacatggctggcttcctcagccttttggctggagctcggtactgtagggagcagcgggcccaacactaagaagagctgctttcagtggcgtgggcaagcccactggcagctcagtgctcagggatggctgaactttggtttcccacatcatttcctgtggtcactgagataaagtttgtgtccttgaaaagttcactcagctgtgagtctttgctgcctcccctctgtgcccacagcacacacctactgctgaagggagtgggcattcatgtggagtggcctggccccattttgtgctttgtcttttgtatcaagtttcaggaaggagtttctttaaaacaaaaatcaataaggaaaacacaatagaacagtaaatcctgtacgcaataggtaagaaatatagtataaggtaaacatctgcctgtttttgtgtgatgtttaaagtctttcaaccgtgcaatcaggttattagtggtaaaaagaaattagcactgaacttacatattacagaataattggatttgattaaataaacctagaaagaaaagaatagtgatttttttaattgggcaggattatgagaattttatttagccgaagaggtatttagggtatcagacttagcaaataaaaatataggacakctacttaaattttaatttttcataaacaatgaatggttttttagtataaacatgtccagctcaatattcatgacatatgtatagtaaaaattatttgttgtttgtctgagaatcaaatttaactggatgtcctgtattttacctggcaactttaatttggaataaaccattagtgtgccagtttgtatttgaagagcccttcttgattgattaggagctccttgaggacagccttgcggccagcgtgatttgtttctccttggactcaatagcaccccgcatgcagtaagtattcctgaaggaaatgaaagataaggtgaagttacggggtagctcagtggaaggatttaatayagagaactatttacaaaggtattagagagctggaaatccaaataggcaatgggaagaaccccagagattaacaacagcagggagctctgtcctccaggatggctgagggacaaggtagttactggagcccaggggctgaggctgctcggtgggagccgggacmatgaaccctcaccaagagccctgaaacctcttgttctgaaaaacatattatttgctcttctaatttgaatattttctgacattttatcctagaaagctgttctactaaccctsttggaaaccacagtgctgggaattccatggtgcaaactacagatggtacacctacatctstgyaggaagtggctccccacactgggaggctccctgcaaaccatgccccggacatcttggcaaagtccccacaatcaaccagagcagtgkcaccgcagaagtgmttctyacagatcaaaggcatgacctstgcatcctgtgtgtctaacatagaaaggaatctgcagaaagaagctggtaagagatgaacgcccatgttgaacttaggaatgctgcgtatagacctcrtattctcccttcagaatacccagcaactgtgtttatcagtagccctgataaccaggtagcaagttcattatatagcataaatgtttgtctaatgtccttgtataactggcattgtgttctttaagaagtatttagtttgagataaaatatatctctgagtaagttagccattgaaaatccagtttaaaggtcatagtaccttttgtggatagacttctcagttaggttgtactagtattattccatattttgttccctcccatcccatcaaccccttactataaaatgaataaataacctgcattttgtatagaagttccaatttcaaatattctttcttgttgttcctgtaaaccagagagtgtttgtaggaacaacaggacagaaatatgtggaaatgtcaaagttttgtcctccagaatgcatttccaatacttttaaacctgaaagtacaataaaattcggatccatttatttgtttggaaaatctcttaaccatgactctaccttgccaccagaatcactttctcttttcttaccccagtgatgtgtctttttacttgaactccctggcccttagaatcagccctgaattcagatgacatgtttttccagcctcttgttcactatgcattatagcttcctgcagctctagagtgactgttagcagatggaggtgttaataggagatcccttgttatccatggtctgactgctcataaaattagcctataatctcctatagcctatgtttctgttcctgacttgaatcctcatttttatcctatgtggcatcctttctgaagcacttccttcctttcatttatttgaacgaggctttttttcccatgtaaaactaacacaatagtgttagcaagattgtgggatttctttttcatacctgaaagtcattagaaactataaaagagtaaggaaaaccacttttgaaaattctttattttttccttgtatgaaagtatctggagaaaaggagaaaaaaaaaaaaggatatccttccggtaacagcagtcaataactgcagaccacattccttatttcattggtgtcttctaaagcctgagtgagaatgtgtccatgggcaggcagcatgagcatcacctgggagctggatggacctgcagactctcaaacctcatcctagaccgactagtcagaagctctattttaacaaggtcctcgggtgattcatatgtccattaaagtttgagaagcattgttcttctagaatagtggttgtcagacttccctgtacattaggatcacctggggagctttttttttttaaaaaaaaatgatgccttgggaggccaaggcgagcggatcacaaggtcaggagttcaagaccagcttgaccaacatggtgaaaccccatctctactaaaaatacaaaaattagctgggcatggtggcacgcacctgtaaccccagctactcaggaggctgaggcaggagaatcacttgaaccctggaggcagaggttgcagtgagccgagatcatgctactgtacccagcctgggcaacagagtgagattccatctcaaaaaaaaaaaaaaaagaaaaaagaaaaaaagatgcctgccacctaccctgggatactctgatttggttggtctgggtaagagaccagacatcgtgattgtcgaaggctttccaagcaagcctcatgtgcagcctcattttcaaacagtgtttgaaaactgctgttctagaggattctgggaagatgtgtttctttgttcggttatattgactgtgtcamcctagaggccctgcccacccagagtgttacagccatgacctgatggttccaggtgttctctccgtgttggttgccttgatggcaggaaaggcagagatcaagyatgacccagaggtcatccagcccctcgagatagctyagttcatccaggacctgggttttgaggcagcagtcatggaggactacgcaggctccgatggcaacattgagctgacagtaagtacygtgggtgcgttacggggttacaggcttctgacagtttgcattttggacacatccatctttgtgattagtaaatttccccatcttggacgtgtctggtttgttgttgttgggtattttgtttgtttcactttcctttgaagccgacaacaatgacttgttcattttaagaaaggtcagttacgttaaacagtcatggggaggatcccactgagagtattcagggtgttaggaggaagagatggtgagctgcaggagtatagaagaaacaggaattaaagacggtggactgccctgagctgggtggttagggggagttgaacatgaacacagtccttcaagcctaaaaagaagctagcatgcctgcaactatctcaaggcagaagagggaagtccatgtggtagaaagtgccattctaagagaaaagggcttgtgataggtgcatgggtgtctagagggccaaagtgctccacaacactcagtctgaggggaatgctccaggtagtgattgttgccagtgttttgggtggggaggtattatttcccatctgtctacgtgccaacacattattgaaaacaatggatgtgtctgatgcctagaacatgctatgtttgaaagcacttctgtactttttgtacagctctttttgtgtaagcaaagggagacttagaagaactcacagagaattgaatgatgctgctttacccaggccagagggtttctacttcctttgtgtgttttgtcagtgccattagtggtaactggatgtttgaggggaaagcactgaggacacagaggcccatgagctcctgataagccgtgttctttgtggagcaaaccctttgctgtggtagggcctccctgtgtctggagggcatagctgatacttgctgggacacagctttggtcagccccacaagaggtgcccaacaagaggggcagggtctctgctgcaaacctctggatctacatgtggacatctctgcctgctcagacttctatgtggaaaatctaaagcaagaggattattggaaaaggtgtacatttcttttaaacaatttttttattgtagtgttcttttttcttttagcacacatttattaaacaaagggataatcctaattaatccaacacactttgaaataactgcatgtaaaatgtttgtgataaagataattgaacacagtaatgaaaaaaaaaagaaagaaacagtatggagatttgctcattgaactgagcttggtcattctcttagttaactcctgtccaaagkgatgatggaatttttattctactttttcatagatccgagtacaggtgacattgttcatgacacactccaccactaatttcccatctttcaattttcttgttattgkgctttccttcccatcccactcctgatgctgaaccaatgcaccatctgtaaagttgcagacagtctgtgtttttctgccatcagctgtggtttcttcaaactcgtctcccagggtacaagaaaactgtgttgttttcaaagtgctctcggtttttgtggtgaggtttctgccatcacaagtgatgatacaatctggcttggccattgcgcccattttttgcaaagctattcccactcctagctccttcatgtattcatcaaagcctttgctgtccagcaggcgccatcttccttccagctgctgaactgtggccatggtgggtgygggcgggctggcgtgcagagcagggtctacgtcggcatggcagcatgctgtgtctgtagtgttctttttttaaaaaaaccatgctgtatcaatagttgcattgtcatcacatattcagattttatgtgaatttctgcatttaactagtcttctaggaagtgctgaccactgatactcagaagagtgaattgtctgtttgcttcatatttgcctaatacatatcccaggaatagcacgtcacacttaagacttccctttcccatgtcaggatayacaacatggtacggcacaagcggtgtaggctttaaaaaccgggtttgagttttggccctgtcgctgcagggatacttctgaacctggtctgagaagactcacctcatgctgcagatggcagtggctcagagcagattctggagccagcccatctggggacgtgcttcagctctacccgtcactagttgcgcgactttggacaagttcctaaacctctcagtactgcggttttgagacttacctcttaggtttggtgtgagtagcacaatgcctaggacagcaccagccatgttgcaagtgcaaagtaaatgctacctgttattgttgttgttataaaaacaaaaggagagcagagaagtaccattgaaatatttggatacttgatttttaaaattctgttggcagtcacctgccaacagataagctcctaagttttcctggtggtccttgcagtcccattttttccttgggtcttgggccaagttgaatgcattctgattgcagatgagctcccctcttcttcctccctaattccagatgggacccttggctctttttgtatttattctgggatcactgatgcgaatttcagcatgcagctccagtcacatcattccactgctcattacccctcagtgacttcgcatcaggtgctagcttagcaacactttagctggctgcttgagagccttcaggctgtggacccatccagccctgcagccttccctcctctccctcgagcatcctgtgtccagagaagcctggcttttgatgtttgcctgaatacatcatgctatcctgcctgtcgtctttttcgagcttctccttctggtagtgtccttcccttcacttgtcaatagcctatttgtaccttgggaccacctttgattacatctcctgcatcagccacttttctcctgttaataagaggtattaacatcattacccttggagccagcagagcactaaaatagggaggatgctagcagcagctgcagaccgcatgccagcaacactcaggattacggagagtatttcaggagtgcagcgagtttcacagaagtgcacaaccccgtacaggcattagtatcccggctttgccagtgaggtaacagacagtggagaggggcttataaaagcccatctgtatcagagccggaagtcaagccttggtctgttgccatctgcttcacgattggctgtctcttgtacctgttttggggaagagctactctttagtccctgaagccgctggaggaacgttgagaatctcacatgcggggtttggaggtggagtccagggtcttgagagcagtgctgaggagggaaaggctcttggctgcctgttacctagactccctggactggctttcacaggctttccttgatcctgggtctgtgggattcttgccatcctgtgttgcagatcacagggatgacctgcgcgtcctgtgtccacaacatagagtccaaactcacgaggacaaatggcatcacttatgcctccgttgcccttgccaccagcaaagcccttgttaagtttgacccggaaattatcggtccacrggatattatcaaaattattgaggtaagtaattcattaaaaaattgtagtcacctttttaaaaacagtaatatataatcagtgaagaaaaatgagaaaatatagctaagaaaaaatgaaaataaccaaaattcttcaacttttcccatggaaataagctcagtcattttaaaataaactgcaggtaagtaaataataaataatctgagggaggatatcagtgaatgggtaagagaaagatgaggaaaagacattattattgttttaattttagatattccctaagaaacatcaatattgtcaagataccctgtacatagggttaaagtgcctaattgtaatttttaagtgtgatctttgcccaaacsaagtatctgtagagcaaaggaacgttggccttggaaaaaatgatccacattttgccactatgccaggccactcttgttgtggagagcttggccgcttctgctttggaaaatccgtgagaattttcatgcgtgccctgcctcttactcccttcccagtttgtccacagacatgctatttcctttttacattttatacaatactaggctataagagaatgagcatcagtggtgatctgaatgggttaaggcagtcaaaactgaaaaagattaacttgtaacagctagtaaggataaattaagtttagtgggaactacatgttataaaatcgcttatgaaatgaagcctcttatagcaggcttaatgtagtatcctgaatttcctcttcattgtgtgtgtgtgtgtgtgtgtgtgtgtgtgtttaaagagagatgctgtctgttatgtggcctgggaaagctttttttttctttctttttttgacagagtctcattctgtcgcccaggctggagtgcagtggcatgattttggctcactgcaacctccgcctcccaggtcaagagattctcctaccttagtctccccagtagctgggactacaggcgtgcaccgccatgcctggctaatttttgtatttttacttgagatggtgtttcgccatgttggccaggccggtctcaaactcctgacaccttaggtgatccacctgcctgggcttcccaaagtgctaggattacagatgtgagccactgtgcccggccttggagagtttttttttttttttttttttttgagacgtggtctcgctcttgtcccccaggctggagtgtgatggcatgatctcggctcactgcaacctccgcctcctgggatcaagcgattctcctgcctcggttccccgagtagttgggattacaggcacctgccaccatgcctggctaatttttgtatttttggtagagacagggtttcatcatgttttccaggctggtctagaactcctgacgtcaggtgatccacctgcctcagcctcccaaagtggtgggattacaggcatgagccwccgtgcctagccccgggaaagctttttgacatggaaatgatcatgctgctgatggtccagggccccacccttggaggcagacagcatagcttttttatcagctgaggaaagatgctcagagaggttaagtaactttactcacaatacccagctcacggacagcagaactggtgttcaaacccaggtcttgtgcttccgagctcagtggcctttgtgagtctagtacaccacaaatcttaaagaacagtagtgatatggcattgatgaggctcagacatcagactgatgcagtcaacagcaaggagagtcccatgtggtgcttttgaacacaacttagtcaccatttctgatttctttctttctttttttttttgagttggtgttttgctcttgttgcccaggctggagtgcagtggcatggtctcagctcactgcaagctctgcctcccgggttcaagcaattctcctgcctcagcctcccgagtagctgggattacaggtatgcaccaccacgcctggctaatttttgtatttttagtagagatggggtttcgccatgtttgtcaggctggtctcgaactcctgacctcaggtgatccacctgcctcggcctcccaaagtgctgggattacaggtgtgagccactgtgcccagccaaccctttttgatttctgatacctcacttgcttctatgctacccagcctgctaagtgtggtgtggcatccatgctgaccttatttggggactattgctaatgtctgtcctccattcttgcatctctgggccattttttgctaatataattaggctggtattacttgtaaaaggatttgtctttagacagtctcagctgctcttcctcccaccccaacttttaatttttgtgtaaaagtcccagcaccagagttctggggcccttctcttaattgtgctaccagacaagagcattcgtggcagtttttcctgtgtgtattcataaagagtatcagagatatagtggtcagatgaacgtggtaacaaagcgcttgagttaaactgtgagcaaagcacaagattgcggtgtaggctctgttggggcacagyggaagctgtgcttccaaatgctgaaggagccgagttctgccgcagtggcaagaagcctgggctggaagctggaggctggagctctgagtccagctcttctgagaagggtggggctttgggcaaggtatttatcctctccgaccttctgtttcctcatacatggaatgaagatttctgaccattaggtatctgggattccttcactcaaaaatgctgagtttaaattataagtcagcactgctcagctttggagtctggggaagctgtcttcccagaagtgctgaacttctgcacagggtttgtagggctattgggtaaagaagttgtaagcagaaaacccacaaagtctactgaggcacttttagattcactttctaatttccaaagctgaaaagtgctttctrccaatgcatattttaaccaagtaccttcctcctttttccccacccctctctttttaatgacaaggaaattgsctttcatgcttccctggcccagagaaaccccarcgctcatcacttggaccacaagakggaaataaagcrgtaggtagaacacaaaagataaactccagctctcatctaagtcccttcctctacctgggcccaactctgccagctggtcttgtcttcccatggtgccttcctcctggattagctgcctttacccttgtaatgtgaaccctctgaaacagtgctgtccaaaagaagttctggaatgatggcagtgttctgtatctgcactgcccagtgtgatagccgctagtcacatgtagctagtgagcacttcaaatgcagctagtgtgactgtggaaatgaatttttaatttttaaggaatttcaatttagctacctttagctaacagattggacagcacttaagttgggagggagggagagagtgtagattttttttcctttgacaatgttttcagactttatttgcatgggttctagaactagaatttgaaggcaggcataatggctgagtggaaagaaaatggcccaggcgcgggagacctgagatcattcattatttcagatggccagttactcattcagcaccataaaggctgctgttgtgtgcagggcagtgtgctaggtgctggggataaatactttccctgtctcggaggggcccatagtctggctgagaaagagtgagtgagcaatgaaatcaatggctctggcagattctggaaggtctaggaaaactccaagcaggggacataagatctgagcctcaaagaatgagtggaagtttgcttggctgaaggaattggtggcggctacccttggggactgctgtggcttggttcagtaggcatgcctggggcacaggaggagcttacgggagaggcatctgaacagccagttgggggtctggttcttgggtagcagtccaacagcytaagacttcagcctcaaaggccagtggttttcatgtcatgttttaggtgcatttgaggttccacaaccactcggttggaatttcatggatgctgcagctaacatgagaccacagctgtcagccatgacccccgattccaaactatggtgttcattgagacagccagtgatcactgttctcatggactctattttaaataattgtttaaagatagaatgtataagtttatactaataaaatactgcttttatctatttttttctttgggggtctgtataagattgcattttgaaaagaaagctataggcaaccataggccgaggatggtaggcacctttggggctagattctcagctttggggcctcacttgcctcacccgtaaattggaggtaaccacagtatgtgaaggcaggggctgggcctcaacatctttggaacctccttatagtgatgtttagacctctagatgctccctcagatggccagtgtcagagagagagagttcttactttcattttaacccctggtggtctgtcccagacatgtgacaaaggcaggtcttaaactgtgtcctcagaaggggagtggcttgtaatccaggtgacaagcagcatctgatatatctgtgttgctgcatttgctttccaggtggaagaagtctttcctgtgcagcctggtgtttggcatccctgtcatrgccttaatgatctatatgctgatacccagcaacragccccaccagtccatggtcctggaccacaacatcattccargactgtscattctaaatctcatcttctttatcttgtgtacctttgtccaggtatatatgagaaagtgggcagacctctcccttccatgctgtgtgtggccctcagatattctgcccgctaagcgcaaacatagtgctttagcttggtttaaatggcactttattgcagctttcctgccccacccaggcagttgctgctttttttctctcttaatgaccagtaggtggggcttggggcccccccagtgtgggggactactaagggcctggtttcactgtcagtttcagttgattgcaagtgatcagaactggccctggaatagcaacctccttgctgcaaggtgtggtgaactctgtgtctccaatgtgcatattgtttaggttaatttacgtttgttgctggaagcaacaactggatcacccttgagcccatgccactcttgagtgttctatcttaaaaggtggagatatggtccttgtctttcaggaagttataatttaaaagagaaaggcatgaaacgtctgctttggtggtgatattaaggaactagctgtgtgtctggtgggaagtgtgccctctatgtgtatattttggaatataaaactaaatccctgtcctaatattggaatgtttaggggctatttgggggcaagcattggtaggctggatttttttttttttttttttttgagacagggtctcaccctgtcacccaggctggagttcagtgatgtgatcatagttcactgtagtcttgaactcctgggctcaagcgatcctcccacctcagcctcctgagtagctaggaccacaagcgcctgccaccatgcctggctagatagggtcttgctatgtgcccaggttggtctcaaactcctggccttcaacagtcctccaagctcagtctcccaaagctctgagatgacaggtgtgagccactgcacccagcctgaatttgtgtttttctatattttgtttgattataagtgtaatgtacacttattattaacaattcaaaccgtactgaagtataagaagaaaagaggaagatgccctttcactgatcacattctgcctcccgcccaatctcattccccagtgttgctatggtgatattaatagttgggcattaatctctccaaatctttatatagagaaaatgcacacttgcgtgtatgtgtatgtatatgttcacgtaatacagatacagacttttttaactgaaatgggatcatacaagatagactgatgtgcagctggctttttcacttaactatgtattagacatcttttatgccagtgggttatagatagagcccattctctttagggaatggaatgccttgtgctgtctacagtacaaatgagtcgtgatttttttccccaacttttcaccattctcttattagaggacatttgtgttgtaagcactgggttttaaaggtctcacatgctcttggtcatccattcctgtggacagtagtcctctgaatgggaaagtatatttcataaacgcccatcacagaggaagaagtactgtcacgactgtgcacaaagctagaggctttgccatccccagggcccttggccctgtgtcgctcattgaactctcctccctacttgctggcagccttcactgtccttgtctttcagcycctcvstdrgtggtrcttctacgttcaggcctacaaayctctgagacacagrtcagccaacatggacgtgctcatcgtcctggccacaagcattgcttrwgtttatyctctggtcwtcctggtggttgctgtggctgagaaggcggagaggagccytgtgacattcttcracaygccccccrkkctctttgtgttcattgccctgggccdgtrgctggracacttggcaaaggtaacagcagctkcaggttcagaaaagagctgctccttcagtaaacaaatctcacttcctctgaacaccatgtttagaattactaattrtacacagcatagagacagacttaaagaaataggaaacctccatataattaaggtgctctagtcactaatctccaaattggtcactacttctgaaatcccagctaatctggttaattattaaaaccatcattcaggtgtattgtgtaaactaaagaaacctggccttcagggcagagcctacattgtctcttggtgcaaaactgaatatgtagttggtctagacatccatacatcctcctcaaggtcatgccatttttaacacccttcattgtccccaacactgaaatgtatcttacaagagaatggaactcaggccctraaagaaattagattgaacctaaaagaaaatggtcagtgggaagactgatgtttgtttccagtctgaaatgtaattcccrgactttagtggcacaggcactgtgcatcactgtggaagtgacatgtggccatgtgtggtggatagcaagtaacgcccacctgcagagccttttatcgtgccgtgcggctgtttctctcgcaccagctgtctctaacaccacgcttgtgactctcaggctgggtttggacaggtctgctttcgatagctctcatttcacattctggttatttcctagagcaaaacctcagaagccctggctaaactcatgtctctccaagccacagaagccaccgttgtgacccttggtgaggacaatttaatcatcaggtgagttatggttatcaaatgtctttgtggttggtatctatcaatctgtgtgagctgcatcagatgcccatgttgtattgacattgcaatagaccttgtgagtgtgggcagagacacagtaagatcaccactctcaatccagctacgaaagcaaggcattgaactataaaactagcaagatttgtaggtggtgtgtgtgtgcgaaatggcacatgggaggtgtagatgattagtattccaggaattaagaagaggaaggccagtgttggtcaagggaaacttcacagakaacatagagtatgaattaggccttcctagtaagatacacattcagacaggcagagagataaggacttcaacttgctaaagaataaaaattgaaggagaaatttatcttcttcttaaggttgcctgatattaaaaataataattattattattcctggaaactcttgttgcatttattgtttgctagacactattctaatctctttgtatttaatctaaccaaagatggaaactttctgaggcagggactattattactcttaatttacagatgaggaagctgaggttcagagaggctaagcaactggcccaaggtcacacaggtattcagtaatggaattgggatgtaacccaggctggtggatccagagtctrttttcttaacctttacacacactgactcttaatgcatatttaataatatggaaatttttctaattaaggcttctgtatttccttggggttagcttcttttttatattctaggcaatggttatttcagccctccttcatattcctaaaatctctccctggtcccaccacattttctattagcctgtggtctcgctttggactactggaaggagaagtgttcagatggaaaccctccagttccctgtccctcagcctacacagctagcctcctccgtggcacctcccgctcctgccccgttggtgggagaggcgtctcctccaatgcctctacccgggaacctttctctgttggttttctcagtggtttttggtgtctctgattcttatcctccgatgtcatgcagactctaaccactcccattktcagaggcgttgtgccttgcccctcccttgtgtgcccttgtccrtgtatcacactgttgatggagccagcctgccctagctgtgtcctggaggcctgggcgtgaaggctgagacagaccccttgcttccccatggggtctgcagggctggtgcagctggccctgggcacgccccaggtgagtagaggaactgaccggggccacacagatgcatgagtgttcatgaggtgcaggctggctgctgcgcggtggcactggttttgttctggatcctggcttttaaatgatcatcacaattgtaggactggcaactgagatttgagtccttctggtgttccaggctcactccccagcacttgccacagatcgtctagttccactctgtagctgttccgtgaggcagcactgtcatcatcccagctttcctcaggaaaagccaagtgcagtgaggtggagtaatatccccagagtccatggcaggcaggcagcagagctgggattggaaccctggaggcacagagcccccctcagccactgtgctgcgctgcccccaaacaggaccctgtgtgacggcacctggcatgctgggctctgctgtgccatgggtctgcagcagtcacatgccttggcttcttttttttttcttctcttataaattaattgcatgaaagtttctgagaagtgaaaacgttcagacagggagccaagccgctggcagctgtgttggttttgactcatgtttcctccaactcgccttgctagggtcttcggtacagtttgaggcgcctctgatggcactgactgcagttgcttggaactattccagggatctgaacaggaggagaaggcatctgccggccgaagtgcccacggggtgcgtgcagcacctgtcataactcagttcttttccaagaatgccgattcattttttggctggggacgcacggcctgactactaccatgcaacatgacaggacattattaagctaggggccagaagaccagagttcattctgcctttggctcactgtttgggtgtggtcattcctacttgcctcctgacagcacaccccgagcccaaccctctgtcccaggccaaggctgcacccactgccgcctggattgccgcagtctaggcctcccctgagctcaaccattctgtgctttgaggtgcactggacactggtttcccagtgactctgcctcccacagggccctcccgcgtctgggcctctgcttgtgcctttggtccatggcaccatctgaaggcccccagaggttctcgcataactgccctctttgactgaggcttgggcttcttcctctgaccatccctttgctggggacacttgtgctttctctttactccaagtcttgggtgctggcagcgtttcyaggtgcgatccgtctggcacactgtagtttccttgctgctgctgctgcttagtctccatgggctttcttctctcctttttccttgtggatggtccttggggttctggtggtactgcctctgtctttgtgtgttacacaccgtcactgggacgtctcactctcccacgtctttggttaacagccgtgagaagctcattctcaaacctaygtctagatcccagagactacctgctggttggagtgtttttcttggttgactggtaaaggctcagactcggcctgtctgtattcttcttcaccttcccccactttttccccaaaaatattccccttccttggtgcctgtctgtctcaggcaaaggyaccctcatgccagctcccagtgtgtcctctacaatgcctgtctgccctcattcacacatctgcagtccatcctcatggttctagcacctctgtctctaggggcgtcatccactggcaccatgctggtccaggccactgtggccttgcccctaaaacaccgcagctgtctcttcatactgcttgcagccatttatcaatccagtatttttccacattcaaaccagtgatcttcctgaaagcacaaattgatcatattacagtgctttctgaaagcacaaattgatcatattggaaaatccttcaatggctgcatgctgtccttaggatcaaaaccaccttcctaacgtggcagtgaggcccggcatccgcctgcatgcctgttgagcccagcctgtcttgccatcccctgcgttgtgctccagctgccctgcaccactggcaggtcccaggaagggactgcctctctctgcagacctctgcacacatccttccttccctytgaactcccttcttccttaacctttgcctggctccttgccttcagggctcagcatggaagttgcatcctccagaagcctttcctgattccccaggcctggctcagctgtggctcctcagtgctctcagaacactctgtgcctcagccaccctgggatgtaaacatggcgggtgctgagatactcactggtggaatgaaactgctgtcagatgttaaagaaacatactgcacacatgcatgtgtgtgcttgatattaaaaggcttgcacagccccatccccagtctcccatgttgaaattttctggtttttttttttttttttacaattgatggggaaacaaattacaaatcatatctagaccagtgaccataatgctataagttttttctttgttttcttaacttgtgtttaatgaggaaggggagtagaagagaggagacaagtgaagtaaacagattcctggcagaaactcttaaagatgaagtgctatgaaacaaaccactgtcttttaattaagagggttcctatcgctcagcacttggagaggaatagtagcttctgaagaatacatgctattgagattcaccagtaggagccacattaaccctcataaaggactattccttgtaagctgcttagagttagaaagatgtggttaatttagatcaaaggagaaattcaaagttagatttaacagagattagcattactaaagatttcttagaaagacacccaactgtacattcgtgccaattttaagtctccttacagaagtggacattttaaaacttagtgattaggttctgctggaggagggtctgacctttagttcttggggtctttcatttctaaattgaatgcagggagctcctcctcccgacttgggcttctcaggccatgtggagacctctgtgggatgataaatcctccaggttgttcagagggggcctcaagggcaatgttcagcctggacttctccatcgctggaggactttaaaattaagcagagaatattcttgggttctcgagatccttccgttctcctggctcactcagccaccaaacagatttacacaggtatactcccagcactaaagacttcagtctttgaaagtctccttttcagtactccatttattttggttgccatgattgaactttctgtgtgtgtcttaactgtccatctgtgtgtctgcttttagttatgaggctataaacctcctgagaggaaggctctactctgtcctgtttgtaaccccagcctaccctggtgcctggtacacaagaggccaatcaatatgaaaatgtcaattaggtgataataaaaatcaccagcattcattgggcacttactgtgtacaggtgccatactaagcatctcacgtaatcacaggaagtagccacacaagccttgaatcctcgtagcacagagactgttcctgaacaatttttacaaaggaaaataatgatgcaaatatttaacatacatgcctgcatatggtagttactaagttttatatagttgtacatagcaacatttaaataagtgggcatgtatgttcaattttgtgcctttctaagacatcttcaggttttgctgaaatgggggtaataagactcaccttgtatgtgtctgggaagattcagtgaggtaaaacatgtaaaaatctagcacagttcctagcactcagtaaatrtctatttctccttctcaagtaagtaagatggcttttgtgcctgtgatagtttaaatgtagtctttgtagaatgaaagcaaggtgtaaaataacctcagagccctgcttgctttccatgcatgctcttctggcttgttgaccattagctcatgagccagtattacctatacaattaattctgttgggcccatgccatgcttttagtgagctgctgctgaagctggccctgggccgtaggtgccctccctctggctttgtctctgttcctgccgtcttctcctctccccccgcagcatctctgtctctgcaggacatgtcccactagcacacagttcacatgtatgtacaagacacaatccccactttaatccaccctcccttctactgctctgtttttctgttccttcacaaaagccttctttaaaaacgtgactttcgctgttgtctttgccttctcactgcgtgctctctcagcccattctagttgagcctctgcctttaccagtttctgaacttggtttggccagtgccatcaagtaatttccatataccccaatccaacattgcttgtgttaagtcctcatttcagtctctcaccagtatttcccccttgtctgtttctttgattttttttcttttttcaatgtgtaactcacagtcactgcaacacacaaaccctacgtgtagagtgtgatgaattttacgtatatttgcccctgtggaactacttgtgcagcgtttggtgtggttggatgggtgctccctcctcctcctcctcatccccactctcattttcctcctgtgtcactggctggtccttcagcttctgctcagctttcagatagtggagtgtctcagggatgagttctaggaccccttctgtgttttctccgtcactcctaggggcgcttatatgatctcatggctttaaatgctatctacatgtgacagctctcaggtttgttctctacctctgacctcttctttccacttcagactcatattttcagctccctagttggcatttctacgtggaagtcaaataggcatctcaaacccgacatgtcaaaatgaaccatttctctccatcccctccccttctcttccctcaccctcccttagctgcttctccataatcatctccatctcattaaatggtttctctatccacccagttgctcaaaatgaaaatttggagctcatctttgattcctttctttaccctcatattcagtgcattttcacatcttgttaacacatgatctaagaatatgctgtgtatttcttctccctctctctgtagtccaggttacttccatcttccgcttgggctgctgcaacagcctgactctccccctcactcctgtgatcatccctacagcccattctcatgcagcagccaaagagatcacttaaatgtgaatcagattgtgtcactttcctgctaaaagccttacatccaaaacccatgctctgctccaggagactcggcatgatctggactctgcctgcttctctgacctcaacttgcacgtyacttacttcctgccagccttgcttgctttcttgctgtttctcagacgcacccttcctgcctgccttaaacctttgtgtcagttgttttctctccgtgaacttcctttccgtgtgtgttggaccttcttggcatgcaggtctcagcttaaatgttaccttcccagagaagcccttccatgtctcctcctccctctgccactctaagaagccctccagtcacattatccttgtttttttcatcacagcacttattaatatttaatacctgattctatcttgcttgttgtccatttctaccacagaacttgtcttcatgaggtagtagggcctttgctgtgccattcacagctgtatcaccagtgcctagaacagtgcctggtattcagcagctgcacgataaatatctgtaaatgaacagatcaaatgaatactgttgctcagtataagcaaatacagtgtaactattgtaacagctggcctagaacctgacccggtgaccgaatgagtggccatgtgagtgataagtggcgtttgttgcagggaggagcaagtccccatggagctggtgcagcggggcgatatcgtcanggtggtccctgggggaaagtttcyagtggatgggaaagtcctggaaggcaataccatggctgatgagtccctcaycacaggtgagatggcttgtttcatgttccctcaggaggatatcatagcagctgtcaggtcacatgagtgctggatggggctgagcragtgacagttgtctctttcctacgtctaggagaagccatgccagtcactaagaaacccggaagcactgtaattgyggggtctataaatgcacatggctctgtgctcattaaagctacccacgtggkcaatgacaccactttggctcagattgtgaaactggtggaagaggctcagatgtcaaaggtaatgaagaaatttttaaaactaacttcatctttctcgttttagaaattatgtgaagagttctgggaaatcagacagttttattgagtagarattgattagtaaatgtggttaaatgaaggagattatcccaatctttatccatgcttgtggtgttttatttcttcataggttgtaatttcccatggtcttggtgttttattttcataggcacccattcagcrgctggctraccggtttagtggatattttgtcccatttatcatcatcatgtcamctttgaygtwggtggtatggattgtaatcggttttatcgattttggtgttgttcagaratactttcctgtaagttgaatgccttgggctatatggtggttgtgttttaaataatctactgacattgatcctgttctttcatatcttagattcactgggctttaattattcattacattttatttgcttgcttctcttattgacagcaaaatctaagccagagtaggataaacagtcactctccttctgcaggtttctattaaagatctcctttacattctacttagataattttcacagacaccaattggtgctcarttgtaatgcttgaagcatttacaatatgtattattggtcctttttgaggttatgaggcatacatcatagaaaatagttcactttaaatctcaatggcatgataatattatttaatacattttaagaaaaatatcttttgatgtatatatttaccagtaccatctttgacctcccagcttcccaagtaatgtaaatagctttttatgtttgtttgtttatttatttatttatttgagatggagtctccctctgtttcccgggctggagtgcagtggcttgatctcggttcactgcaacctccacctcccaggttcaaccagttctcccgtctcagcctcccaagtagctgggactacaggcacacgccaccacacccagctaatttttgtatttttagcagagatggggtttcaccgtattagtcaggctggcttcgaactcctgacctcaggtgatctgcctgtctcggcctcctaaagtgctgggatttcaggtgtgagccactgcacccaggcgtgaatagctttttataatarttaaatatttactaaacattgtatgtgaggcaatggaatatacatttttgagtttaaaaaagtggttgaagaacactatcttaggaaatatggttttattaaacctcagaaaaagaaaggaaaatacaggccacccctcaaaaaaacatatctgcttgaggaataaaagctatattacatctgtgattctcagttggsagctgtgacattttcggtgtttgtgactggggggatgctgctaaacatcctgcaaggcacatcacaggccctacaacaaagagttatctggccccaaatgtcagtagcactgaggttgaaaccttgataatgtacttaaaaagctaatggcacacttagaacagtatttggtaatggcacaatgagcggaacaatgtttttaccttatcttattcctagcccagtctagtgcttgttataccatagagccatagaatgagaaaccatactgggtgtggtgatgcacctgtagactcagctacttgggaggctaaggcagaggatcatttgagtccaggagtttgaggctgtagtgtgctatgatcgtgcctgtgaatagccactgcactccaacctgggcaacgtagcaaaaagtacaaatacagaatggataatttttttcttttaaaaaaaatccttcacataattaaaagtatatcaaatattctcaggacacatgtcatttactaggatgtattttctccctcaaatttcccatcttaaattgaacaatgttcaagttaaacactttctgacatctaaggaacctcagtgctcttaaaagtaacttacagatatattggtagaatgtgcctgtggctatccatggcacctgactgcctataatttcggctttttcgggaaagcagtgcgttggcatatggccatgggaagactcagtcctaaacaagttggaatctgtggctttctgctgttccatgcctttccatcttactttggcttcttttgtttttatctgcaatatcagggaggatgctggcaaatgaggtactgcatgttcctttaagatactgtcatctctctgctgtacaaaagtcattgtagagaagggctcatggtaacttccagaagtccacccagtcctatcagaatgccaggtgtgattttgacaagaattagtgtatttttaaaaaagattacataatctttatgtctaaaaatcttaatatatccctctacctaaatataactgtttctatgaaaattaaaagacccctttaataatacattattttagaatcctgcctttcagagtgaaataataaaatgtagatggaagctaaagaggctgtggtccatagccttaccttagacaactgtgctttttactataagtaagtgaacatagtatctcttgattatactccatagccaccagccatttttaaaaataaaccaagataattcaagctctcagaatgcaaataataccaagtgtctggaaagtaggtcatattttgtttgttttgggtacaaagaaaaaatagtgaaaaatacagagaagaaaataaagatacctccaaatcatatccctagaagtaatttttttgcatattggtggatacctttccagtattgttgaaatgctgtattcagatacaggcggagatttttgcacgaataaatcccagcacatgcgattttgtacttgctttttaattttgcagtgctgctggtacctttccatatcagtatgttccatcatcattccaatagttgcctcgtatcccattatatacatcacacctacagtttaattaaccaatyccgtattggttgtttccattttttatcattacaaaaacaaaacaaaacactgtggtaaatatccttgcatcttttcttatttatatgattatcaccttagaatagcatttttaagctttcctaatgatgagaaaaataacgataatagttactgtttcttaaatgccgctcctatgccaggtgttatgtactgtgtatatttatatgtttatatgtgtattgcctcattcaatccttgccacaatttatgagctatgcattatcatctccattttgtgtatgaggaaaccaggatctggatctgtgtggtccatctccagagtctgctttcccctatcaagggcttttatttgactctgctcctgtaatgcctctttgagggaaacctgtaggatgaagttggatagctgggatgtggagagcagtaacgtgttctctatgatggcagagcagtgtggaataccatctgtttccggaacccaagttcgtcacgttgtgtccaktgcccccctgaaatgtccttatgtgattagagttctgggagcttccttattgaactctcaacctgcctctgactctstcctgttttcagaaccccaacaagcacatctcccagacagaggtgatcatccggtttgctttccagacgtccatcayggtgctgtgcattgcctgcccctrctccctggggctggccacrcycacggctgtcatggtgggcaccggggtggccryrcagaacggcatcctcatcaagggaggcaagcccctrgagatggygcacaaggtcagcctgtagcacggctttccccatcctgagagatgaaagtagtatctgtttactatttcacattgagagaaaagcctgagagccactcaagacagcagtgttaattacatagaataggaagtcaagtataactgggaataacaacagtagcaacagagtagccaccagtcatataatggaacgctttatcaacattacttgatttaattgcattaacaactctgtgtggtaggtgcttatcattcccattttacagatgaggaaactgcagcaggaggagattaggtaacttgaccaaacgcctgcagctaaccagaggcagagctgggattcacacccaggtagccaggcttcaggacaaaagccccaccgtgacatctgtgggattagtggtgggtcctgtgaccctggggagtgaagagtgagtgacggtgtttgtgaagagtcttccttttgcccaacttactaacctctggccttccacactttcacctatttaatcagtatttgctgggcactcactgcgtgtgagccctgcactgggttctggcgatggtcatggtttccagccgccaaggagcccaccagggggaaagacagacagtgaaaaagtaaatagcaaagctgactgagtattacgagatactgagtattgactggtggtgcttgaygtcctggggacacttgaacaggggccaatcctagacttggggtgctcgactcagggacaagggtgctgcaggtggtcagggaagcgaatacgaacgttcatctgagaccttactgttgagtgagagctggacaacggagctggggaagagtgttccaaaatggggacagaaggtggaaagcacctgtggaggtggaacttcccctccccgcggtatccccagcatctaacctgagacatcaagtgcattcagaagttatctgttgaatgagcaaatgaggaactggaagaaaatcattgagagagaggaaccagagatgaggccgttgagggaggggccagaatccaaaggctgaagatttagtaaagkgttctgaacgttagcctagaagccacgtaggggatggcatacccacgtgatgtgactggatcgtgtgttgggaagatcattccggctgcagtgttaaggttgcgctgaaagctggcaagaatccctggaggaagatgagttaagtgtgttgaaggaaggaaggccaccgctcagcatcagaaacaaaaagctgaattattgtttgcttgtaagggagaaccctgcttgtgggacatggtctgagaagagcaacctgctggccttaaatgggtaaaattatacacttcaggaattactggactttcagaagcagggctcagggctcgactggccctggtcatggaagtgcaggtacctgaatgtagctgctgcccatatctgagcccagaggtgtggggactctgcagactgccattgactaagtgtgaccaacttaaaactggctctgggggtttgtttgtcattatggccatagaatagtcctttcctttcttgaactcagagtgtgaggactctattcccagtagcttttgcacttaggcaggcaaaaggaagctgaggttgggctcggcggatggcagtggacagggaggcaggtgtccctcagggtcctgactcctgacctgatgtgggggagtatgtggatggtgtcactgtctgggggacagtgctgtgccatctcctgtacagccgactgagggtttctggctttgcctggtcaaggtcaagcctcagtgtggctggtttgactggacacatagggaaacagtttctttgcagtgggagttgttgaaccctgagattgaacgacagaggatcacgttaggaagctgtgcaggtgtcttgtttcctgtctgaggcaggttgggtgaagttctgcctcaggagtgtgactatggaagcccctccatctgtattgtggtcagtgagttgtggttgtttttggcagataaagactgtgatgtttgacaagactggcaccattacccatgkcgtccccarggtcatgysggtgcycctgctgggggatgtggccacactgcycctcaggaaggttctggctgtggtggrgactgygrmgsccagcagtgracaccccttgggcgtggcagtcaccaaatactgtaaagaggtacgtggacttgggcgtggccctgccctccccgccaatgctcttttattcctcaccatgtccttctctcmtagctgccctcgaggagccttctctgtgtggtctggaaaaccacttagagggcccttctgcagcaggcggagatatagggctcacagtcagcccttgccacagttccaggttatcacaaagggagttcagtgtcacaggcatttgctgaacatcaccaggcgccaggctcaggagaacaacaggagtgggatatgaactctaccctttgggagctcacrgtcttggggagtacgggcagtctggaaactcagtgctttgacagtgcttagtgcaaggggacacaaacatgaaatgggagtactggggtggaagggagaaatctactcccctgggagcacctgggacagagaggaaccagcagaggtgagccagagtgcccagcaggttcctggcacttcgtggagaagcattgccttcttttggtctctccacaggaaaggttctattttgttttctcttaatttcagtctgaatataggggcagcagaacgcgtcacacagaatattgccctgacaacttttaaacagcctgagcaatactgttagcagtaaatgtagaaaggtgacatcattgmcttgaaaaacaattgacaactcttcctgatcaggggctcttccagaaacctcatttctagttttgtcctycatgtagggtcagacagcccactctttctcacctcacccttctgacatttcagggagaatcttgctcaccctcagtcatcctttatttgttgtgtggtctggaaaaccgcttagaagggtcctctgcagcaagtggagatgaggggctcacagtcagcccttgccacagttctaggttgtcataaagtgaggtcggtgtcacagccatttgctgaacatcaccaggcgtcaggctcaggagaacaacagaagtgggatgtgaactctaccctttgggagctcacagcctgggggaggacgggcagtccagaaaccccagccattcctttaccctgccaccttgtcccctcctcctccagggtctgatatacaggcagttatctcttgatagtctcaaagagctttgttaacactacttattccattgtttttaatgaaattatttgcaacataaaattcacatctccctctctttggcatctgcagtcctctttaatttgaggtgtttgatatgagttgcctttttcctttccagtcggtaacctgttcactgtcatgaggcacccacccagggaaggattttaggctgtttaaaatagtctcattcaacttacagctataatatctttaccaaaggagggagaaataattacaagttactagtcactatcttaacctttcctatctgttccacctccctcccctcctttctctcagttcccgctttccgctgctctcttgccaccttcaccctgtgtccctgtcctgcctgcccctccctttcacttcacccctcttggcttacagtttcctcttcctctctttccaccttcccaggaayttggaacagagaccttgggatactgcacggacttccmggcagtgccargctgtrgaaytgggtkcaaagwcagcaacgtggaaggcatcctggcccacagtgagcgccctttgagtgcrccrgccagtcacctgaatgaggctggcagccttcccgcagaaaaaggtattgctggcttttgtctctgcagctgkttaaaagtagaggtgggtcaaaccacagagagcaccacgcccagcagtgattgcctctgctgtgcggcagacggttcatggctaaggcacccaagcctgcctccccacacccaggaaagtttctcttatgttcttgggtgcgtctaaattttgttgcttatggctgccttaaattcatagagcattgtttagctgacccatgattttgattctcctctttcttatcccatatcggtcttgcttctcataagctacagagtagrcagacgggaattccactttcgttcttcctgtttccattctgtatggtagaattctggtatttacaaagcaggcagaaaaagtcagggaaagcagagggaaatgtctgcccaagccaggaagggacactgcttggagggacagctgcttttgaagaatggccttttttattctcaaggtagcttgccagccaccagaataaagggtggaaaacactcaaaatctgtgactagtgtttttcctaagtgttggtagtgaaattgtggcttagattgtgtggttagaagccatccaccaccttccagcctttaaaaccccaggatggcctttccatgagagcttccagagcctggccgttcagtgacacctcagctagcagcacacgctgttagaaagtgataggtgagaggtgcattagcctcgggagttacagttttaaacatttcatgtagacgtgtctgattatttgttgattcacctggggttgttgataccaagcagtaatgaatgtagtcaacacttgctttgtgtgctgggcaaatacctgagtgcttctaatccctgcagaaaaagaatcagtggatacttctaagacaaagacggacattgccttatgtttaatacgtttataccatttccacccatgtagcatgtactattaatgccccatcttaattcatacccacatgtcctacacattaattttactttttttttttttgtcctaaaggatgctgtcacaagaggtgcttacaaggttacagtttttcagaatggttaaaaggatattttgctgttaaaaggattgcatggtttttagttcacagtgaaattggaccatttagaaataaccacagcctcttttgaatagatgcagnccccyasaccttctctgtgctgattggaaaccgtgagygkctgaggcgcaacggtttaaccatttctagcgatgtcagtgacgctrygacagaccacgagatgaaaggacagacagccatcctggtgrstattgacdgtatcttctgcttctgccttccttccgctctctcagaaatacagttttctgcagatatcaggcaaaagagtcctcctttataaaagaaaagaagacaaacaaaagccttcctctcttaatttcaggcctgttttccagaagattgtctttttgtcttttctcttcattctttccactggctccatcttggccccagagcagctctggtctggcctcagtctccttgaccttggaattctaaactgtctgtgtcatcatcattgctcttgtccaggtgggcagttcagagtcatccttctccttcatccctgcagacagagcaggaattcacttcccagcaggtttaactacaggatgcatttaaataatgagatccatgccacccttctctgtctgctttatttatttattattactttctttttcttttttagactgagtttccctcttgtcacccaggctgtagtgcagtggagtggtgtgactygtctcactacaagctccaccttccgggttcaagcaattctcctgcctcagactcctgagtagctgggattacaggcccccgccaccacgcccagctacattttgtatttttagtagagacggggtttcaccaggctggtctcgaactcctgacctcaggtgatctgcttgccttggcctcccaaagtgctgggattacaggcgtgagccaccgcacctgcccttctatctgctttatacagactggtgtcgcacagagtacaggtctcaagactgtgtgttggccaggtgcggtggctcacgcctgtaatcccagcactttgggaggctgaggtgggtggatcacctgaggtcgggagttcgagaccagtctgaccaacatggagaaaccccgtctctactaaaaataaaaaaattagcggggtgtggtggcgcatgcctctaatcccagctacttgggaggctgaggcaggagaattgcttgaacccgggagttggaggttgtggtgagccaagatcacaccactgccctccagcctgggcaacaagagcgtaactctgtctcaaaaaaaaaaaaaaaaaaaaaaaaaaaagactgcatgtgttttagtgctcagattctatcctgggctttacatcccagagagattagagtctttactttgttaatgttagtttctgctaatagaagtaacagtatatgcaagcaagaaataaaatacatgacaccttttgaatgctccagccaaatatgtctttctctcacattctctctcttttttccctttttctaagtctttgtaaatccacccgcccctcggctatcaaaccagaattggcacaactaaaggagtcgtgccctctcgtatgtcatcccttactctgttctcattcacacctcagccctaaaagccctcctgcttctatagctaagattcactcaaagagaaattctgccgaaatgttttctgcaggaaaagacgaaggattgattttctagtttggacatttatcactttaagtgatatctgttatgtctcttgaattttagtagctaatgtgtattgaattcttattacaagccrggcacttcgcaaagtgtcatacgtgctccttgcagaaagtttggaaaattcagctataaaggagaaaatgaaatcactcgtaatcctattccttggggagccactgcgaagatttcaattatattgcttccagacttttgtgtacatccgtaaatgcatgtactttttaaaaagcaaaaaaaccacattgtgttatataatttgatgttttgttttttgcrcataatattatatgatgagaacattgcaagtgtggtatcttggtgcggggtgccccaacttgtgtagctgctgatgctggctggttcgctccaggtgtgctctgtgggatgatcgcaatcgcagaygctgtcaagcaggaggctgccctggctgtgcrcacgctgcagagcatggktgtggacrtggttctgatcaygggggacaaccggaagacagccagagctattgccacccaggtacagccctttaatgttgcaaactgtgtaaagctcataaaagcagttagagacaaaagtaagcaccagttggcccagcactgagctgtactcctgctctttctcccttgctggatgcttttctctccacgtgtttcattctgtggccatgtagtgttgcacgtgagcactgtggtgctgtgcgaagatctcttccctggagcttgggcgcatgcatcctggaaaaaaaggagttccagggttctctaaccgtttcccagtctttgcaatggaaaaaaaagtatgtgacctaagggctragatagacattttctaacctttatgttaagggaagattttgccagctcagctcttctcactggggtgctcagataagtgactcctgggcagttctccagcagcccctgatgctgagtttggtctgtgaggacagcaccactggatggctgcctgacttctcacacagcagcggctccagtttggattcctagaaattatgcacctccaaatgtgtgcagagctctaggcttctgaaagcttaattgtgttccttgagggaagcagcagtacccctgttttccatggtcctccttgctaattatggacctgtttagcgtccttccccccttttctggctagcacttgttcatctattcagcaggcacttaygaagcaccacgaatgtgacaggcaggtgtggggccaggctctgtgaggagtgaaggggggtctgcccttgacgggctcatggtcttgcaggaaggtggaccagtgactgtgtagatctgagaagcgggaaagggactaggaaaggaaaactgcaccttcccaggacagagcaggcagcaggagcatttcccaggggcacagagtagcacggcggtttggagatgccgcggggagctgaatggtatggtcragtgtggcaccagctgccagaccctgggaccctgggactctgggaccctcggaagcagacccaagagttgagctgccctcctctgggagatgcatggggtctactggatgtgaagcaggagagtagggagggacatggccggacggatgctttggaaagaccatgggggcagcacatggagaagacagttggaggactgagccgtggacagggagaccagcaagggggttgtttgcacatccagaaaaggacagggcctaaaccagtgcagggtgttggggcaggagccagggataaactggccctgtgacagcaaacctgcagggtgtggttgaccaacatcactgactggacccagaggccgagggcagagggggcaagggtaacttgaggtttctgctgctatctgataccttttgccaacactaggcattgccttccttttgtcttaggttggcatcaacaaagkctttgcagaggtgctgccttcgcacaaggtggccaagrtccaggagctccagaataaagggaagaaaktcgccatggtgrkggmtggggtcavtgactcccyggccttggcccaggyagrcatgggtgtggccattggcaccggcacggatgtggccatcgaggcagccracgtcgtccttatcagagtgagygtggctgcagccaggctgtgggtgctgggagggcaatgggcagaccccttcctcactgtgtgctcctctccatcagaatgatttgcyggatgtggtggctagcattcacctttccaagaggactgtcygaaggatacscatcaacctggtcstggcactgatttataacctggttgggayacccattgcagcaggtaggcagctcttacccactgtgctccagctgcgcccagaaaggcttctstctcccaggttcctgctggggttagtgagtggctcactcactggctggctagaggcgttttagaaaggctgtttttttttttttttcatgtcccctgctttatatgtctttaaatgagaaactgtggagaggacctgaaaccttcattcactctggtcctttctaaaaagctagtggagatgcttggctgtattttctgatccctattttattgtggccttattttctgagccatttgttaagtcatatagtctgagaaataatcattagtaagaattatggggcatctgctacatgctaggcacaattattggtgtttcagaaccttatcctgaacattaatcctgcccaagtttcactctgagttacacaaatgatcatggaaagaaatggctctttgaccaggcatggtggctcatgcctgtaattccagcactttgggaggctgaggcaggagggtcatttgagctcaggggttcaagactcacctgggcaacatggtgagactccatctctacaaaaaattttaaagttagctgggcgtggtagcgtacaccttagtcccatctgggagtacagaggctggggcagaaggatttattgagcccaggagttggaggtggcagtgacccatgatcgcaccactgtactgtagcctgggcaagagtgaaaccctatctcagaaaaaaagaaaaagaaaagaaatagatttttctgctttgtaattccccctcattccccctccttaagaaccatctctcccccgccccctgctccctgccccctgcccccaggaacatggcaatgaaaagttccagagtgctcctccatgggctgaggagagatcaagtttgtaatcacagcattcctgcctcagtctcccttgtgtctgagtggttagtggtgacttgtgtaacagggccttggcttcctgagcccagtgagtcaggcaggtttacttcttgtccccagagccggctcaggagcttaattcccccagtgtatgtgcctctgccacacaaagttgaccatacctgtctcctgaccctgtcctgggacctggctctcattcctcttctaaagatgtcatgaagccctggaggcgagatcatctgctagagaaggactgtggccctcagccgtgtttgtcctctgtgggactgtggctacaggatgggcaactggctccctcagctcctgcygcttttctcctcccgctcctcccactccttgtggtttgtcgctgccctggagctcgccctgaaatgggatgccacctgtgggtggttctgggaacatcagggcgagtggaagagagccaggcccactcaacagcatcccacacccagctttctaggaagcctcactttgsggggggcctgtgggcaagatccattggcaggggcttctgagcacgccaggtggagacctcactgggggccgctgagggtggggcagcccggtgcctgaagccctctcctggctcctctccccagacctaggtgtgagtgcgagttctttcttccccagrtgtcttcatgcccatcggcattgtgctgcagccctggatgrgctcagcgkccatggcagcctcctctgtgtctgtggtgctctcatcccygcagcycaagtggtgagtcccctcaggtggagcatctgtgggaggctcccaggaggccttgtcattctgcatgcttagcacagtggaacttgcctctcatttcccattcattcacctgggacaaatgctgcagtggcagcccacatggagcctggtgtgcatgcatgtaacttatcagcaccatgagcaggcaattcactgctgcccattcacgtgctgggctgcccttactctgctcctcaagggctgtttatgtgaacatcaagcagacatgggtccctgtgtatgatctatcacttttttatttaaaaaagatgttcacttatttatgagtgcattcatttaacaaaagttagtggcagcctacaatgtgcaaggcatttgcttaggaagtttctaaatcaggtgagctttcctggaaccatagggagtttaatgtccttttccttggaaactcttgaggttttgatactgaatgttattaaaagatggatgagaggccttcaccaggcttagaaaaaaaaaaagccttgtttctagaatggctcagatgctgttgcgttcctgctttccagctataagaagcctgacctggagaggtatgaggcacaggcgcatggccacatgaagcccctgacggcatcccaggtcagtgtgcacataggcatggatgacaggtggcgggactcccccagggccacaccatgggaccaggtcagctatgtcagccaggtgtcgctgtcctccctgaygtccgacaagccatctcggcacagcgctgcagcagacgatgatggggacaagtggtctctgctcctgaatggcagggatgaggagcagtacatctgatgacttcaggcaggcgggccggggcagggacttgcctccactcaccacaagctgagcaggacagccagcagcaggatgggctgagctagcctccagctttggggacttccgctccctggatatgtccagtcatcctgccctgcagcacgcggccttgtctgggtgcagctgggcttggcctggagaggacggccctgcctgcctcttggcctcacgggaccgtcagcatgggctttgtcttggactctagtccttggctggactgtagaaggtgagaggcgagtcaccctcctcacagacctctgcttggagtatttaggatgactgctgtgaaatggagaacagtttcatcaggaccaaaaaacctcactgggcctttccagagaactgcagacctcactgtcagggtctttctgatgacgcctgtctgtgtgcatcatgtttctgagaccacagtttacctcaggtgtgcctgttgctttcttcctgcatagtctgttcctttcttcgtacatagtctgttccttttctctcctgtgtgcttgtcagtggggacccctcgcaaccctgcctgtcacctgggagggtgggaccaatgtccttgtggtctttgctgctgctctcaggcgcttctccaatgctctggagtgtgcatttcagcttgaacctgcttcctggctcacacatccccagccagggagcttgccacactcttcttcaagttgaggagagttcttttttgcttaaagcccccttctccatggagtgttggcttctcaatagagtgttgttgctgaccagctggagtgagggcctcagagcctgacctgagagtccgtactcggcttcctgtggggtgtaggttctcgcgattcaggacgtccttccatatccctgcccagcctgtggtgcttgaaacgtttgccccatgggaaacgtatgtgtgcaggagcctccctgcacggcccaaggggcttcgttttcagtcttctgactgtcacctcgtggggttcagtagagaattcatgtgactagcgcctggccttgtgtggcttggaggaaatggtactgcccaaataggaggaaaacacagcctccctgagcctgcattctgcacgctgcccaggggcttcagaaaaggagtggccacagcaccccgaagggagcatctrtttacctggcagtggctctcagagcagcagaacgggttcagttttagactctgaagttggttgtgattgacagaaccctttgggagcaaactagtagagttggattaaattctgggtgaaacccttttctcccacacaaaatagttttagtgatttttttcattgtccattacttgccaggggcagttttagcagcacttttgatagattacgtctaatcctcccaaccaaccagcagggtagctattactgtccacattttacaggcaaggaaacaggctccaagaggctgaggactttgcccaggatgacatagccaatggacaagcagtgtctgtcagctgtgaaggcttcactcttattgtccttctaccttgaatagaagttttcctgataagaataaacgaggaaaaggtccttgcctcctggaagaacaaatctaccaggtgatctattcattgtttcaactcagaatgcacttgattcaggaggtcatctgaccttcaccttggatggttagtttcactttttacatatagtttttgcagggttttattttataaaatccaagcgcgctgttgattgtgttttccttgttttcagccccccsactccagcccgcagcacatttccgctgtccgtcagtaattgtgtcctctctttatgcttgcttggggaatgttgttttctgactaggctgatcattatctaaagaatctaattctgttgatttttaaaacttttaggaccataaacgttgtgttcatatatggacatggaaatatttatataattttatagaaaataaccttttagatggtcaaagtgtaaggagtttttttgtcagataatcatttctacttcaaaaacatttcatgcaatattagaataaagttcctgtcattcctctaaaaatctgcctgtgagtgagatgcgtggtcagaggccagtgccgtcytgtcttcacgagggcttctgtgaggcactggcttggcttcatgtctttttagggggcagaggaggataggattttaacagtagggggaatgagggtgggcagagcccycttgatctgccatccccagcactggtgtgagtccctttctctaatgcaggcctgcctcagcggcgtgtggggagaacgctgaaaggcagctcctgtcaaagtccctgccccgctggatcggacacaggcttaaattaccgcatcgtttgcacccctctgttctagggtgagtgtctgcaaaaggctgttctcaaacacatctcaatcaggagggatatgttttgggttccttggccttgagggagtgagtcaggaggaggagcagaaaaatcttgactagtrggctctgctgggaaagctctgtgggcatcttggggtggccggggggtgtaagtgagccacacctgaagggagttgacagtgtaatcttcacccacaccaggacacttcaaagagtggaaggaggcactatgaatagttatgccaggacaactggcctaaaccgggactatccaggcaaactgggacatatactcaccttccttcaaagggaaatagacattgtgacatctccattgacacagactacgtactttagaaccttgcctgatcataggttccagagacatgctggtggcatagtccgttatcatatttcaaggttcycccccatatccacgtcttggtacctacacatctctgtagaatcattgaggtgattatctcatggctcattgtgactgcatagctagatggccagccccgccctccagcataccctggaggacttcatgccatgcgtgcttgactgtttttccggatgcctgggtacagaaatttcatgttgtgtgcatgtcccattgtgaaaagtgagggtgataccaccttaggaagggatcccatttctttagaagatagattctttctttttcttttttttgttatactttaagttctaggtacatgtgcagagcatgcaggtttgttacgtaggtacacatgtgccattgtggtttgctgcacccgtcaacctatcatctacattaggtatttctcstaatgctttccctcccctaatcccccacccctcagcaggccccagtgtgtgatgttcccctccctgcgtccatgtgttctcaytgttcatctcccacttacgagtgagaatatgtggtgtttggttttctgttcttgtgttagtttgctgagaatgatggtttctagcttcatccatgtccctgcaaaggacatcaactcatcctttttttttttttttttgagacgaactcatccttttttatggctacatagcattccatggtgtacatgtgccacattttcttcagtctatcattgatgggcatttgcgttggttccaagcctttactattgtgaacagtgctgcaataaacatagtgtccatgtgtctttatagtagaatgatttataatcctttggatactttctaaaacttgatcacattttcctgatatattcctcaggcagaataaatcacagcattccaaataacttttagtcttttaagaccttagtgaagaattgtgatgggattacctttttaataaacaaatgcagtaattctcattttttttcaaaaatgacatctggaaattgacatgttagaaaatagattctcaaattattctgctagattaccaaggaatcaagattaataaataaaamcttttttattaaagattaaaaataaaaacttattttttataaatccagcatagaccaaaatcagccaatcaaatagtttaattagaaagagattatttgaattgcwggggttttttttttttgctctaaaaaattatgacagtgttttagtaggtaaatttcctaatgtgtatacaattgagttagacaatttttatttgcatacatttttcttaattgcatctttgttttaaaaaaaaaacaaggaacgtatgtgcaaagaaatgctttaagcagccacttaggctgactgtcagtttccctttgcagattaccttgatgtgtgaggaagctgatttggtattggaaagtattgtggagctaggaggaatcaaactgctctattttcttcattttcaaactcaccttgggcaggcacgtaaacaccattgtccaggctttcattccagagggagatgtctactttgctgtttttctttgtgtgaagacaatgacagtggttgaaattacaggatagaatatgagaatgctaagtaatactgtgaaatcccagaatctactttattcaggaagatgaataaacagagatgtaaaaccatctaagggctaagatgaaaagaattaatggaaatttaacatttttgccctttgaaatggagacggctattaactgttctcaatttaaacataataactgcttatagcaaaaaattaagcatatagaaatatagaaagtggggggggggaaggcaaatactccctccccagccccaaaaggaaagccagtgaacatgacttcatggagggatgtcctttgtggatgaaccacatcgggacatggagggagcaaagccttcctgctccttgttgaccgacacctgaccaagtgtcagccatctgagacagaggtgctgcagtggcctcagagaggcctgttgagagcagatccaggtcctggtcaggtcaggggacagacaatgctcaaatacctccaggctgctgagtgctgggtgcctgggcaggttctgtcactcatcttgcctgtctggccctcctcacagtggcactaagagctatttgcataactgtcccatttccacagacgggatgaagccttaggttgttcagttgactgtccgggacacagaaggggcgttcaaacccatttggcactggcactaaagcctgtaatctattatgctccatctggaaagctccctcttcctcccaaaggtgaatgctggtgctttccttaggagttgaatctgtacttcctcagcatcccttggtccccttatgtggacaagaaaggtgtcctttggcaggacagtgtggcttatctcaagagccatcccgtgtctatctgaccaaaacaacctcctagtctgcagctggagccaatttaatcattttttatgcatctagaaatgcaagtatcagaaggaaaacatgggagaaggggaagagcatgaggctggrggttagccctgccactggatacctccatgctacaatatatgcaacacctgtactagcagcccagggttttagagcctcagatatgcatttagtgcagagtacatgttaggatgactcgacagtcaacgtatttttatcatcatgtgcatctgagcttcatgttaaatattcttgcaagtttatataactttttttttttgagatggagtctcactctgtcctcaaacaggagtgcagtggcacaatctcagctcactgcaacctccgcctcccaggttcaagcgattctcctgtctcagcctcccaagtagctggaactacaggcatgcaccaccatacccagctaatttttgtatttttaatagagacggggtttaaccatgttggtcaggatggtctcgatctcctgacctcgtgatcccctcatcttggcctcccaaagtgctgggattccaggtgtgagccaccacacccagcctggataactttttttaaggcttgaacattttttaaaagaaaaggtttttaaagggctcacagtatttttgatggctccaaagctccatgttctaccacctgtgtttgggtctacagaactccacctcaaacccctggacagaaatctgtcttcagcagttgattacaaagctaataccctggtagcttagaaaatagatcctcaccaaatccctgggggccactctacaaactgctccagacctctattttctcatctgtttgataagaactgccctcattactgccctgagctaggaggttggaaggggcagtccacaggaaacctgcacacaagtgcaaggtacgcagtggtcacaggcgatctcaacaggcagtgaatgtgtcatgccgtctccctcagatcatcctacctcttcgcagttgagtgcagtcggggcttcagccttctcatctgcacaaatggggataataatagttcctgtctcacagcactgccatgagggtatgatgaggtcatctgagtaaagcaattagaatagtgcccggcacatccggagtgctcaagaaatgctagcggctgttgtcatcgttgctgttaagagtgatgatgtctgtattctaggaaaaaacaaacaaacaaaacaaaccacctcagcctttgttcctggagcaggtaaaagccacctttctatgttgggccagaggaagttcctgttctggggcctgctgctaggacttagtggactgatgacaaaagtttgcctttaaaaagagctgcgtttgtccagttactggacaccaggccagacccccagttctcttggttcttggtggtctttgcatgtgtcctccacctcagtgtgccctgggtccagtggaagaccacggaatgtaggggaggttaatagcactggctttggagttggggcagacccgagttcaaaacccgactgtacccctcaaggaagtcactcaccattctgggcttctgaatcggtgtaaaatgagttcactgctgcctccgtggcttgtgaaggttaaggggaattatgtacataaaatgcctagcacggtgcatggcacacagcagacactcataaaaggcagtcatcattagaatggcactgatggggcatccccaagtagggactggagaggtaaaagctctcagggagcatctgggatggaatgggatgcaggctcctggaaaatatttattgaccgcctgaatgatgctggtgcacattggggattgaggacgtgagtgtaaagggtgctagtgaacaagagtgtggagatgaggaaagtgatgagttttaatgtggcatttcagtctggttttagaagacaggaccttatgtcattcagcccacctgccttatattcagtaattcgatcattttcagcaaccttttaaaatatctttaccttttctccaggacagaattacatcacctttagatatgaattcctaaagaatgtactaatttttgattaaaatagaacaatcttgctctgctgtttctgatgacccagctttgggggctaaatataaacctagcacggtggtgtggtacttccatcacagcagcgagtgggccgtggcatcgtgtgaatttaatcacagaataacctgctattaatagttcctggggtggggtggggagcagtgaggggatcgtctatttatttatttattttggaggaatatgggtgttttataaacttccattttctccttcctatttaatgttcggaattaatgccaaaatccatataagcttagatccagctaaaaatgttaacatgtattacttctgggaacctcaaagaagctgatattgcctgtttgtgacttaggatacacttacttgggtttattggggtttcctgtaaagtatgaagcactagatgctttaggctgggggctttgttttccccttaaagctccaccaatctctagttaatctttgtttttctgaataacagtgttttatatatatgtttgttttattattttattttttaaattgatagataaaattatatgtatctatgatgtgcaacatgatgcttagaagtataaatgcatcacagaatgatctagtaatgttttaatgttacttatgctatcactgtcaattatccttgctccctgtcccaccttagagcattcagaggataattccatccctcctgctcccagcatgcccctgtccccacccactgtgcgtgtgcgtgcgcgcacatgcacacacacccacacccacacccacacccacaaacccgccccaccccccccacccccaaccatgaagggaccttaacctgttttgcctctcacgggctcttcccttcttcctgagcctaaacattcaggctgctctaatgctccagggctttcccctgtgtcatccatgggtttactctgattacgccctcacctcggcagtggggaggactagtgaattgtgtccactgcccatgaagcagatctcctggagggacccaggttagcttggcctctcccagcaagtgggaagtcaccagaacgggggctgtggagctggaggtggcttcatccacagtgagtgaggaagagaaaagccacagcaaggaggtcactgcgggaggggctcccatctccaggtccccagggaagtcctgagcccatgctgagcctggaaggattcagggaaggcacagagcctgcctcaaggaaccagtgcagggaagacaagacacacacacatacaccacacacaccacataccatgcacacatagacacayacaccacacacacacaccacacacaccacataccacacactcatagacacacaccacacatatatgtcacactgcacacaccacataccacatgcacctcacatacatatatgccacacataccacatacacatagacacatatgcacaacacacatacctcatgcacatttacatacatatatgcaccacaccatacaccactgcacacataaacacactactacacacacagctaatgacagaaggagctccttgtcttaggagagggatttggtgaggagaaaaaatcatgtccggtctcagctttggggaggaagggtggcatctgggctggcactgaagtgtgatttcatggaagaatatgaaggtggaggcctgggtgggtaaggggtgtttaggggaaagccacatggtcagggcagaatgggcagagtgtctctccttggcaagctgtgggaggaagtgtggaaggggcatgagttaccaaggaaggctctggtacacatctctatgcatctctgtaactactggaactgaggggctgtctgggatggctctatgtgtctatatttgtgttttgtgtgtaggggtgtgtgtgtatgtgtgatgtgtagggatgtgtgtattgctatttataaacaaaccatctagattagtacaaggaaagaaaaaagttaattccacctttggtagcatctgttctaagaatcacttccttgtttgtttcaatttctatggaaagtgctcaccggcagtacttttgctgatgatgtaagatggcaattaagtggagaaattatcagaaagctgacacaattttctgctagttttaatcagttttagaagtcagtcgatgaaatgtgatgttcctgccaggtgcttagcttggtatgaaatgggactcctgtcctcaagctgctttgctagggggtgcctagacgaaggcagtggagttttgggaaaacaaatgagcaactaagaaagagctaaacagtggcgcattccttctaagtgcaagagaaatttagaaaggagtaatgtctagtaatgccaggaaggcttcccagaggaagaggtgtcaagggcctgaggtgcttacgtgtgctggctcgccccttgccagcagatcttgttatgtcaaaggttctgagaagtcctgcagcgtaaaatccgcatttcccaaacatactggtgggaccacagaatctctcctcccacaatacagtttatatcagatacagagaagagatcttctgggaatgctgctgagagagggtgagaactgagtgaggtcaggcacaggagggatttgctcgggaggggaagagagggcttatggtccaggtggtgcatgattgttgtatgcagtgggggtgcatcctggctgctggggagagcgggaaaggggatgagtaggctgagtggggccacactgtttggagacaggcagaattcaggcaggacggaaggaagcaggcacagccagcagtgctctcttctttctcttccaccaactcaggagactccaccatcccctctctgccccattctctgaactgtggccccaagaatgcagaagtgggggtcctaggaagaataacagggcagatgggggctccatccctagactcaaccccactggcaggattgtggagaccatcaacagacccagcaccccctctcctgggactgggggaaagaggaaaagaggtttttgtttgtttttgttttagagaaggggtctggctgtgttgcccaggctggtctggaactcatgggctcaagtgatcctcctgccttggcctcccaaagagttgggattacaggtgagagccacttaagccaggcctgagggggtgtttttttggttgttgttttgttttaaacagtgggggaggagagtccaaaggacatctgaatagggcgccaacctctagaaggccaccaggtggccagtcccagacaggaatgactagagggcaaggctctggggagaagcagctgtaaggtgggagggtagctgaaaggttgaggaaggcgtggttttcaaaattgatcaggagtaggttgttcctcctcttctttacccagccccaagccctgagggtgcctgatgcttattattaactcgagataattcatagagccccsaaaggggcttcgtctgaggggtgccaaaaggcaggtacccacctggggaaaataggaccaaactgctgcctgtgggtgagattttctcttgakgttcacctgcaatgaaaccagagtgcctcctagctttggaggacagctgctcatctctgcaggggtggctgagggctaattgggcttgggggattgtccccctgtcctctcctcccttcttttcccctcccctccccttccttcccctctcctctcctcccctcccctcttgtttcttcttttacccccttctctccttccatcttcctttttttccatcccttccttctctcctcccttctttttctctcttcttctttgaacaggcagctttggagctgtttgtctcaccagtggctctcaagtccacagcgccagccccaaagcatctgagtggctgccggcactttccactgtgagatgtgctgcctgagggtctggtgcttggctgtgggctttcaaccgatctcagtgtgggtgtggcacaactgacactgttgcttttcctggccttaacaagccacccattccatcgcctccccaggtggctgtggtggtggcagtgaagcctgtcaggtcacagagcagctcctcaccagcccatcgcattctgtctccggagaggtcccatcacaggcgatggggcagagaggactgagtcgcagcccagatctcagtgtctaggactggacttggtttgtcaaaagtgtagtctcccatccctgctggcattggcaggctgcagtgcagagtgcctagggctcatcaggatttgccaacagaggcttgtccaagaatcatccagccagctccacgtgaggttacattgccatcaccggactctgatggaggattcagacagcccactccatgcctccagcaccacaccctgcagctggcagaacagtggcccccaagacatcctcatccgaatcctcagagcctgtgaagggcaaaaggagccctgcacatgtgattaagggtcttgacatggcaagaggatcctggaccatgtgggtggccccagataatcacaagggtgtttctaagagggaggtaggaggatcagagaggagatgcaatgatagaggaagaggttggagggatgcgattggagatggaggcagggccacaagccaaggactgtggtggcctcagaagctggaagaggcgaggaatagatcctcccttggagcctccagaaggacccagccctgcccacatcttgattttagctcataagacccatttcaaacttccaacctctgggacggtaagaggacaaatttgcattgttttaagccatgaagtttgcagtagtttgttacagctgcaacaggaagtgaatccacccacctaagctcttctgcaggtgtgatccctgtcccacaggagtcactgctgtcgcctggcaggttgaggctgcagtgagctgtgatcacaccactgtgctccagccagggtgacagggccagaccctgtccccaaaactaaataaataaaaataatttaaaaaattaccgtgaaaagtatcaactgctttgtatatagaaatacaacccagcagtcctgggaacaggagcctaagcctgggccacgcccacccaagacttctctgaagaagcctctgaagctgagcgcatttgggaatcactagtgtataaacagggctcttttctggagatgacccttcctgtgtttatctgccccgtgagtcattaagaaaagggcatgtgcccagcatttcccaacgaactgtgaaaccttttttcaagcgataactcctgcggttggatggtctgtaaaggatgaactgatacgccatctccaccctctgacactccctgctcaagaggccagggctgcctgcagagaggtgtgagggaggaacaagaaaacaaagacgttaagtcttgacagttatgttttaaaaagcacaacccacacgtataaatgagtggagagattgcatgatcaggctgaaccaacacatatccccaacacacacacacatacacacacacacgcacacagtgggtggggagggatactgatgagaaagaatgtgagaaagattacatcaggttgagtttctgagaaaatgctttggacctccgctccccagctgagtgggagagaggggagagcagggggcacatgtctgtgagaaaaagatgcttgagccccttaagttctgacggcttgaaggtagagcagaccattatccccttatgctgcgttaatgtcctggaagaggagttgcccagagcttcccctgtggcctgggtgagcaaaggacaggtgttgcctggatgtgtgcttaggtgggctactgacagcaagagctccgaggaagagggtrcctggtgtgccttagagaggcacagcccccaggggtgccccacctcggtagattcccttgcctggaggtagacttgcaggaactgctctgagcttagacactgaagactgaggagcaaatccgctgctaggctgggatgagcagccttctttcctgcccttggatcatttaagtctcctggatttctgtgagactttgggagcctcctggagtccagtaacaaccaatctgtaatttccagcccagtggaattagagactggaatagcagttcactagagacccaggtttatggattgagaggcaaacctgctagatatccgaacgtctgctctgcaccaggtcttgaaggaaaacccagggcttgccccatctcttgccacacaccttactgctcatggtcactgcaggtacttgacagcctgagaaatgtgtagccgcttctccattctcagatcaatgtctgcgtattgaccagggtcagcactcaatggctgcctcctgatacagcragctctctgcctagctcctctcccaccaggcgtcgcagagctgtgaattgcagttatcacaagcaaaatgaaatgagtttgagcctaaggggaatccataattggagtgcaggaatgttgcagtttcacagctgggcctcaggcacgatggggcagagaatctgaaggccaccggaagtccacttgcaataaatactcattaggtgactgtcgcaattgtaggtgagggatctacagccaagaaacgattcagacaaggctcctgcccttcatgagtttacattctagtggaacaaagagacagcaataataggcaaatcctgtcatttctgccagtggaaagtgccatgaagacactgtagcaggacagcagggtagaggaggcagtgatgagaggtggggagggggattgccatgggaagatactgccctgtgagtgagaaagccctgaggggacccggctgggagggtcagcactggtgcacatgggtaggatggagggaggcaggaagaacaggcccagatctcaaagacaccagcagagcaagaagttgacactttattgcaaagctgctgggagacattggagggcttgaaggaggggcgtgacatgatttgcttcatgtggtgagtggattgtaggggagtgaagaggccatgccctacccagaccctcctcagggctcacctgtgctgcctggcacagagcaggagtggaaatacacgttggctgaattactgtcaaagtcttatcttttctctgtcaagtcttagctggcttgagaccatgtagttcccttcatctggaaaatgacaccaaatattctataactagctgttatcagacccgtttcaggagcagtgcaaaatacaggcagcagcgcaaaatacaggcagcagctcacatctttctgctgagaggtaaaacgcttgctgagagtatgttctttggttgcaggcatatacattgctattaaaatgcctcttggattcctcactgcaacgtcatacctggacttccacaaaataattccacgtattgcctagtccttagctcctgagcctggtgatagaaagcctccctccctcctttccttccttccttcttcctttccttccttccttttctccttcatattaatccactatgagctaggcatgatgcattaatagcatagagatgaaagtactcactttctttgcttgcatttgagtgggggagtcagaaaagcaaacaagcacaagaaartgtcacagggacggtggcaggtgaggagagcgacatgctcacgcaggtgcgcagcaggagacctgcaaaggcaggtcaccatggcaccgtttgctcgggacacagccgagacgtctgcttagggaagtggacagacaacttgcgatgtgtgtcataagagaaagtatttactctgcagcattcagaatgaaccaacaggatctgtgtgtatcaatatggggaaaacacagtgttgagtgaaaaaaattacagatacttaaagagtcatgaagattaaaaaaaataattttatgtattgttctagacaccagtctctgtggtcaaagtacaaacatggtctggggctatataccaagttcagatcggtggtttcctatggggagcaagagaagagaatggggtctgggagaggtgtgtcggggccttcagctatatttgtaacttgttatttctaaaactatgaagcaaatgtaccaaaatgtcagcactggttaaatctgggtagtgggtcagggattttgtcttcttattctctgtatttatatacatatttaaaatatgtgtaaatttttaaaaatacacgtgggtctggtgtttgtagagagggcaggactaaagctatagcattggctcaccttcacagcaggctcaggtgaatcagtgggctggggagtttcacctgggcctcggcactggccactggcacttcacacagaggcgagcaagggccttgggaagcacttatttttcacaaagcaggtagagaaagagaaggaaaagatgggaataggaggtttcagaaaggagcagagccaggagagatgtgtcataaggaggtccaggaaagaaaaataatttctaattatggggccggtcatggtggctcatgcctgtaatcctggcactttgggaggccaaggtgagtggatcacttgaactcaagagttcgagaccagcctgggcaacatggcaaaaccctgtctctacaaaaaaaaaaaaaaaaaaaaaaaagaatttcaaaaattagccaggcatggtgacgtgtccctgtggtcccagctacttgggaggctgaggtgggaggatacttgagctggggaggttcaggcttcagtgagctgtgattgcaccactgtgctccagcctggatgacagagcaagacgttgttccaaagactaactaaataaataaaaatagttttaaaaattacatggaaaatgtcaattgctttgtatgtagaaatacagagactaagagtgaatccccatatacccaccctgaacatcttgaattaaataattgtcaaggttttgccatatcatttttgcttcttctattcctccttttctttctttttctcttttttatttgctgaagtaatttaaagtaaatcccggatgccatgtctttccaccccttcatackgccttgtgcaattctaaaatatccagacactgagaaagatttttaaagcgggaagtgtcagtcacattaaatgttacagatgacttgagatgaggaccagggggctgtcaggaaagttccaggatggagaacagctgaaggtgcagaggtggcaggaggaagtgctgacccccaaggcattgctggaattggcactaggagttcacagagggccttcgagagaaacattcaagaaatgccaatcattattttgagaactgtgatggtaaagaggagaaggaagatcacctttgagcatgcagggatgaggcacagaaatatttttaggatggagagagatcgatatttggaagctcaggtgacaggtatgaaaaaggaagcaaaactgatggaagaaattcccagagggacagaagggaatgagaggacactgggatgaatctctcaataaacaggaaagaagttactgaaacatctagaggtgggaggagaagggcgacattcttggaggacactgagtttgcagtttgggacgtgagaattcggaactccctggggcagagaccagggtcaacccagaattgtgatgatattgtgatttatcgggtagctgctgcaggcacttttgtcatctcgtttaagccccatcaatgcattttgcagctcagaaacgtgaactcagagatgttaagtaacttaacttgcccaacacatacttagtaattagcagaattgcttttagcgcagagcccttctacacagccctgaggaacactgtccttaaaccacaggactcgctggtagcacctgtcctcagtagcgtgtgggtttccctakcatctcccagaaaacagctcactggattggctcaggtgtgtaagggtacctggatatgtgagcagggcaggggtggcagaagatggaagattcaggaacctaggggtgcctgtccatctttgttcttgaattatattatttcctctggaattcctgcttctgctctctccctctttccttctgtgagcaccctctctgggtgctcaaactcctccttgtccccagctacccccagtcttttactcaggcttaataaaacttgtccttcacctggcagcatcacatccccaccaacctgctgccatttgttgagagagagagacctgggatgtcgctggtccactggcaagtcacttagacgaggaaggaacggttgccctgtggagctccatggtgatgtttgcaggtgcagtgtgggactaggaggtgggtgggctggcacccataagtcatattcatggtctttagtgaatgtccgcctggtcagcagatggrcagctagggcttaagcccacaggttagcgttaacggggccttacttgtcctcctccgcataagggaatggagaaaacactggtgagcgagacagacctgagtttggatcacctcaggtgatcacgcagcttcccagagcctgaggatgcagtgagaatgatgccggagaatgatgcatgggaatgctcagggggtggaggaagagttgaaggggtagaagggtactgaattcttgctggtttaattgaagggggaaagagtgtgtttaaataggattctcagaagaaaaatcactgaggtaaaataaattttacatggatgatttaaaagatgaaacttaaggatttcttggataactgacctgaggtgaccctgaggggctctgggccaatggcgccccagggaaccaggccctacctgggatgcaaacctaggaaagagggctgggtcagtccatgctcggatggctggaagggccaaatccaagccagcacctrgctccatgtggctcctttctctaaactaaaatgcagactaaaataagacgttttcaataagggaagaatgcgttgatgatagctaccacttgttgaaccttaaatatatgccaggcaccctgataagtacatagaaaccctttacatatctattctccccagctctcacacagcccatatgtaaaatactattgttcctgctgtttcatggagaaagaactgagaccagagtacagaggccattcactgggccgttcactgggctgttcactgaagcttctccctcaaggcttctgtaatgcacaggaaggggctctggaaggggcccagccatgggttctcttggtcatgtgttttgcaagttttgcaaagttagttattaatatttcacttgtaattggtttagataggtttcttcatgccggtgtcccctccagcacatacacgttcccagtgttaagtgtcagtgattttttttcttctttttgagaagaggtctccctctgtcacccaggctggactgcagtggtgtgatcttggctcactgcaacctccgcctcccgggttcaagtgattctcctgcctcggcctcccgagtagctgggactacatgtgcacaccaccacgcccagctaatttttgtatttttagtagagacagggtttcaccatgttggccaggaagttctccatctcttgacctcgtgacccgcctgcctcagcctcccaaagtgttgggatttacaggcatgagccaccgcacccggccacgtgtcagtgattttaaggggaaaaggtcattgagttgggcatacaattagtttgaatgagtgagatctattcagatgatttgctaccacttctgtgtatcaagtgctccctgtataggaatgacttccaggacccaggactactcccactgtccacttcgtgactcacccaggggcatggtgacaggggcgtgtctctgcgtatatgtagaggaacatgaacagtagaggaaccccagatctgtagcatgtggagttcaaagctactctggagaattctcccaattatctgacatgtaaaattgttagcagagttgattctcatcaacaaaggtctctcttgtcaggaacatacttaatgtggcctatatacttttaagcacatcatgcattgttttctttttcaatggcaattccaagaaatacaattcactgcagctattgtatctttagggcagaaattaatagtagtgctgtatctaatgagtatgtctatgcgtgaagtggcatattctacacattccaactatcgataatgaaacatttctatcaaccttgctagggaaaaggctgaattatcttttatgaaatcatagccagatgaaaagtcaatcagagccccaaagcacaggataaaagtattgcagaagtgtattggttgataaaaacatgaaatgatttttctttattgtttactgtttttgcggtactttccagctcttcaatatttgtaatttgccgtgaagtatttacattctaaacatcacttttgtacctaattttgtatttgtaattttatatccttcttttcttaaggaaaatactccagattgtataagatttaggcccacaaaacctgaatcgattcttgacagagtaattaagtaacagccgaaatcacagccactaaatggccaagccaggatttgaagctggagttcaaacgtgggcctcaaaagggcatcttggactctaacatgtgcccctggagtcagggtcttgttaaagttcagattctgactcagtagatgtgggctggtgcccaggtgctgtgaggctgctgctctgtgggccacactccgaggagccaggatctctcagctaatgcactctatggccagctctcagacagtgcaattaaccattgccactcagggaggttgtgggagttgcccagagtagcagagtcagaggctgaactcacagctccatcgcccgccttacatggtggcaggtgggctaagtggggaatcccaggagtcagctctgggtccccaagaggaatgtcccttccagcccctgtcccctgtccctgaattggcctgagatgctgcagtcagtctcaagacctgcaaggtgagcaggagaacactggcgtttccaktgcgacagacatacctggctgacctctacttgcctggctttctccaccttggtgacagtgctgctcagccctgctaagcgtcaatttccctatgtattaaacgagcttaatatgacccacctcatcgagttattcatggattaaatgaggcattatatgacaagttacacgatccaactctgcatgtattggcctgtagcacccgtggaactggtgattgttgttcctgagctgaactgaccttgggaatcaagtgacttcttcctgcagcatgtactctcagcttccttttttctcaatgtgtgtgaagaagaaactgtgttagaatagaaggacatctgcaaacatctcacacctgcagagggctgaacagaggtaagggcttgatggcagctaattgttccctgacagatgtcagctttgcctgtctgtctctcttaacatgtttgcagctgtgcagcaggctgacagcctctggcattctctttctgccgggtcctcccaaatgcacccaaaatcccagccatgctgcttgatcaccacaggtctgcctgatgacaacaggctgtggtgattttatttgtcatctttagagcatgtgtagcagtatttctttcccagaggcatcagatgtttgtactgcagacatcttttccaggagaaaaggctaatagatgagggcaggctgtatttcctggctggcccaatcctctggagacttcctggtcattagcatcccccagaaggacatgcaccataatggctgcagactctaggtggtgctgccccaagccctgtagcctagagcgtccgacatcagttgcagcctggcctgggtttgggttattttaagctgcccctgcaatgcagctgcaaatccagaaaaagaggactgaggggcctgctcatcagggaagagctcagtaagcacacgttgtcactggcttagagagcagggagacaatataattacagtcattccaagaggttcattctgctgcattgcccttttcaggaacacccctcccatttctttggcgccaatactattttttaaaaaccttcctggtaaatttcaaaatgccactggtaaaagcaaactgcctcacttagctccttggttatttgtttaaaattcagtgtatctcagtagaatttttttatgcaagggattgaagctcctgaccctgccatttgggggaaagggatgtctaagagtagggggaggagctttcaccttcaacccgaggtcctcaactgcattccacacgaagcgttagctttaggataacatgagcacagactgaaccctgagaatgcagtttgcccactcatctattaatttggtgtgtgaattaacaggctttgcccagaaagaggaagtggtgaagctgtgaaattgctttccttggaaagctttgttcagtggacacctgttagtcctgaatggcaggcagaatcctgggttcacaagtgttaattttctaactctgaagctccttctattgtcatttccatccgtctaacttttcagattcctaagtattttttctgcttcattcgtgtatgtattcattcatccattcagtgagcgtgcattaaatgtgaactgtgtgccaggactgcactggacatgggggccactgtcgctgcccttgagcttccaaagccgtgatgggtggatgagcaggggtcagtaggcagacaccgaggtcagtgccactggtagcccacatgtctggggcatgtggagctgtggagcatcacttactgggtctaggggctggcgaggcttcctggagtggtcctagagaaacaaattggcaataattagggaggaagtttagtgaaagaaagagaaaggcgtttagagggaaatttggaaagtgtggccaaggggtgtaccacataaaccctctctccagtcccccacagcttttagtaagagatcagtttcccgagaatgtactgtgggctgggagctctgtggaggatgtgccaggcatggctcggtgctcctgaggctgctgcccccacgtgatacggagaaggctgtttgcagaacagccactggtagcagcacaaagaacaagcgtgaatgggaaacaggtctcaagagctctgcctccctctcgtgtccattcacttcttaataattaccgaatacctgctgcacacactgtgctcgggactggaaaaacagggaaaaccaccgcatcttggcccttttggacctttacataatgatcagcaaatagatgaatctgtggtttgtcagaccatgatggaggaagacagctatggagaaagacgaaggaaggaagtgagatagagcctgcaaggctagggtgagggtgggaggtgccacactgacaggtgacattcaaacagatccttgagggagtggccatgtgggtgcccgaagtaagggtggtccaggcagaggaaagaagcgggaaagccctgaggcagcagtgggcttgttgtgttcagggaaaggcaaggaggggaaggcagaagcagagcagtgggagggagtgggtcggagaggaggagatggagctgggcagtgcatggagggccgggaggctctgtctcgggcaagtttagaagccaatggaggctgtgggcaagggagtggcagatgtgacctctgtttcaatgtgaacacccactgtcaggtcagcgtgggcccacgcttagagcagccaactggtgcctagcaaaaacaaacaaaaagcaaaaaacccagagtctccagaaaccaattaagcaaaaatatttatagaacatctagtacgtgaaggacattttgctaggtagttggttcctctcctgaaggagcaagctttccggatgagttgaagatatgtgcatgcgcgggaggtgatggctcattgcagggcagggcatcatctgtgttgaaggattgccagtgtttcagaaatggacacagagcaggtaygtttgatggacagttaagaggaacactctctatgtgacagcactgttttaagtgccctggatcttctggggatgagactagtgtttttcagtcgtgcatgggacagttgaggatcatgctaggcagaggtgagccctttcctggaaggagttaacctaaaaagcataatctgcctcrtctgggaggagcttaataaatctctcttcaatgacgtaatggtcaatcagaaaatttatattttagctgtaaaattacttatcacaatttaccatggggcataatcttagtcaagcacccaaagtaatgatttcaggcaacagatactgaaacaccaaagtgataaggtggcaggtatttcagttagctaytgctgcataatgaaagaccccaaagcttagcgacttaaaacaatgatttgttattccttatcattctgtcagctgggagtttcttctgctggcctcacctgggctcatgcacaagactgcatttagctagggtgtcagcttggggatgggcatagctgggatgctgggtcacctgagtctttctctgcatgtggtattgttttaaaatacaggttttagcgctgcctcaggatgtagagtgtaacaagggggctggggtgggcagcgtgggcctgtcaggcctgtgggtgctcgtgtcctccagattcccccgcagctgactccgcagtggtccgctccggttgcctggcgcagatttgagttccgaacagaaggctgtgtattctctgccgcttattgtggcctcgacaggccrtggttactttggccactgccagagcagccttggcactatggaggagcctagggctacccctcagctgtacttggggctggtcctgcagttgctacccagggttatggcagcactgcctgaaggtgtgagaccaaattcgaatccttatggttttccatgggaattggtgatatgtgcagctgtccttggatttgttgctgttcccttttttttgtggagaagttttagatyggttaggagtcggctttatgtgggaagagagaaagagcttgctatagcgctttctggactaattgaagaaaaatgtagactacttgaaaaatttagccttgttcaaaaagagtatgaaggctatgaagtagagtcatctttagaggatgccagctttgagaaggaggcaacagaagcasaaagtctggaggcaaactgtgaaaagctgaacaggtccaattctgaactggagcatgaaatactctgtctagaaaaggggataaaagaagagaaatctaaacattctgaacaagatgaggtgatggcagatatttccaaaaagatacagtctctagaagatgagtcaaaatccctcaaatcactactaactgaagccaaaatgaccttcaagggatttcaaatgaatgaagaaaaactggagataggaatacaagatgcttcgagtgaaaattgtcaacttcaggaaagccagaaacagcttttgcaagaagctgaagtatggaargaacaagtgagtgaacttaataaacagaaaataacatttgaagactccaaagtacacgcagaacaagttctaaatgataaagaaaatcacatcgagactctgactgaacgcttgctaaagatcaaagatcaggctgctgtgctggaagaagacataacggatgatggtaacttggaattagaaatgaacagtgaattgaaagatggtgcttacttagataatcctccaaaaggagctttgaagaaactgattcatgctgctaagttaaatgcttctttaacaaccttagaaggagaaagaaaccartttatattcagttatctgaagttgataaaaccaaggaagagcttagagagcatattaaaaatcttcagacrgaacaagcatctttgcagtcggaaaacacacattttgaaagtgagaatcagaaacttcaacagaaagttaatgactgagttatatcaagaaaatgaaatgaaactctacaggaaattaatagtagaggaaaataacyggttagagaaagagaaactttctaaagtagacgaaatgatcagccatgccactgaagagctggagacctgcagaaagcgagccaaagatcttgaagaagaacttgagagaactattcttttttatcaagggaagattatataccatgagaaaaaagcacatgataattgtttggcagcatggactgctgaaagaaacctcaatgatttaaggaaagaaaatgctcacaaaagacaaaaattagctgaaacagagtttaaaattaaacttttagaaaaagatccttatgcacttgatgttccaaatacagcatttggcagagagcattcctcatatggtccctcaccattgggtcggccttcatctgaaacgagagcttttctctatcttccgactttgttggagggtccactgagactctcacctttgcttccagggggaggaggaagagrcccaagaggcccagggaatcctctggaccaccagattaccaaggaaagaggagaatcaagctgtgataggtttactgatcctcacaaggctccttctgacactgggcccctgtcacctccgtgggaacaggaccgtaggatgatgtttcctccaccaggacaatcatatcctgattcagctcttcctccacaaaggcaagacagattttattctaattctgctagacgctctggactagcagaactcagaagttttaatataccttctttggataaaatggatgggtcaatgccttcagaaatggaatccagtggaaatgataccaaagataatcttggtaatttaaatgtggctgaytcatctctccctgctggaaatgaagtgagtggccctggctttgttcctccacctcttgctccaatcagaggtccgttgtttccagtggatacgaggggcccgttcatgagaagaggacctcctttycctccacctcctccaggaaccatgtttggagcttctccagattattttccaccaagggatgtcccaggtccaccacgtgctccatttgcaatgagaaatgtctgtccaccgaggggttttcctccttaccttcccccaagacctggattttgcccccacccccacccccacattctgaagrtagagtgagttccctttagggttgagtctgccttcaaatgagcctgctgctgaagatccagaaccacagcaagaaacctgataatatttttgctgtcttcaaaagtcattttgactattctcattttcagttgaagtaactgctgttacttcagtgattacacttttgctcaaattgaaacaatagaattataattctcaggatagtattttgtaaataaggatgatttaaataggaatcttatgagtaaattatttccattttattttattctagatagtgttaactattttaatttgattaatccactattatctaaacagtagtgggagttttatatatgtaatcttgcaggtggtgaggttttaaattctaaagtctttgtccttattccaagaactgtatttactgtggttgtagacaaatgtgaaagtaaatttatgcttaattgaataaattatagttgatttaaaaaatatatataggttgcattattcttcaggtatggagagatgaacagatcaagtgtcgattaccactgaaaagatggtttgttactcacagatcccaacagaagggaaagtactatgccatgcagcwccgaatagggaggcagtatggtcagcgagaagataggagtgatggaaaaacatgrgcaagagcctttacggtggtttccatgggaaggaatgagtgaggcaaggtgagcagggttaaggttagctattatagtttgagtagtttcagcaggctctgggtataggggctgtccctagttgtctggtacctggccttggggtgcttagggcagaggaatagtggcctagagtgtgtgagtcctgtggaaggctgatgaagtaggcagctgggggcatgagctctcgactggttagtttgtgtgtgaaaagcacgctcaagggcaagttgtttactgtctctaggaattggctaaccctgggagggacagacctgccaaggtcagcaaggccctagatgttgaagtgtcagaatacataaaaagacatggttaatatggtatcagagcctctgtcttcatgtggcctctcatgaagggctctagagtgagctcccttaggggatgtcaaaggccgttcaagacagcagaagccacaaggccacgtaaagcctcagcttggaagttatgcaacatcacttctgctgcatcccatgggtcaaagcaagtcacagatgcaccccagatccctgctcacgttgggaggagaggaacattaaccatgtgggaggggagggtcattgcagttgtttttgcaaacaacctgctacagaagatgtggcttcagagcactgcaaaggcgtttctgaacagaccagatcacataggaagagcagaaagaagtgagttccagctcattcgtctttgctaatgtggagtcagggtatagcttccctttcactgttggtccccagcatcaagggtcagttggatgtttgtccaggagcctgcagggactgtttgtacttctagaggagagttggcatggctttgggttgctgtctctgaaactgccctagggcctgggatcccggggagtgcctgcctgtgctggcagggagcccaggcctgtttgcaaactgtttgaatgcctcagggtcagggtctctcatggacatattattttcttatcaggagttaaaataactctagaacttctcctgtagaaatgcagatgctttattacaatgaaagtaccatttgtaaagcatatgcaattaggccaataacaaccaacatttactccccactttagggcccatgaagcactttctcatatgttcttccttgttctcacagtcacctgtggttaggcctcattatcctagtttttcatatgagaatactgaagctctaggggctccctgtcttgctgggggctcaaaattggcttggggccctaggagttgccctgggcccaagggtggagctatgggagccctacaaagcctgccctgtttcagtgaatcccttctctcccccataactgctcattctgtgtggctgcactcaatagattatttcaccctttgaattagatgcctcagggagtccccttagcgggctaagttaacctttgcagggggtactgacatgcccaggtacagcccagccctgcatgctgctctttgctccagggaccccagcctggtccaccatttgctaggagaagatttcagtccctccagaacacacagcctgtaaggagccacactggctcccagagcccgagccccaagtcaycactgggtacagtgcacgttcctctgctgtgcagtggtggagcttcatcctggtgagtcatttgttctgygtctaggtgtctcagtgagactcctacctgtctgcttcagagccacaggtgaagccttcattctcaatccrattgaagaagagaaggcggcatcacagctgagttgctctccatcatagaaccatggggcattgtcctcagacacacgctgacattaaccgaggctaatgaggcagagcctctcataatagcattctgtttctttggaaaccaaggtgtagttttttaagtgtcgcatggcccttgattacaatttgcatttcctagcacttattctaccatttttacagggacctgtggcaggcagaggggctctgggcagcttccctgcaggattccacttcctgcttgggtcgaccgcgccgctgcgagggagggcttgccccttgcytccctgctctctgggtgtttcctttgtgaagggagggacctggcatgctagaaagcatctcaaagccctgctgaagaggaactccggcttcccttgggttgctctgaagaaggtgctctccaaatgagagggcctcaggaagacagtggcatctccctgactgggtgagtcaggtgcagctctagccgaggtgagtgggacctgcygtgtccgaggtggtgacagcaggcactgagactgctctggaatcatggctctctgaggttgttgctctgaagtcctgcctctgggccctcgtccagtgtcgtgacagctcttttctctggaagagggaggacagtctctctccctgcacgaactgccttcagcctgacatttcttctcctgcttagggccgttctctgttgactgcttcgtgttgtctgctgtttctcttagctcaatgcttctcaacgagggtgcttttgacctcccccaggagcatttggtaatgtccacagatattttacacagtaactactggaggtgtgctactggcgtcaagtggttggagggcagggatgctgttaaacaccccacagcacacagaacagactcccacagcaattatctattccaaaatgtcagtactaatgaggttaagaaacactactaatgatgatgttcccctacctggtaaataaaattcaaggttttcagcctccrcatcagtacagaatgaatgtttcttaattgaaatgcttggagccagaagtgttttagatttaggattttggaatatttgcattatatttgctggttgagcattcccaaactgaaaatctaaaatctaaaatgctccaatgagcatttcctttgagcatgacctttgagcatcatattgatactcaaaaagttgcagaattttgagcatttcagatttttggattgctcaacctgtacttttcacaatatcttgaaaacggaccatgcttatcttttctcttttgatctagagcctccttcttttccacgtccataccatgaattcctattcaagcccagagaaaattattcattactactatgcattagctgctgaaggccaggtgatgttttcccagatctgactcatcatgatcatgatcatcaattatcattatcatcatcatcaacaacaattaccttagggtcatcataagaattgcatataagctagccaccaagcagtcatcagtcatctgyctttagcccagtgctacctgaattcagtttctgtcatcatgtatttcttaatttcaaaataggcagcagcactaaatctggtccatgggctcattaacatcatcatcatcatcatcattaatattaccatcattgtcatcatcactgcaaagcaggcaacaagcagtcattaagctcatgctgattctgatgctgatggtgaatgagaagcagcactgcagaaaaccacctcatgcctagcatcccagggccacaggtgctgtgtgttagattgagtgttcacttgtycagtgtgaatgtatttttgttaagagttattggcctttgagtttctggtgaccagatgcttctttctaaacacacacacacacacacacacacacacamacacacacacacacacacgtggaagactgttggagaaacccaaatggtgtcataggaggcaggtgtgagaagacactttggttgcacaaccaggtatgattctgccagagcagaagaccctatatggttctcttttctgccccagcactgcctcattatggctatgataggtttattgaagctaaagtttggrcattctggggcagcctttgccccacacccacacgagtctttttcatttttcggttgccactgaagtctggaaatagcactctgccttttcctctggccccatagaaaccgggacttctgggtgtttaacttagcatctgactccattagatgctcagggtctcctgcacttacacctagggataggaaaaaggggtgttctggggagagtagggggagcagtttgccctctatttggtggctttccttgtacagtggagagagcagccagaacctgaagtgacaactgagacatcgtcatctgacgtagagtctctcttccctccctgacctcgttggtgtgccacctctccctccctcccatttccaacagcatgcttaggaatgagttatgaagtgtcttattggaaaccaagacctcaatggcaatgaagggaagacactatagttagttattattgatcatctctacctgcactttctatatttgcaagcactttttgggacttagtgagtaataaataaagtgtctctagatcaccttgctgcttcccactgctgctgcctcgtgcatgcagttctagttgtgtacctcctggatacacacactaaggaggtgagaccttcaaaagaaatgcaaaatatttccacaattgtgtttgtgtacaaactgacctgtcaaaaccaaaactatatttaggtactagattataatcaacacccccagtggatgctattggtgccttgcccagggcccctttaccaggcggatgcactcatctcccagctttgagtattgctcaccgcagccacctgcttcctgaagaattgcccttgcagagcagaagccaccatgctaggaagttatccactccctcggcatcacatagccaataaccrattgctgtcagggctgtgttagttatctgtttctcaaaataaattactccaaaacttagtgccttaaacggacaatgaatatttgttatttcacagtctgtgtgtgtcagagatttgggagcagcttagcagaatggttcccgtttgggtttctcaggaggttgcccacagactgtccatcagggctgcaagtgacctgcaggcttgactgaggcaggtggccttgcttctggggtggctcactggcctggctggcaaggtggggctggttgttggcagaatgctcagtccctctaaccatgggactctcccaagttcagcttctagagtagctatgataacatactttctataaaacctatattctaaaatgtatttaataaaataactttcctctaatttttaaatctgcaacattgcagcagttcattttagacattgagaggctgaacattttagattctggttctaaaggcatgtgggtgccctcaacatcaatagcagcagctaataattcccaaagcttttccaggcgccaggccgtgagaagggcaaaatgtgttgtgattctgttgaagtaatgcctaccaccccttcagtcccacactgaaaatgtaacaaggcaactgggaaactgtcttcaacatcagtgctttttttcattttgcttctcttgatttttacatcttacaaaactgagaatccacctatatttattctttcatccaatgcacgttggcttctgacctcacccctgaaatggcttctccagaggtctgcagtaacccccctgataccacatcccaagtgattcttttcagtttttttattacatgacytttccatggagcttgaccccagtggataacttcccaagctcctcctccttgaaactstcctctcttggattttgagcttggatgacagagtgagaaaggcctggcgtttttgctctggactgggtaacccaatgaagctatgtggattttctgcacaaatttggaatgtaaacacacccaatggggcttctgcccagaggattgtagctaggctgggctggaggtagggaaagcagggaggaggctacgtgtttgtgggaggaggctgataaagcctgaactcggggaggcagtgagccttaggagagcaggtagattctagatacttaggagagccactgtcacagagctttgtaaagggacttgggatggagtgggcactgrgggagggcagaaaggaaaatagagacactgaagatgtgtccaggcttctccgggggtagttagtaatgccattgacccaagtcaactgatgtatttctgtgtttttgttggattcttcttcatttttgactttccttggctatatgaatttccagaagtacctgttccaggggcaactgacaactgagaggggtgtgaggcatgggagggcgggtggggcacaggcagctccaccgggcgccacccctctagcaggagtggtttctttatatgtaccagggatatttctgcattgaactctagaccatgtggaacttggctttttagcaggtcaaatgccaggcacaactttctagctggaccagatgcagccacactcaggaaccgtgcttcattaaagtgtgtgtggacccaggttctcttccttcacaattttgtgagtacagatgaggttgtgtggacattaacatcacaaatatgagaaggctgggcctcacttgaaaaaaaaagaaaagttttattgagatataattcacgtcatagatgtcacccctctaaagtttataattcagtggtttttggtatattcatagaattgtgcaaccatcaccactttaacattttagaacattttcaccacccttctctcccacaaaactctgtactcattaggagtcatgcctttctctttcctggcaaccttgtatctactttttgtctctacagaattgtctattctgagcatttcctataaatggaaccataaaacgtgtggctttttgtgtctggcttcttatacttagcataatgatttaaaagttcacctgtgttgtagcatgtatcagtaatacatcattcatttttattgctggataataatccattttatggatatatcacattttgtttgtccactcattcgttgatggatacttgggttgtttccatttttttttggctactatgaataatgctgacatgaacatttgcatacaagtctttgtgtggacttatatttcatttctcttggagagacacctgggagtggaattgctaggctattatggtaactgtatctttacattaacattgaagaactgacacatgggctgcatcttttttctgatcccatcaatgatgcatgagagttccaatttctccacatcttcaccaacactgttattgtctgtcttttttatttcagtgcatatgaagtggtatgtcattgtggttttgatttgtatttccttgatgattagtgttgagcatctttccatggtcatttgtatatcctctttggagaaatgtctatttaactcatttgcttatttttaaattgggttgtcctttttttgttgatttgtaagagttaatttattctggactccagtcccttatcagatctgtgacttgcaagtatcttctcccattttgtggctgtcttttcactttcttgattatgtgctttaaaccacaaaagatttttattttgaagaagtccgatttacattttttttctttttttgcctgtgatttcagtgtctaagaaaccattgcctaattcaaggtataaagatttattcccaggttttctcctaagagttccatagttttaactcttgcatgtaagactatgacccatattgagttaatttttgtatgtggtttgtaataggagtccaacttcattcttttrtaggtgaatatccagttgtcccagcaccacttattgaaaagactgttcatctcccatatgattgcctaggcttgtctaaatcaattgtccataaaagtaaagatttatttctattcataatttaataaaaatgtagttctattccattaagctacatgtctagccttttctagtgccatgcggtcttaattactatagctttgcattaagatctgaaatagagaaacttgagtcccccarttttgttgtaagattgtttcggctattctggatcccttgcatttttatattaactttagggtcagtttgtcaatttctacatagaagccagatgacatttttgagaggatagtgttgaatctgttcatcratttgggaaatattgccgtcttaatcttagtcttctgattcatgaacatggcatgtctttccacttatttaggccttctttaatttctttcatgatatcttacaatttttagtgtataagacttgcattttctttgcaagtgccaaatgttgctgattagaagtacactggaaaaacctttcagtcgctatacccttttctggcttttattactgtttttaattgacacataataactgtatatatttatgggatacagtgtgattatgaagccttgcacctatgttgtttatctcaagtattttttcttctagatgctattgtaaattgtttccttgatttcatcttcagattattcatcgctagtatatagaaatacaatcrattttttatatattgacctcatatcctgcaactttactgtacttgttcattggttctgaaagcgtgttttgtggattttccagataagagatcatatcatctgtgaatagagatagtttcatttacttaccattattcttactaaatgaattaataagtaagagctgtgggagtaagacatgcagtctagacagtctctagaaggtggccttgacaaggccagcagtgatcagcagtggatgagaacaggtttagtactgtgagattggagcagggattgaggcagagaaagtgaggaggaatgacaggcaggtacaaggtagaatcaagtgagtggtagatcaggaaatcctagataacaggttgccggtggcacagtcatttttattacctttttagcatgctgggtgcctctcctggaacacatttaaaggacccaaaggactccttccaacagtgccgtcttagcaggaaaaagatataagtctaagccattcttgttggctttgtgcagccaggataggctgtgaagtaggcaaagggcagaagaggagagagaactaacatttattatctagtatgtgccaacattttgcatatattgtttagtttaacccttacattactcctacttttgcaaatgtgaatctgatgtttgttttgtaaaacattcagaaaatgcatgatatttatgtagtggtagctgccatcacaccataagtcagttgcccatttctccatccatgaggcagccatcctctctattataaggagctcatttctcaattagttctttgaaaactgaaaagcatgtagatatagaacaatatcctgcattagtgcttcttaaccaggagtgtgtcaggagaaaaatccccaggagtttcttgtatttctgcatgtttatgagcaggggcactgcacttttgttctaattatctttttattttattttatttatttatttatttatttatttttgagatggagtctcgctctgttaccagactggagtgtagtgccacagtctctgcttactgcagcctctgcctcccaggttcaagcgattctcctgcctcagccagtaactgggactacaggtgcacgccaccaagcctggctaatttttgtatttttagtagagatggggtttcaccatgttggccaggatggtctcaatctcttgaccttgtgatccacccacctcagcctcccaaagtgctggaattacaggcgtgagccaccgcgcccagccctttttttttttttttttttgagatggagtctcaccctgtcacccaggctgtagtgcaatggcatgatcttggctcactgcaacctccgcctcctgggttcaagtgattttcttgcctcagcctcctgagtagctgggattacaggcacgcaccaccatgcctggctaatttttgtattttcagtagagacagagtttaaccatgttggccaggctggtctccaactcctgacctcaggtgatatacccacctcggcctcccaaagtactgggactacaggcatgagccactgcgcccagccttgttctagttatcttttcaactatttttttcaagaagattataaaggaaatcatcttggcagacaaaaataagagtccccctccagggaagacagattttcttactgtgtatgataataaarataattttggycaggcacagtggctcatgcctgtaatcccagcactttggaagtytgaggcaggcaggtcacttgagcccaggagttcaagatcagcctgggcaacataatgagactccatctctmcaaaaaaaaaaaaaaaattagccagacatggtggcatgcatgtgtggtcccagctactttggaggctgagataggatggttgcttgagcctaggtcagggctacagtgagtcatgatggcaccacagcaagaccctgtctccaaaaaataaaaaaaagacaatgtcttactatggtgtaaaagttgggcaggtttacctgcagtcctttcagcctttcaaaagatttgggtttctgaaacttggggctcctctgctgtgatgaacccartgtgtgctctgtattcacctgggccactctgcatcaccctgtggtgccagagaacaaagggaaccaacctgaacatgaagtttatgctgcttgctgtgctttgtttctgactcaggagtcttgtgtcttctgacggtgtacatggaactgcggcagactaactcctgtcaaggtgctcatctaaatcacctgtggggtttcaaaaatccatacctgcctgggtcctaccccagtgattcagattcagtatgtctggagtggagcccaggtacctgggtttctttaagttctctgaattgtcctgagcacatgaccaactgagaccactgttctcacaacagtcagacccccaagccgaccaaactggccaagcttctggcaaggatcagtgcacagttggaagtactcagccgggttctggagacactgtaagaagaccgctgcaggggtgcctcatgggaagagatggacctcctctggtggtcgcaacaggctttgtctgataatcacagcatccccctctcagggcatccggctgggtgcatggggcatgtgcaccgacaacttgaacaaccttccccagagggcagtgactgcagaaccaggacctgccctgagcattttagccaggctgtgagagggtgccctctcctggacatgctgctgctgctcacatagttccttcacttaaaaccaagtctctgaaatgataagaaaacttcaataattattctaaaaacatacatttgtgttacacacacktgtttctctgtytctctcatacacacacacacccctctagagctatatggcttgttataggctttgaaaatcttttatattcaccaagctgtccccgatggcacagctagaaggagctggagaaaaagacaagtcagtctgaagctttcttgtaggctgagagttacatttcccacagattggcttctccaggaaggggatgtggagtgttggactttcctgtgccaaagttgagactggggccctggggtttgctgaacactaatagaatttagcagactcttgttctccctgaagaaaagagcttttgaaagcaggcattgtccacagaaaagagatgaagtgtttaggctaagaggaggagggtcaggcagccgttagaagaggcttgtggttacgttggttgctatgtgggaaatttttgtaaaaatttaaaaagggaaaaaagaccatggcaagagcatcctgagtctcaggggttgtgtattggaatctgagaagtggagaggatatttaccatcacaggggggctgtcagatcacggatgttaagcatttggcgcattgggaacactccctactggtagctgtaaatatcatcattagctgcatgctcagctgttttattttttcccccatcccagggcagagggtggggggatgtaggcagtggtgtcagggtctagctgggaggagtgaggggacaggaggttgaagatgaggaaatgcctggtctgctatcttggtagccctagcttcaggccctgtcccacaggtagatggataaatgtcccaggtggagcccatagcaaacacccctctgcaccttcccaccagagttcttttcagggctatccaagagacagccagaatccattccctgcctaaagcacagagaatctgacttgagccactgtcttgtggctcgatttccctgcagttactaccgagtgtgagccccatccataaggaatatttagaaaaccatcttcagaggcagtttcccaccccacaatggcagctgaagaggacaatgctatcagagcctatgctggttatgggttctctgcagctccccacaaaccaccccaataccacatgcatctcagccaggctgacccaagttcctttttcctttaagtcaggggtccccagcccctgggctatggaccagtacttgtccatggcctgttaggaactgggccacacagcaggaggtgagtggcaggtgagcaagcgaagcttcatctgtatatacagctgctccccatcacttaaattaccacctgagctccacctcctgtcagatcagcagtggcattagattctcataggagcatgaaccctattgtgaactgtgcatgccagtgatctagtttccccactccttatgagaatctaacacctgatgatctgtcactgtctcccatgacccccagatgggaccatctagttgcaggaaaacaagctcagggctcccactaattctacatcatggtgagttgtagaattattccgttatatattacaatgtaataataatagaaatcaagtgcacactaaatgtaatgcacttgaatcatcctgaaaccattccccagcctggtccatggaaaaattgtcttccacgaaactggtccctggtgccaaaarcgttggggaccactgctttaagcgactgcaggctccatttgcacatttgggtttgcccttttgcaaacttctcagtcctttcgcgcctttcctttgaacatccactgggcatctgcttctcaccctgcagctgtaattttcagatttacagaacttagctccccagcaaaaccccagccaaccaccatcgcctcatccccagctgcagtgattggctccaagggtgaatacgtcacccaaacctggccaatcagagtccttttactgaacttccacatgtagggctcttctatcttggatttttattacctgggagggcataaagctggtatttcctgtgctgatgtcccagtcccctgactcacaaagaaagagtgtctgtagggagagagaacaggcccaacacatgaggtgtggagagctggagagcactcatgcctttgctttagttcctgaatccagttgtgcctgcagccacttctgtccctgtcctttcacagttatctgtcccaatacatcccactccctccttgatgatttgaattgttgctgacactttttaacctctaaagttgtgatgactacaaacttgttccccaagcagttcttcaatgcagggggtgtggtgtgtctgtatccatttagtctcaatttgaagattagaaacttgctggcctgtctcaggccttccaggctccgtcctgtgtgatgacttcttccttctttgctctgcatacagcactactgtcttcatcatttattmctattgtgatcttcgttattatttaaatcatacaaagttctgcattgaggatttcatgtattatatttgttttctccacaacaagatgacaagcttttggaattatttttacatcttaaaaaacagtcttttcaggactgaccttaattctgggcacctatccaataaataacattaattaaataaaaaacattttcccaaacgcagaagcaactgtgtggcctcctctgagcacgatcacattccctggtgatcgagtcttcagctgatgctgatcatttgaatgttcacattctcaatgtgaagaggccaagcagaagcgcatacggtgtgagccaggggaagagatttttgtacagctcctctaaagtaaacattgttttggggagaatcccagaaaaacacacattcatcgttgttgctgttttttcctgattagtctcaggaccacagtgattctgaagcagcaggtcctggtgaagctaaaggaagagggggatctgagattagggtgcagggaaggagggacaatacttcagcacagaaacaaggcccagactttctaatttgggatgcttttcgcatgtacttctttactgagggagacagagcttttgatgcatttaatactggcaaattaaaatggctaaaacacagatataatttaagctctctcctaatcctctaaacaaatactcgagaactgcaaagaaagcaaactaagctaatctccatctgagaaggtctccttagtttgacttctgttcctgtgaacccttggagagaaggccctggtacaaagtccttgccagggagctcattgttactgccaaggacaggtggatgtttaaggagtgtgtgcagacaactcaaggagcatgaaggatggatgtatgatgtttgtcagaaaatgggaagagctgaacaaattagccaagaacttttactaggttcatttacctttgtgttgtagtcagggtgcagtaaagaaaggcagggagttttgtggacggaatttaatacagcaggctagttagaaggacgttataaaaccaggggagggtgaggcaacccagagattagcaactgcaggaagccattaccactgctaggacggaggaacaaagggaggggactgagccaccagacccaggaactgtgagctggaactgtggaggaggggctgcatgagatgccacctgaggaccctatggctgaaaccatgggggaaaggccatcatggggaatgggaaatggaagccaagaagaggctgtgtgatggagctgggtccaaggaggaaatgtggtcacctacagagagagatgtagtcactgcccaagaaaagactggaaagggaggtggagctggtgtattaccaagtttccctcttcttccatccatgcctccattggctcaatctaacaggaagcaagtgggcacagaagccatcccccaacaataccaagcagagtaggggaaggtgggtaatgggtctgaaagcaagcagataacttgcctacctgtgccccctatttttctgccacacaagtctgcatgctttggggcacagcagatgttccaggctgagatgagatgacaatgatgatgaaaaactgtgtacagcggagtagatgttcccacttccaggcttcgataaacataaaccagtatatctattgatggttgacaggaaaagattcccagtcttccaagagtctcagatcccaccacccctgaggggcagagactagtcctgctcttcctgagtttctccacagtcagcaggtgccacaggagactcagatgaggcagggaaaggagagcctttcagctcttctccctgagccctgtttccccacctcttccacatctgggtatgaaaatggaccgtattgccactgggagaaagccaaatccctaaatgtgagctcgcatagcattactaatacacctgatcttcagaattttggttaacacaagtttacacatattttcaaaaaatcattgaccttacaaagcttttatttgactttcaattccattctattgactgcccttgcccccctccaacccccactgcccagtgggcaaacaatcctgatcaagctcacccttccctcctccaaatactctttccaaatactcaggactagaagctaggggttcgaatcaaaaatgaataagacacagtcctgcctctttttccttccatttccctagaacagtagttgtccctctcctgyaacccacccctgcggaatccttcgtgcagatgtcatgtcactgaggaaaataatgcacaaagcagggaaagtgaaggtgctgtgcttcagttgggcataggagccccaatcccctcctcaccacctcccccagcctgggctcattctggaaatccctggaccttttcaaagcagagtttgcaaatttctgcttcagggcaattcagtaaatgcatgtaaactccttagcaaatctgttgggagatagaacctaaattaggcttgtcataaaaattgctaaactttactgcttgtgtgcttgttggctaataggaatctgtcaggtaatggcaaataatctctattcatgggataaggctttgtagaaaaaaagcaaatgaaataatttgaaattgatttgtaaactataagctcttaaaaaaaatcaaggcttttctcttggtaatttttcttcctaggcagaaatttccaagaagattgaagagaaagggaatgaaggaacctcataatgaaggcttttccttgattccagctggctgaatgatccctgggctgtggctgccagcacattccgtgtgggccccaaacacaagcccatttcttatgtttgtgtctggtacataatttggccacatctcatgtcacagccctcctaaaaaagatgttaccacagtagcaccttccctgggccctcatgttcacccaaacagacttgtgtacaacattcatgacaacagtggcaaacaaaagttcaacaaattgagtttaaagatctaattggcttttattgggcattcatgcattgaacagtaacctatccaaagatttaaaaaagatgagctgagcagacgactttagttttatagacagaaaagggctaaagaagcagaaagaaggaacaagaatcacattagtcagctcagagttcctcatgcacctagcacgagtgactccattctggtttggtctggtctgttgggtcctagtgcaggagctcagtccaaaacacaagcctcccgtacatttcatttaacataagtttgtgtgcacttgattctgctgggtgtcttagtccttttgtgttgctataaaggaatacctgaggctgagtagtttataaggaaaagaggtttatttggctcatggttctgcaggctgtacaagaagcatgatgccagcatctgcttctggtgagggtcctgggcttcttccactcatggcagaaggtgaaggagagccagcacatgcagagatcacatggcaagagaggaagcaagagagggagaaaggggagggagatgagaggctctttttaacaactagctcttgtggaaactaacagagcaagtactcactcacccctagccagggagggaattaatctgttcatgagggatccaccctcatgatgcaaactcctcccattaggccccacctccaatattggagatcgaatttcaacatgagcttttgggggataaacctccaaactatagcagggggtgtatagaccttgtttccattgaacaactgtagctccctccgtatttagagtgctcaaagatgaggactgcatccttgcatttgtagctcactctgagctgaggtccctcacagccaccaccagtgttgctcagcactcccaggcacttggactgcgccccatggaggagtctgggaagcccctccatgcaccccgttttaattgttcctatcctcttggtctgccacaagaaaataccacagattggctgggcatggtggctcacacctgtaatcccagcactttggggggccgaggtgggcggatcacctgaggtcagaagttcaagatgagcccgaccaacatggagaaaccttgtctctactaaaaatacaaaattagtcgggygtggtggcgcatgcctgtaatctcagctactcgggtggctgaggcgggagaatcacttgaacccaggaggcggaggttaaggtgagccgggatcgcaccattgcactttagcctgggcaacaagagcaaaactccatctcaaaaaaacaaacaaamcycccccmcacacacacaaaaaaacaaatcggattgggtggttcaaacaacaggaagttattttctcacagttctagaagctgaaagtccaagatcaaggtgccggcagggctggtttctcctgaggcctctctccttggcttgcagatggccactttctcatcatgtcttcacagggcctttttctctgtgcatgcatccctggtgtctcctcctcttcttgtaaggctacagtcctgttggttcagggtctcacccttatgacctcatttacccttaattacctctttaaaggccctatctccaaatatagtcactttagaggatagggcttcaacatatgaattttagaaggacacaattcattccataacagaagggatatgaggaaaagtgtgaatacttttagaaaagccttttagaaaagcaatttggcaatatctattaaaattgttaaaataaaaaagatactcttctacccagaaatttattgctaagaaattatctcacagctagaaaaccaccagtaataacgaaaatgtgttcaagggtgtttatcacagggttgtyattgtggcaaacagttacacctggacacaatgtagatacccatcagtgggaaagtggttaaaaaaatcatgatgaaatacacatcaccagagaggctctgtggccattaaaaagaattaattagaactggccgggcagagtggctcatacctgtaatcccagcactttgggaggctgagctgggtggatcacgaggtcaggcgtttgagactagcctggccaacatagtgaaaccccatctctactaaaaatacaaaaaattagccaggcgtggtggcaggtgcctgtaatcccaactacttgggaggctgaggcaggagaatcgcttgaacctggaaggcagaggttgcagtgagctgagrtcgagccactgcactccagtctgggcgacagtgtgagactccatctcaaaaaaaaaaaaaaaaaaaaaagaaaaagaaaaaagaaaaaggattaattaaaactgtaccaatttacttggagtgattcctataaaatgctgtcatgtgagaaaagcaagatgcatgaagtgtgcatagggtgactataaagtgactgtaaatgataaggcaaatcttatatgcatctatattggtatataatcacaaaggttgttaacacgggtagcctggaaggtgcttatggaggggactgatgtgacagggaggttacagaggtgggatccctgaaagaggaaataaatttttataagattgagtcaagtaggctgggcgcagtggttcacgcctgtaatcacagcactttgggagtccgaggtgaacggatcacctgaggtcaggagttcaagaccagcttggtcaacatggtgaaacaccgtcactactaaaaatacaaaaattaggtaggtgtggtggtgggtgcctgtaatcccagctacttgggaggctgaggcaggagaattgcttgaacctgggaggcggagtttgcagtgagctgagattacgccactgcactccagcctgggcaacaaagagcgaaactccgtctcaaaaaaaaaaaaagattgtgtcaagtgaaattacaatatgtataatgcaatcacactttaccatttatatgaagttatataggtgtgtatatgtttaaagatgttaatgaaatgaaataaactcatgtctgtcccagaaaactagagatgactgggcattgggaggtaggcataaggcagagcaggaggcagatgaactagaaatggcccaacttgcctttactctcagcagccccttgttccccagtgggcctgaaatcttccagaatgggaggagaaggaagtgaaggattgagaagagttggcagagtcttcaaggatttactgtgccagaaggctcacaattttcctcatgctgtggtctggtcgtggaaacaaatacctctaattccctttaagtaggccagaaaatgagccacataaggatatgcattactggattagtgtggaggagcaagctcaaagccaaggactttcacagcagaaacattcattgtctgggcatgtcctgtctgtcctgggcagtctgtcagcaaataaagcaggtgtatagaaagatggtcttcattttcgaaatgaaaaattgtgttaatatcatctccttttatttttaacaaatcctaaaagaaacaaaatagagayggcttgaatcactgtttcccttggttctcctttgccatcttggggccccattcttcagaatcctgcagcttaaggatgtctaagaatggaagcagtgctcaggtaattgctaaatagttgtccaggctagtcagttaatgatgtttatagagtgactctaagaagtatgggcggctaaccaccagttggtgaaggcattcaaatgacaactatcaactcccccataagaccaccaggcaaacctttacaccaagcaaagctaagtttatgagacttaccgcagtggagagcacactgccttgtagggacttagtagcggctcaaaagaggaaaataaggagaagacctttatagcgttttagatcctaggctgggtaattttaaggtgggtcttgcaagcggagaactgattgggattgggtagaatttctgatataacagttatggactggtgagcacggtaaggtaaagatcttcaagttagttttgaggagtcagctaagtcttcagaagttaactattttagttggtttgcagtcttatcattcagaaacaagtactttctggagcgactaagttatttgacttggtctcagcattgtttagcacagggaccaaaatatatttggttttagttttcactacttaattatttaccagccggaaatttcctgtaattgggaacttactaagatggaatcatgacagctccaagatactgccccaaatctttgcttgtaatggattatgttgtagtaagtataacttgaagtaagaatgatgtaaaaaattcagaaaatgttttatctatagaaaaagataataatctttatttaagacaccaacagtggagaggttaagagcattggttctagagatagactgcctggtttcaaatcctagtgctgccctttactagctttgtgactttgagtaagtcacttgacggctctgtgtcttacttttctcatctttaaaatgggaataatataagttcattcctcacagggtattttgaagattaagtgagttactatatgtgtggcatttagaagattgcctggcaggtactaactgttcaacaaatgtgaatattattgtttaataacttgacagctatttaaaactaaaaccaaagtcctccacctgctggctttttaatcccaacttctccttcagcacctctttgttttttccagagtctgcagtcatttggatgcttgtcatctgcattaatcttagtctcttctctcttgagatctctacaccaccttcccaaaccattaccttgagggtaaaattcgtacacaaataaaggagaatgatgkgtgtgatggaaggtctaggtaccaggcggggaagctgaacatggaagaaagccttctgaagattacaagcttcttcctttatggagttttgagtgatccaggaaacatcatgacctcaaagtttttgtttggagcataaggctggcaagctttgtatatggccctcgctatatttttagaaattctttgctctcattgggcatttatttgtttggcgtgatttcagatgggacagagactgaaatctgggatcctgtggtttggtaatgtggtcatgtgtctaagacattcaattccacaagaccagagtctgactgtctatatacaaagggaagtgcctaggaggggaaacttgcttctgtacaaatagtaaagccagcccagagcctggcttctttacaagtctttttgttctacagagattttattctactgtaatgtattggcarctgcaaattttatacatgcccatttatttgctgttatgctgtgatatggttaaattcaaatctcatcttgaattataatcctgataatccccacatgttgtgggagggatccggtggtaggtaattgaatcatgggggcagtttaccccatgctcttcttgtgatagtgagtgagttctcacaagatctggtggctttttaagtgtctggcatttcccctgctggcactcattctctctcctactgtcctatgaagaggtgccttccaccatgattgtaaatttcctgaggcctccccagccatgcggaactgtgagtcaattaaacctcttttatttataaattgcccagtctcaggtattctttcatagcattgtgagaayggattaatacatgctatatatgaaaattgagtgaaaaggaataagtgtcacatccagacacaaatgagtgttttcctgttggtctctttcaagagagacaaaagtgttcatggatacccctagyagactgaacttcacatcttattggacagaaatgggtcaggtgctcacttctaagcttagtggccagacgatagaattaccatgactgactttgactggcatacaaatcatggcaccaaccacttggaccccgaaagcatcttctgtgcctgagaccgttgtgtaggtggtaaaacactgtttcatttaatcctacaccagccctatggactagctataacttcctcattttacaaacagggagacagagacttggagagtttaatcatcatcataaccaagcatttactgtgttccaggtgatgtcctaagtgctttacatgtatcagctcagctaatcctcatcagagccttttggggtaggctccattttaagttccttgttatagatgatgaaattaaggaatgcagagaaaattttcaagctctcacagctagcgaggggaagagtcagggttcaaacttgggaagtctgactccaatgtcagaggacctcaccatacactactgaggtcatgtaccaatgtcagcatacatgaccaagtcaggtggaggggtcaggagtcaaacacaagttgatctgcttccagtctccaacattttaattgtcaggctgtaccatagtccacaccatacattagtacactgctttagggctatcaactattcatttcacatatttgttcatgttgttatcaaactaaccctatgaaatataatatttgcaaaggagagagcaaagcctgggacatctaaataaagtcacagtgaataggagacagaaacaatctcaaacccaagtcaacattgccacaaccaattttcactttctaggctccccatctgtggaaaatgtaagatcaaccccgaatcctgcatgttgtcaaatacaggtatgggtcatttccttatttactgtggaaatgttagggatgtgggaggatagccttttctagaagcaaaccttaactattatagaattctggcctgagggtgcatcattctctacctctttattgatgctacatgaacactggtcaataaatgatagtgattaagtagttggtatcacttattgatggtaattgaaaacctagtccctccacgttgccagtgtttccctcactcttccaacctaaaagggcaacacagacttttactttgacatctttttaaagtattttagttacaaagggaaagagcagaatggatgaaagctggaatataaaacgacaaaggaatggatgtatcaagggaagcagagctttacatggatggaggagaactcacaagtgcacttggcaaacacaagccaggtgtaggcacaattcaagtgtcatcattagttgtgttttcaaccagtagcaacaggagacaaattcctgggcagacagggatgagtccctggtgaaacctgaacttcaaaccaaagacagtttaaagcctgaaaaccgagctgccgggcccagatagagtccacaactagagtccctgtcttaccctctctgtctctattgattctttctggatgatgccttttaaccaattgaatggtgctttttccaaagctcacccatggaccaatcagcatgcactcccccttctaagcccataaaaaccccagactcagcctcacagacggccatccactttagggccccctctcacagctgagggctgcccacttcaggccccttcttgggtcaagagcttttctgttgcccaagaaaattcttctctgtcttgctcactcttcgatgctcacgtacctcattcgtttggtcacaggacaagaacctgaaacctgctgaatggtgagtgggaaaaaagctgtaacatacccctgttcactgagctgggggcagttgagaacaagagagctgtaacatgcccccatttgccaagctgcaggtgtgaagaagagaatccactgggcaccgttccctcctggctggcttgctgaactacaaatgctccaacatttcttgggagcttagacctcaggactccctgggcaagagctgtaacaccccttggggctccacggttgctggcatctccaagttttcaggtgctactgtgttcgtctagacagtggcgcccaacaaggaagccactcgtggcacacccagtccagccacaggctgagcctgggggcatggtgggcacaggaaccaggccagggcaccagcctagtgcagcctgctgggtggagtgggtggagcaaacctggtgggcctgagcaaggccctgggcggaggtcatggcagctgcagacatttctggctggcaaagcagcactccaaggaatcctgtaacacaactgtgtttatttttttggcctttattttatttattttattttatattttttatttgttatttatttttattatatttattttttattttttaatgaaaagtttgtaatatttacacttttacagastagatagaaccatcacttaggtttcaccatttctgaagccactttaatatattcttggcaggtttttcatggttctgatggcaattgtcctcaccccccatgccacccttgtgtcccttcaacacttttataactgttggttcatttgaagaagtaactagattatgagatattgtgaccacgctttggtatttctacctgtctggtttttaattcttaggacgctaatttacaaaaccaaggttagatgctggttaaggaaaattatttgggatactactgcttcagtattctatttaagatcagacaataaacaagcttatacctggggataacatatacagcttttctttcagtaggaagtaggagtctcagcaatataaagacccaacagtccaattccaaaatgtcattaagcacagttaacaatgtatatattaattattgaaaacagctagggtaactaaatgacatcatagaatctcagggactgtgcttggcacatattagacattgaatgaggttttgatgaataaatgagtggctaatttatgcaatcccaacaagatcatagacatacgtggttcagtcctaaaacaatgtcacattcaaagaaayacaatttcgtaaatgaaattgttttaaataaatttttctttatcgttgtctttaaattctttagtctcacaccatagaaaatagattaaatgctaatccactcttaaacaccacacaacccttaccaacacctcatgtcctctttctctcttgcactcctactgttttagttcttttggggtgctgtaatggaataccataacctcagcagcttataagtaacagaaatttatttctcacagttctggagcctgggaaatccaagttcaaagcattggtagatttggtgtctggtgagagctcatttcctggctcataggtggtgtcttcttgctgccccctcacatggtgggagggcagctctctggggcctccttaataagggcactaattccattcatgagggctccatcctcatgacccagtcacctcctaaagaccccacttcctgctaagattaccttgggaattaggatttcaacctatgagttttgtgagctcacatacattcagaccacagcagctgttttttagagctttgtgttcactaacacccctccccacttctgtccagcccttgaagcttttactcctcctacttcctctttctattttccatcagataggttgatttcaaattcttccattcctcctgccgcctttctagtccttycttcatttctcattatctgattttttttaaaagagttattataatataataaactttcaaggcacaccatccatgtcatctgtaacctttcaggctgttaatattagaactatccctggtgaatgacaatttaccctgttcctacagccccagagaagagattttacctcctttccagaagagaacaaccatcacagtaagagcctcagcatgtgtgacctaaatccctgcttactgctgcctccacacctttccttcagtgttattcagttgttcggccacacccagaatacttggtgattgttactggcttatccttcagcctctttttactctggctatgcaatggcagttcacctracttttcagtgtaggccatgatcacttcagtcacctcttcccaacattctccaggaccttggctggaatttrtttattacactttttatttccataggtttttgggggaacaggtgatatttggttacatgtgtaagttctgtagtggggatttgtgagattttggtgcactcatcacccgagcagtatacactgaacccaatttgtagtcttttatccctcaccccctccatagctggcagttagatgctgctgaccaagatctgtggttttcttgtggcacccatgggacggtggggcctgctgcccacattcaaaaatgtggccccaatggaaaaaaatagtcttgaagaatttcaacttctagatttttccttttagtcattagcatatgtttattttgtcawtttttwwattttattttaccagagtgtaatttctacgggtgggaaggtagtgtggggaccgactgactttttcctttgtattgttctgtcatttaactttgtacaacaaacagtgtgactaaaaaaaaattccctgtatgtttcatcatttacttaccttcttggttttcccaatcaggtttttaaaaataactgattctaatttccaaatactttaatactacaggcccatgcctcagggtggagactcataattatacaggttctcttcaagtatttcaatagatcctcagtctttctttgttcacagcttagcttagagtccttactttttttttttttttttggtgaaaggaattgaatttgaaagtcaacaatctagaaacttcaaaattactgcagccacctactactttccaaaaataagcacccatcaaaactagactctatcatttgttacccatgcrtgttctattactaatgttctcaaatcaaatttgagcttaaaaacagaaaatctacagtttcgttgacgacccctcccacccccaactattccacccttcagccccatggcatgttaaagggaagaacaatgaattctggttgttacaagagaatatttggagcatctgactctttttgctgtcaaccagggtrtcaacttgaggcatccataatgactcgactccctgtttgattccttctctccttttattctctagaaagcccttcctggaccctcttgttggactaaatgacctttctccacattcctaaccaccctgtgcaaacctctctttgarcacctgccacattctgttgaaattaagtcttatcctcccactgtattttaaagtctttgaggacgatgcccrtttgcaagtcaccgttgtatgcttggtgyctggcacaaarcaggtgatctgaaattyctggtggaagtggaagggtcatgtgtatgttgggcgggtgtgtgtgagaaggtaaaggacacgtttttcatttgcctttatatagcgaccactcatcttaacttcaacccctattccaaatcttcctctgaattgtacaaatttttaattgttacattctctgtagatgggtttggatgacacaggaaaccccttaaagtcatctgcaatgttctcagccttgagtttgatggattacttctgtgagtgatggtgagtcgtggcagtagacagctcatccaatcccttgagttactgttacttgagactttttcgctttcaagaaaaaggaacatgagctaacataagaaaatgcgaaagtcttatatgggtactggattatgtcatagaagaacctgggcttaggaggtcagggaccagaaactggcatgctgtaaagagcacaggaagtccctgtgctgggctctcacctcgctatctctgcaagtgtgttttgttctttttttcctcctgcagactggctttctctgtttctcagcctagaggaaaaggagacatacattgtcaagaggcccagttctgcttacgttcccattgaccaaagtggttacaaagctcaaaaatctttgtctgtttatttgtgatctgtggggcccagggctgtggcttttctcgtgcacagtatctcctaagggaggctctgctgggccttaaattaccagaatctctgtgtaaatacaaatcaacctgtcatgagaactgagagcaaaaccatgaagcccaatgttaccatctttttattatgtccttttggaaattctaacacatgcaacaaaacattaaataggaacaagaaatacaaatatattacatataaatttaatatgtaacaaaagagccttcatatagtgaagggaagagtcatttaatacgctgtaaggaaattcctcattagcagtgtagaaaaatctctctggcccttacctttctccatatatcaaataccaatttaattccaaatacattcgagagttacttacttaaaaaataagctattggagaggtgatatggtctggctctgtgttcccacccaaatctcatcttgaattgtaatctgaattgtaatccccaggtgctgggggagggacctcatgggaggtaattagatcatgggggcattcccccccatgctgttcttgtgatggtgagtgaattctcttgagatctgatggtttttgttttgttttgttttgttttttgacagagtctcgctctgtcacccaggctggagcacagtggcatgatctcggctcaccgcaacctccgcctctcgggttcaagtgattcttctgcctcagcctcctgagtacctgagactacaggtgcctgccacggcgcctggctaattttttgtatttttagtagagacagggtttcaccatgttagccagggtggtctctatctccttacctcatgatcctcccgcctcggcctcccaaagtgctgggattacaggtgtgagccaccgtgcccagctgagatctgatggttttataaggggcgtttcccccactttgcttggcacttctccctgccgccatgtgaaggacatgcttgctccctcttctgccatgattgtaagtttcctgaggccttctcagccctgtggaactcttcagccccgcggaaccgcaatttataaattatccagtctcacgtatttcttcatagcagcatgaaaacaaactaatacaaggaggggtacaacaaaagaaaatagcaatgactatttatcccacttatatatgggagaggcctaagtataaattttccagaaaaaaattacaattttaagtttcttaaaattttaaagtgaccacagtataactgaaataaaatcatacatcggtacttaagtagtacaacaagtacaacaagagtgggaaaagaatttgcagcaaataagacaggagttaatatcttcattgtctaaatacttcatacaaattggtaagaaaaatgctgaaagctctggtagaattgtcaatttagacacatcaggaaataatttggagaaatttacctcttggtttgctgtttctactttcttgagccttaactaaagaaacaatccaaaattgggacaaatatattcattgtagtgatatttataatgaagcaaattttaaaacaagcacaatgttcaattattaatacatagcttagtagaatcacttagtaaattatggcccattctctcaagcacacaaacattcattgagcacctacgtaagccaggctctgtgcaaggagctgaaggtacagagatggacaaggcagaacctctgccctgtcttctagtgtaatgtagcatatgacatggggagaaaaggcaggaagtagacatttattgagggacttctgtgtgcttggcattttacctatgttatcacatttaatcttctgaagtgtttagttacacagcatttaaatgataagttgggatgggaagaggccttcagagggggtcacattgtgcaggttggacagagctgtgtgcatcttgccaagctacttgttttctatctctggttctcaatccttgcctctcaggccactcctaggaacactggtgagtgtcaagttttggctggaagaaggggctttagctttgggtctcccttctaaccaaatcttcagtttcatgcagtgtagaaattctggagttattgctgactggaggtcccagatttttcctgctagtttccagatttccagagaaatccacctctcaccatcctgctctccagcttgcacctcaaacccaacaaagtactcttcaaacaaaggattgtctgtttaatggaatctcacctcctataagatagttggggttataaacagcaaaatacatgttcacatgcaaaaacaagtgagcaaacaaagacctttaatggtttcccaatacctaattacaaatttacacaccaaaaattgattttccagaccctctattacctgcttgctcaccacccattgctcccaaaaacatcatctcccttcartgattccattttagaatcatgaggatataagacmacataataataaaatcagagtstacaaatttaacaaaagtgaataatatcctaaatgcaaatgatgtgaagttaactgagtattaaccaaggcacagaacaatctytgtagatgtgtgaatctgtgcataggtaatgattattaagaacctaacaggatttctgtacccacagttaagsttcttttcaaactggtgaaatatgtgctaatgaaatgatttcatgacaccctgaattccctgcctgaagatcttttaatagacagaccaccaggggccatatagtggtctgttgaccacacttcaaaggaaaatccaacaggagctattaaaagagaacataatttggaaagaggtcatggtggagtccggggagtttgtggaagatgttccagaagccaagaggccaatgcactgataaatggttcctggttaccctccagtgacatttgttccttttttgggggggaacacccccaggagagctgcaaagaacaaactggagggagggcacagggctgaggatgaaaaggagccggtcagtgaagctccaacttagaaaaagagatccgctctaggaaacctagcagaccagaggcagagagggaaaagtagctaggagagaattgccttgggtgaagacccagaagggaggaagagcaggggagaagtaaagggctttggttttggagttggggtttgcactgatctttgtggctagggaggaaaagacagctgtctcccacaggtctcatacctggaggccttcagtaaggtatgtctgggtggttttgtacaggcaagtgggagctgagcctgaccaggaggctgtatgtgggcttgcgstcatgccctgatcagcagcgcctgcaaggaggttcttttcttcccagttctgtgcccattgcacrgctgcaacctctcatcaccccaaaccaggtgaagaaataacccctgggccaagtcagagtctggttgaccctccagtgggtctggagaggggtaggtgggtagaattccaaggaactgtcatcagaatatcttcttggtcatgtgtcatgtgtggtaaaggccttggcatcaaaaccaggtcatctgtggatgtgagcatttgcagtgtaagtagcgtgttaaactccttcactttgcacgctgctaaagaagcaggtatgtccattggtgagcttcctactttagctgctttaagggaaaggcatatgaaagtggctgttgaatgaagcattttaacttggttgaaaaaaaaaatgagttctggagccaaacagcctgggtccaaatccccattccaccttttactggttgtgtgaccttgggctccctatgcctcaggtttctcatttgtaaccaaagctaatactagcaccacttcactgggttgttgtgaggattaattgagatataatgtgatgcacagcattagaacagtgcttaaagcagagtaagctctcaaccaacatgagcaactgttctgttctcaaggctttgctggggtctttgctctgcagcaaagggttaaagccgcattggttagggaaatgtgggtctagaactagttaatccagcatctcattttgttgctaagcaaccagctctgagttctgcaaatgtgcagctcagtgtgcagtgaccgcccctagcaatccaaccccagtcaggctgtcacgaagcattgttttatattacttaagagctcatttcaaattgtggaggaggagggaggcaggcacagacagcgcarccataaaacacgagcaaaaccagcgcttctggctggaggagttcgcagtgggcataaaaataggaaaacaagtgttgaagtgtgctcctacccacctgcaaccgtgagagggagaattcacccgtatgactcacccttccctggtgttaaagaggtgatcgtgatcttcagaacgggatcctccatggatcaagggggcatctttcctttgcctgcatttgggtgtggggttataaggcctggatacaaacctagatgtgtggttcctcattgggaaggggcaggatgagaagcgcctactgtggcctcacactccttccctcagggaagtcagaggtcatcaaatattctttmcttcattcatctgtatcattaaacatgtactgagtatctattgcatgcccaagatttgctaggcactgaggataaaactcaaagcaagacagttactctctatcttggcctggttcttagttaaaaaaagagaaagaaacccactcttgctagcttattagagatggcatttatcgaaggatattaagtagctcaggaaatttcccccacagccagagagtgagggtaagtgactacacagccaagaacattatgcagaaaatagttctggaatgctccaaaagagcccttattgcccctgcagcaggrtgtgggctctggctcacactactgtcccaggcagggacccctctgccagggcctctgttcctgctcttctaaaagcttgatttcctgccctcacacaatgactttcatatggcatctttctcttcactgaggtctggcatggatgcctgtgattggtggagcctggatcacatgtctgagttctggctgtaagggaggctgggaaataaatttctgactttcacagatgagacggaaaattccccaaacacaagaagggtgttccaaaggtgctgggcagccacaragcctttgagtattccctgcatagtctctgctctcttcaccttacagtctgctagaagatgggtgaccagtgctgggccaggggaagtacaggtagaagagggacccyagaaggatcgcgaggtcaggaaaggctcttcagagtcagccatatctaggctgatacttgaaggatgaatgtgagctcatcctggtgaaggctgagggaagaacatcccaattactgtagtgacacatgcaaaagtccaacatcacaagggaattagacactgcagggaagtgagagacgttctgtgtggctggagcagaaggatggggcagaacaactggtggtttaacaagccctccggttgattccgatgtatgatgaaattcaagaaacattgctttaagtaatatgcttatcttactactttaaaaatttttagtgttaggcattatatactgacttcccacaactaaaaaatgagcagatttcccatcccctctctcattccaatattgtgtattgtaacttgggtggatcactattcggtgctatttatattttacataactacataaatgccattcacagctgggtatgtagtagaccacactattcttcctttcctgcacaactctttgtttgacattaatatgtaactgttgtttttctctcagttgctgagttttctccatacttactactaattcactctcaaactctcctccagcaatgttcattctccttttaacaccttcagttactttaggagttccattaatttcgtcttgtctyttttaatgacttccgactgctccattctggactggggttctgcctgggcctgggccacagctgtcccctgggatctcccctcccctgaccactgtattggatctcctgcttcctgatgccacctctacccctgtcttgcttaactcccacattttggtggggcttcccagaagagggggcattcgtgtgaattgagatctcatgtgcctgaaaaacgcctttattctaccctcattcttgataattcgtctaagaataaaacttggagttgaaaatcatttctctcagaattttgacattaatgtttccttgtcctccattgttctaacaccctccagtggtgtcattgagaaatctgaagctatttttattgcttgtcttattttatataactttatttttatttttgttacttgctcttgttctgtctctcttccactttttctctgtaggagattttaggccttctctttgctcccagtattctgaaattccatagtgatgtgtcctggttggatctgttttcatccactcttctgggcactcaygagccctttccatctgcaaacttgtgttctgggacatagtcttggatgatttttttgagcatgtcttcccctatgttcttttccttttctttcttttttgatctcagtgtgtggaggatggaactcctggtctaagcctctctctctctctcttcttaaacttcccctatctatgtttgtctttttgctcatcttcttagagagttcttcaaccttatcttccaactcacttcttgaacttttcattcctgctgtcatattgtccaataactctttttttggttttctgaatattcctagcattttgttcttgtttcagtgatgcaatatctttcttatctctctatggatattaataataatttataatcttttagaagcttctttctccctgtatattctctgtttcctccaagctacagttatctgttaattttaggctatatcatattagaggctttccaaaagtgccccgtgatccttggacatctgctcatatttaagagaggagcgataaaacagttattagaagctctgtgtgcatgggcgagtccccagaattagcacttctaggcctattctcctgagctggtcarattccctggggaagatgcttccattctcctgttagaagggacaagtttggctgccagcattctgggagctgagtgaggaaggaaggctggaaagcctctgggcgtctctgtttgtgtgtgtgtgtgtgtgtgtgtgtgtgtgtgtgtgtgtgtgtgtgtgtgtgtgtgtgtagggggagattattatctatttttgcataacaaattaccctaaaacttagtggcttacaaaaataaacatttattatttcacaatttctgtgagttgggaatctaagaacaggttagctgggtggttctagctgaggttacagtgaggtgtggaacagctgcaaccatctggctcagtctggaggttctgcttccaaagtggctcactgacattcctggcaagtggcaagggatgctagttattggcaggaggcttcatttgctccctatgtgtccttgtgacatggcagctgccttcctccagagcaagtgattcaagagagagcaaggcagaagccacagtgtcttttatgatctagccttagaagtcatactctgtcatcctggctaacatggtgaaaccctgtctctactaaaaatacaaaaaattagctgggtgtggtggcgggcacctgtagtcccagctactcgggaggctgaggcaggagaatggtgtgaactcaggaggtggagcttgcagtgagccgagattgcgccactgcactccagcctgggcaacagagcgagactccatctcaaaaaaaaaaaaaaaagtcatactctgcatttttcttattattccattggtcacacagatcagccctactcagtgtgggtggggatggtccaagggtatgcataccagagggggagaatcactaggagtcatctgggaggttggctcctatggtggggagggggccaggcgggagttggggaggaggaaggtctcaacacataatgtacaattttattttttgccagttttttgtgagataccaccatcttctgcaatatctgatatctgcagtttaaggaccctgagttttgtcctccccaaagaataaacctcctatcttctacaaaatggaggagcagtttgtaggggagagaatctaagagtttgcttcttgaaaacgtagtcttcctgtccttggctccatctatccccgtgcttcaggaagcacctggcctgctaattttccagccttggtgagagggaggtggctctgtagtataagttgggttggttcttggctttccccactgccagcttagaattcagatttattatttttgctaattccgtttccactcattcctcagcttttctgctttcaaaattgtgttgctattggtttctttctgattctttttgttcttgtggatttctgatttttaaaaacaaccccttctctgtgttttatcgggacttaaggagggagtagaagccagtgcatgcatttgctttgttatctttaactggacatcccctcctcttctctttcattctcatttcttctgggctttgccctttaatttgaaaattattctttgttttttcttttttcctcctctcataaagcttctgaaatgggccaagaacctattttaaaagccaaaaactgaataaagaccctttctatgtgtatttttaatttatcctaataaaatggatggctctggttaaatagatagtcacacacacaaaaaaaaccaaagaacttttatatatttcaaaatattatccaaccacaacagcactgtcatgctgtttgagtgtgagatcccctccttcatgaccccctcggctccactttgcttaggcctgatgtaagtgacttcaccttggcatcaacgactttcacagggaaaggggtaaccaaggaaccacaaaagccaccataaagactaagaagcagcagctttaaacagctgtcgaatccagagagggtcaaagctagacctcttgaataggatcagtcatggaagaactatcctgcttctccgtcccctctacttctacctcggaaggatccgaacctacrtgagcacaaccaggagagaaaaaggagaagtattcatccctcttcgactgcaggatttctgattcctgcagagcgtacttgagggtccagagctttattacatgggaatggaacatcttaattactgaattgaggccaggcgcggtggcttacacctgtaatcccagcactttgggaggctgaggtgggcggatcacgaggtcaggagttggagaccagcctggacaacatggcgaaaccccgtctctactaaaaatacaaaaattagcskggcatggcggcaggtgcctgtaatcccagctactcaggaggctgaggcaggagaatcccttgaactctggaagcagaggttgcagtgagccgagatcgtgccactgcactccagcctgggcgacagggcgagactccatctcaaaaaaaaaaaaaaaattactgaattgggactgggttttttaacttaaagtgactggaagaatccatggtgtctactcgagttttaatttagggacaagggtggagctagccccattgataccgtttaaagggacaagataattcttgatagcacgacgtctaatgctggcacataagaacttaggacatggtccaccctcctcggggcaatgaggaatagctttgttgaggttaataatgtgaggatggagagagcaatagatgaactagagtcagaccttggtcatgacacagctccactccttaccacagccaaagtctcttcactgagcattgttccttcatctacaaaataagggggttcaactagacagccagtgggatgccttctctatctaaactcttgcatgagtctagggatggcaaggtggagaggggttgggtgagtagcccctttcctggagataaaccacagatggtttaaaccagagaagacactggagaacccactgcatttcaaaaatatttcctttcccttctggcagctttgggtaatttgggtaagcacttctgggtggaggcacagctcaggctttgcggggaagatgaatttagtggtgaaacaacagttatgacaatagatgctgtttctggcgcctctgaatcttctagtatctgcattatgattttggaataaaagatgattcatttcgagtctggaactcagctaaatgagcaggactctgaaacaccataaatgacatttctccctgccaggagctcaaagcagggagactgagccactccrtagatatttgcctgtgctttgtcttacgaaagacccaggaactctctcaggagttcagccttgctgtcacaggtgctggctaagggaagccagctttggctgctgctgaggttgtggagaaatctatctgcatttgtgctaacagtattaataaaagcccagaagttaggagatgtttctgtgaatgttatctgcactctatctgtgaaacaatgctgaaggtcaggtgattcccagatattagttgtacacagcttacttatccttaggtttccttttggctaaaactcggtttcattcatctctgtgcatctttgcatagcgtttaaagcacactcgagtgacatgcactgctgtagtgctctctcagagaggcagccccatgggcctcttccctcctagcatttgccagattttccaaataatgacattgtgattgtgtgactctcccgcactggacggaaagcttcccgtaggcaagaattagctcgttcccaaacatagcatagtgttggcaaggcacagtggtgatgaataaatacataagtggatgatgaattaaatgatttatgtagcaaagggatgctggctgcacaccttcttgttggatggcagggaacaagaagaaaggttgagttcacccaggtgctaaacaagctttgagaacttcctttccacagcagataaaaggagtctgcaattgtggaggtctagagtacacttttcatctcccttcatcctgaattttgtctttggcagaatctctggggatttttgaatctgcagcttttctctgcactggggttcctgcagtgtgaataccatccaatggcccacaccgtccaggtcttgagtgtgggcccctggcagccctcttgaaatcgaattctctccaccctgcatcctattccccatggcttgctgaagtccttgccctgggacccatggagagctgaggatgggtgtgtgaccaaggagaaagctgctcccactgctctctgaccctgcttcctctgagaatcagaggacttgcagggaacccagactttcccagcgccaatttttccattggccatgcagtaacccaggctttcccacaatcttctgaagcctcagaggcctggctgctcctgggagtcggcccactctcctggcaccaagggtatttgttcacccttgactttgtaaagatccctgtcctctcctctccctagctctccacccccaagccactgtgaaatcctagtgtactttaaggctctcccagtattgacaccactatcagccaagtcacttcccgtgacccagggctgtattaggaaagggccacaataccaagagacagacactgtgggttttggtcctggccctcctatttgctacttgctgaaccacatgcactcacattgcttctttaggtctctgtttcctcatctgtacaatgggtttatgcaccttccctgccagcccacagagctgtggtgaaggtcacatgaggaggtgcatgagaaagtgcttgtctagtagtaggggacccactacggtgaggtaagttgatgtgttaatgacagtgaaggccaggcctaaggaaaggggragcaggacacatttgtcgtggcgtttcttactcccttactccctcactcyggtcatttgtgtrgcattccctataaaggccatctaatctccccacccccagaagaaaagttgggcacataagttgcttgaccacattcatgtacattcattcaatgtactactccctagggtattttaattttaaaatagatgaaagcaggaagccccccaaaaagaatgtataatacagaaacacagggaccatgagacttatgtgagtgggaatatgtgagggcagggacagggagcatgcccatgcattgcccaggccactccatgggtcaacttgactccctcatcaggggcgtcagtgctcttgggggccgcactcttgagtctcagcccccacgccaaggccccattctcacgctgcctgagtagggcagctgagacgtttggtggaactcggaactaccagtgagtgggtcgtacagggattctgcctgtgtcctccacatgccctaccagaggaggaagaggcacaaatgaagaattaacagcacagaggcctttactggaatgctgccagccctctccaggcctccaagactgccccaagtgaaggagaagtgacctccccacagcgtggcggagacagcggcatctcagctcctctctgtccctgtgtgtctctagctggcatggcccgagcctctcctccccattttgactcttaaagagagccaaagcgtctccacttccaaacacccgcacaggctggggtcactgggagctgcctgggaccgatctctgtggcccagaggtgggaacatgaccttggatcatcacaaaacctggaaaaaatgcagccagccttcctcaaataagttggttttccaaaccttgcctcaggactttattggatctttcaaagcaaggagaccaatgagtgtgtattttctccagcacatgggctcaccctggacttgaatcccaacccaggggagtctggaccacagggccctgcacctgcatgctggctacgccctgcctcgggagaaggccagcaagcgctgccctctgttggcgttgtggggcccatcttcgagcatctgctctccggcaaygtggccattgttctccatccagaaggccctctcttcctcccagagggcattctcttcctcccagagggacgttttatcttcccacagggctttctccccctcaaggagggctctttcctctacccacagggccttttcttcctcccacagggccttgtcctcctgaagaaggttccggtctctttcccataaggcattgtcctctttccagaaggccttatcctccttccagaaagtgyrgtactttttccagaaagttttctcttcctccctgaaagacttttccatttcccagaaggatttttcctctttccagaaggttttctcctcttcccagaaaggtctctcctcttcccaaaaacccaggatctggccccggaaagcatggatcttgcctyggaaagtccacatctcttccctgaagtcctctattttttcacgaaaaattttcatctcttcgcgaaaagccttttcctcctgcagcttgtgcattagtttcttctggcgaatactgggagaggatgccgccagggaccggaagcaggcaagccccatccatctgctcaccttgaaggaaaacatcttccttatcagccggaatggcggggtggccatgagggatgacaggacccttggccaggtccaggtcggctggtcagaccctgtgggggcagcagaaaagacagatctatgagtatcacatgccaggggacggcccttggttctgtactactgaatttgagaaaatgtaatcactgctctttgtccacatggtggtgtttgtgagggacaagctttggtagaaaaacatgtgrggtggtcatggctttgagctggagaggcagtcagtacattcaagctcaaggctgctaaaaacrtagacactcagccaagaaggacagtggctgtcaactagggtatcagaacacataggtgtgacatgatgaggccaagaagaatttacgtttgttaaatcaatccgaatgaatttaggttttggtgtactcacttgagaattgttcctatctgcctatgggcatgctcacgtgtgaatgtcctctgttacgagcctgggacacagaagacaggcccactgacctcagaggggaggaggagagtgtattttaggagaggagtttattttgggaaaagtggtttaaaacaaaaaggtgagagacgatggtgaatgtttccagggacatggaccaagaaggccctcacacaatatttagtaatatggaacaataagaaagacaccagatgacccgcagctccagtcccaggtataaaccctgaggaaacttaggaactgtgactaggatacatgtacaagtgtgttcaaggagctttgttcataagagctcaactctggaaacaatccaatgaccatcccaatagagtggaataaaaaatggcagtatatccacatggcagacagcatggctgcctacaacagcatgggtaaatcttataaacccaatgctgaaagagagaagcaggatcagggaatttcaaagaatgaagttccaaacaagcaagactaaatgccattgtctaggggaacatacttcaacacagaaagagaaaagcaaggaagtgagtcccaaagtcagagtaatagttgctggtgtgggaggatttggagtgtgggatgaggaggtgagactaaggggtgtgattaggtgagtacttgagagaggcttctgcagtgctagcaggactctttctttgcttggtggcggtttcatgtgtgttgttataaaaatgtgttaagtggtacatggatattttatgtaccccagtcaatacagtatatttcacaataaaataaaagctgggaggaagaaagaaggaaaagaaaaaaagaaaagaaaaagagagggagggaaggaaggaagggagggaaggaagggagggagggaaggagaaagatcttcaaacattgccatatatctgaggaatcagatagcagaattatccatagcaatccctgtaactacaaacatgaatcaagggmtgagaaaaagtgctggacataggaaggtggttagagtgcagtaaagagctcagtgttgtcagataaggagtgcaggcacatgctgacagcattgttttccattttgtgctttctggaggaagctgccagggtccggccctcactcagtggatctcaccaacccatcatccgtgagacctattggggaaattttcagggctttctctgtatttttccatttctggtttaggaacagggagtggaggaggagaaaagacacatagctggtgtgtgtgtgtgtgtgtgtgtgtgtgtgtgtgtgtgtgtctgtgtgcgcgtgcatatgaagacacagtggctaggctgtggacagctggtggcatcaccatccatccagtcacacaaaccagaaccaggggcacatccttgacctttccctctccctcaccagacttctctcctcaaccatcaagccctcctagccgagatccagatccttaacatttcctgaaacyatgcccctgttccatctcccccatgacagccaggtcaggccaggatgcctgtaacagtctcgctgctctctgtattgatcttaccctctcatctgcccctgcactgtagccctacaggtgttttctagaacactctctcgtcctatcacatcagttcacacaccttcaaagaccctgtagcccaaagatcaaagctgaamgccctaggaaggccttgtgcagcccaactccagcttgcttctccctctccttcctacccagcctgcrcccaactccaaatctaaggcccagtattaacgggctctattcagctcttggcactctgcctgcagtttcctgcctgtgtggtgaagcacatgtcgcatcctctactgagagccccttttgttcctgtggtgggcttgaattcctgtacatcctttcccctctgaaagctactcggaccctccagacaaagttcctcrccacctctgcgatactgtctgtctgttactccactattacttgtcacacttgattgaaattaggtgtggacatgtcttcctgacatctctgtaacccagcagctatcataatataacgccgcctatataggagggaattggtgaaaatgttggttgaattgaactgaattgaactgcattttggaaatttgattttctgtgttgtatggctctttgcctagaatccctccaatatgtgaagtcctccctcacttccatgtcatgctggccccctctccctggatatccttgcccaacctcacttcagttcacctagcgaatccttcagcactcagatacctcctccaggccatctctcctaagctcagactgagcatgtgcccttcctgtcccactagaaacacctcatcttccatctctatgtctggcatccagcgaaatgttctgccacaggataggtgttcaggaaatagtagctggatgaatgggcgtctactgggttaggatgttggaaaacattcacctccaagtttttctcaagtgaacactaaactttctttaagaaagaaagaaaataagaaccatatcaaataggtagatgtgtattaaaatataaagtacaatataaaactgtagatgtgtatctgtatagctgtaaaaacatgcactaaagatacatgcccagttttcagttatactgtaagactaggagcttctttttaaggaaaatattatatattaccttatgcttagaacaaatactatacagtctaaagccaacagttacttactgcttagctgcttcccactggggtaagtcctgtagccctcagagggggcaggcggccattgtcatgtcagatccccagtgatgcgtgcttgcaggcttgccccaacaatgctggcagtgacctgtctgtgccctttcagtcctgactcacaggatggagatggccaagaaggggacccctataaaagactttaaggaaaggagggggcacttgaaaggtttgaaagagttcctcttcaatctttgacttcactgatagggcagtgctgttgatgactcacaagtgattgttaccttagattctgtcagcattggttccgggagcatggttctaggaagtcatgttctggtgggggctttgtgtgggatgaatcacttctcttgctgctttccagattcttcgtctttggcttttgatagtttgactatgatgtgtcttggtcttgaggtttattctacttggagattgttgagcttcttggatatgcagatttgatgccgtttttcatcaaatttcagaagtttttggccattatttcttcaaatattctttcatccattttctctgtctcctctccttctagggctcatattatgtgaatactagtagcgtgagtgtgtcccccaggtctctaaagttacgttcatttttcttcattcttttttctttctgttgcttagattagataatctcaattaacctgtttacaagttcatggatttttttcttctgtcagttcaaatatgctgttgaatccctctttaatttttcattttcaactccaagatttttgtcatgtagtamaatttttaaatagtcaagtaaattaacatatccatcatctcatatagttacccttttttgtgcactgtagcaagagcacccacaatctactctcttagcaaaaatctttaatacagtgttattaactacagtcctcatgttgtaccttagatctctaaattatttatcctatatatctgcaactttgtaccctttgatttccctcttcccgtccactccccacacgtagcagctgccattttattctttgtctgtgtatttgacttttttcttactkcttctttttaatttttttaatattctacatataagtgaagttgtgcagcatttttctttctgtgtctggcttatttcacttagcataatattctccagtttcatctatcttgtgacaaacggcaggattctctgtttatgactgaataatattccactttatatacatgctgcaatttctttatccattcatctgtcagtggacccctagtccatccagaatttctccagaaattttcactgtgtctccagaatttgtttggttatatatagaaaaggatatatgtgcttttctatatacatatatayacacacacacacacacacacacacacacttctatatatatattttttctatatatctatataaaagtatatgtatacaaagtgtgtgtgtgtgtatatatatatacacacacacatatatatatgtatgcacacatacttttctgtctctttttggtaaggcatagtttttaattctttcctttaatgcttttttttttttttttttgagacatgtytctgtcactcaggctggagtgcaatggcatggtatgatcttggctaactgcagcctcaatttcctggactcaagtgatcatcccacctcagcctctcaagtagctgggactacaggcgtgcgccaccagacctagctaattttttgtgtttttttagagataaggtttctccatgttgcccaggctggcctcaaacttctaggctcaagtgatcyacccattcggcttcccaaactgttgggattataggtgtgagccatcacacctggccttgttttcctttaattcttttggaatggtttcttttagttctttaactacatttgtaatagctgactaaaaatcttggtttaatcgcccaatatctgcaattcctcagagacagtttataaccaaaaagacaattactcagagaataacagtttcaggccaggcatggtggctcatgcctgtaatcctagcactttgggaggccgaggagggaggatggtttgagcgtcctcctggtaggagtttgagaccagccagagcaacataacaagaccctgtctctacaaaactaaaataaattagtcagttgtggtggtgcatgcctgtagtcccagctgcttggaaggctgaggaaggaaggatcatttcagtgcaggaggtcgagctgcagtgagctatgatcgtgccactgcactccagcctgggtgacagagtgagaccctgtctcaaaacaaaaaaaaaaaatagaataacagtttctactgtctgcttttccccctttatatataactctgtttgcaataaagggtttcctgtttctttatgcctcaaaaaattttgttgaagttggacacttaaaataatatagtaactaaaaatgagatttccactcccaagttttgttggtggcatttattgttgttgctgttgctatttgttcatttagtgactttcttggacaaattctatgaagtctatattttttatcgtgtgtgggcattaaagtctgcttattagcttaacgatcagctaatgactggacagagatctccatgaactgatgtctcctttcctttgctgagggggtgtctgtgtgtgtgtgtgtgtgtgtgtgtgtgtgtgtgtgtgtgtgtgtgtttggttgggagtcgggggtgcaggttgggcatacctttagtgatcatgcaggcagtttatgattctgcctagccttcgcttccttcttgtgagagcctcaaagtcagcctgaggtgagagattatggccttctcaggtctttctcagccatgtgcacagtcacatgcatgtgacccaaattctcaggactatatcaaaacttttcaaagtctccgtcttattctccagtttttctttttcagttattggtcaagcctatggttaaccccagctagtaatgccaaatcaggcagctatgatattaaacaattaccattttttttttttttacaaatgccctgaggatagggttatttgcacagagtaagctctgagtcaagtcaaataaagacaaattctgtgaaggaagcttttcagtgaactgccaaacaggtcaaatagtaaaaattctttgaggatggaaagaatccatcctaacccttactcagtcattctggaagtctcaatcattggtttttaaccgttcttcttttttaatatgtgtgcttaagaccatcagtttccgaaacagccaagtaaaaagggctcccgggagaacctccgacctgccaccgggtggatggggcgggacctygggaagttckcactgtttgcaggggggaaggagcttggcctctcatgtttctgggtggcaacctaggattcagtctgtgagatgggggcctgttaacaggaacccctttcgctttgctgagtttttttccttttacacccaataaatttcgtttttcttacccttctgtgtgtccacaagcctaatcttttcctggttatgtgacaagaacccaaagaacccggtttttagctgagctaaggagaaagtcctacaacattttcatctaagtacacttacctgcgtctcacatgttttgatatgtcaccttttaattaccattcagttaaaatattttctgatatccactggaatttcttcttggatctattggctatttacaagtacattgcttaacttccaaatatatggggattttccaattatctttttgttactgatttccagctcaatttcattatggtttgcacaaagtatatggtttgtatactctgatttcaatcatttcaatttgctaagacttgctttatggccctgtatacattcaattgtggtaaatgttccatgtccacttgaaaataattggtattcttcagttgcttgatgcagtgttctctctctctatgtctgaattaggttgagtctttacctatgttgttcaaatcttctatatccttatagatttttctggctgcytgttctgtcagttactgagagagatgtacttgcagatctatttcttccagttaggtcagtttttgttttatatactttgaggctatattattagatacatgcatattttacaattgttatattttcttggcatattgacactgtgatttttataaaatgccaccgttttatctttagtaatacttcttgccttaagttctactttgatcttagtataggcacgtcagcttttattagtgtttgcatggtgtatcttttctatccttttatttcaacctttctgtgcccttatatttaaagtgtatttcctatgatgaacatatagttgagttttgttttttctactgtaatacaatttgtcatttatttggtttttaaaaatatttacacttaatataattactgatttatattagatttgaatctattttcttaccatgttttttctactcctacctgttaaatgttacttttccttttttcttttggattaattaaataattttattattccattttcctctattatgtcattagctatatattcttttagcaattatcctggagattataataggcatccttgagttgttaaagtctaatggatttttatctttactgtttctctgataatgctagaatcttagatgattttaactccacttataccccttctacctttttcattttgttgtcataaattttaattctgcgtatattcaagactcctcaagattttgctagtcaacatacatttgtaattacccatatttttaccttttttcatgctcttcatttcttcctgcatctctgtgcttctgtttgggataatttttcaggtactcaaaaaatcatattctttagtatgggtcttgtgatgaaatctctcactgtttatttgttgaaaatacttttaccttttttttttttaatgccagctaacaggtgttatcggtagaatggtttgcttagtgtgtttccactgctgtgtaaacaaatgccactttcattttcctgttctttacattatagagaatttcatagtaatgtgatttcaaaacatagataagaaatgaattttaatctctgtaaacaattgataacaaaatcaacatttgtctctgatgaatttgtattatcatagtattggctctaagtttttaatagaaaggaagaaaacataattaggtactacacaacactgaaatccaaatagaagtgcctttgttttcttattcagacgtattatcctttataatcccatttgccttcattattgaagtgtatttctactggttagagaattataggttagttgttattttctttcagttagtctggtttctgttgtttctgttgagaagtcagcatcaatctaattgttgctttttgaaggaagtatgctttttaaaattctacccgatgttaatttaagactttgcctttggtctttggcarctttattttgatgtgaccagatgtgctttactttgtattttcatgcttgggatttgaagtatttcttgtatgattgaaattacctttgcaaaatgatgacggtaagagaaatctgacatagttgactccatcttgcttctgacctccaggatgttcttggtcattcctgggtgtaagcctgggtaactttgggaggaatttatagtttaactttgaagcaaggatgataataatccctccctaaaacaaatcccttccctgttggggaactgaaaccaccctttgtaagactaatgaaaggccacaagattaggattatgggaggggcctgagttctgataaaatgtaggtatggtttctataatcccttaatgctcaggagtcatgtggcctgaggccacaggatttatgactttccagttgctcctgtagataacatcactactgtagaacctagattggtcttttgagattttttttcagacttcctggcaatcaactgatcctgcctgaatccatgatttataactcagccagtcctgtggccccacccaaaggtggactcagtgcatgtgaatcattttcaacactcctatgatttcatccccagccaatcagaagtcccctgcccaccaaatcatctataaaaactctaacctctgagctcaagaagagtgatttgagtaataactccatctcacatatagctgacctcttgtcagttaaactatttactgcaatgctgtggtctcagtgaattgatttttctgtgcaggggcaggaagaacccatcaggtgattatatctctgtatcttactaaccttcatcacttttaggacattcttggacatatttctttaaatatgtcatcttattttcttctctttttcacttaacagaattccaataacatatatgttaaacattttcactgggttccttatattaacatttttatgctcttttctaattctccattgtctctctgctttagtctgtatattttctactgtcctatagtccatttcactattctttcttcagcggtgtctaatctactgtttctattcagtctttaattttatttattaaattttattccaatctaggatattcatttggttctcagtttttctggtaccaaatttatccatcttgatttttaattscatttattaattgtagttattttaaagtctgtgtcttattattattcaagatccagttcatctgtggatatgtttctcwtgtctttttttccctcttggttttctgtcaaaacttattttcttatacggcttgttattttgatagagtgctaatattctgaggctcttcagcatgttaacttcttccagaggtatttatttttgcttctggtaggcagagaggctagaagtcaattattttaatccagttgggaattgagataattctaaactgggcttcacttcttgtgagatatgcttctttagttgaccctttcttcaaacaaaagcttgtgatgtttttcagagcctctccttgctgatagatccttgggtgcaattttatcccttagacctctttacattgctgaaatctctgttcagacttctcagcctttcattcactgctttcaatttgaaatcaacaaataatttgagggaaaagaatcttcacctccactgtctttattgcttgttcaggtcttggtctcaaaatttttctccctgcctaggtatctctgagatgtccagttcctcatgttgttccaaatacgatattttgcccaaacaacctagtcagcctttacctagtgcagtactcatatggggattataaccaaaagagtgacataatagaactttagaatgttgacctgaccaaaaggcccaaagcagcagtaaataaatcaataataataattaaaataactaacatttgttgatttcctatgccctcggtcactgtcctaagtacttttgcatatatagcccatttaatcttaagaataaattaataaattaggtattaataccatttccatttcacatatgaagaaggaagtgcatagagaatttcagaaacttgcctaaagctacacagaagtagagcytagatttgaaccaaggcagttttgctcagagaccatacctctctaaagtagaaggttactataataacataggcatcaaatagcctgggtcacaatgagcatcatagctggggagtcagagaagaacagattgctacaataaatattttgaagaaagatgcaaaaggtgatcaaatggttgcatggcatgaagatgaaggaagtgaaggaaaggtttcaagtacccagtctcaatacctggaaagtgatcgtgcactgatagaaatgtgaaattgagctggagttgatttagatgggttggggamgtattcttacatgaaactttgggatcctcagtgattcacagttcataaagtgtttgctatttcgggtaagccttataatagcctctggaggaaatagcaataagattattattgctaagtgtgaatggagtacagaaaataaatcacttaacatcagcgagctcacgggattgaaaaggatatactttctccccctgccacacactttgtacaaaatcaatattttctgttcactcaagatagacagtttaacttaaatattttaaaatcagtgcctcatgagtgacacaaatttaacttaatcttttcaatgctattattttaaaaatagtttaccattcttgccaattttcaaggtaatgmatgttcattgtaaaaagaaagcagaaaatagagcaaagatgaagaagaaaatgaaaatcaaccatatcccaatactcaaaggtaaccagtatgaacattttggggtatattcttctaatatatttcctatccttatgactacatatattctatgcaattggttttattctgtgtatgctgttttgtggcttgctttttcatatatcatttacacttcccaatttctttaaacatttttgagaacacaatttttaattactgccagagtgtacattcccctatgttggaaaattaatttattccattagggatatattatggttggcccttgaacaacacaggtgtgaacagtgaggtccacttatacatgaattttctttggcctctgtcacccctgagacaagaagaccaacacctcctcttcctcttccttctcaacctactcaatgtgaagacgatgaggatgcagacctttatgatgatccatttacacttaatgaatagtaaatatattttctttcttctttctttttttttttgagagatggagtctcgctatgttgcccaggctggagtgcagtggcatgatctcagctcactgcaacctctgcctcccaggttcaagcgattcttctgcctcagcttcccaagtagctgggactactggcatgcgccacgaagcccagctaacttttgtattttttagtagagatggggtttcactatatgttagccaggctggtctcaaactcctgacctcaggtgatctgcctrcctcagtctcccaaagtgctgggattacaggtatgagccaccacgcctggcctgggattttcttaacattttcttttctccagcttactttatcgtaasaacacagtatatataatacatataacatacaaaacatatgctaattgactatgctattgtttctggtcaacattaggctattagtagctaagtttttggggagttgaaagttacacatggaattctgactatgcacaggttcagtgctcctaagcactcattgttcaagggtcaactgtatttttttttttttttttgacggagttttgctctttttacccagactggagtggtgcaatggcgcgatcttggctcactgcatccttcacctcctgggttcaagcaattctcctgcctcagcctcccaagtagctgggattacagaagcccgccaccacgcccggctaattttttgtatttttagtagagacggggttacaccatgttggccaggatggtctcgatctcttgacctcatgatctgcccgccttggcctcccaaagtcctgggattacaggcttgagccaccgcgcccggccgcgggtcaactgtattttcctggaaaagtagatcaaactggaaaattgctcaaagatgaagacaatgacaacataatcatcactgctcatggcctcagtctctgtattgaaagaagagaactgtttctagccacaccagccataaaggaatcatgccctggaagcaggctttgtgaaagaggagactttgtcatgttcactgctrtatccacagtgcccrttttataaagagcttctgaaattgagcagacaaagaccaccaacccaatagataaatggccaaaggatatgaacaaattggttgcagacaaatgcaaatggctcttaaatatatgaaaaaaattttcaaccatacttataattagagaaatgcaattgattaagaaaactgttgcatttctcatcgatcaaactggcaaaaatccaaaagtttgacaatacactctgttagcagagttggaaggaaataggccctgctatacagtgctggtaggaatacaaactgttataacccccatgtatggggatttgtcagaaactaagaaaattacacgtgaatttgccttttcacccagcaattccatgtctagaaatttatccagcaggtacatgtacacaattacagaaagatacttgtrtaggttattcatcggagtattgtttgtaattccaaaagattggaagtaactcaattttgtagcaatagggaaccacttacataaactggcacatccacagagcaaagtactatgcagctgtaaaaaaatatataacaggctgggcgcggtggctcacgcctgtaatcccagcactttgggatgctgaggcaggcagatcacaaggtcaggagtttgagagcagcctggccaacatagtgaaaccctgtctttactaaaaatacaaaaattagttgggcatggtggcgtgcgcctgtagtcccagttactcaggaggctgaggcaggagaattgcttgaacccaggaggtggaggttgtggtgagccgaggacatgccactgcactctagcctgggtaacagaacaagactccgtctcaaaaaaaaaaaaaaaaaaaaaaaggtaaaacaaaggtcttttcgtgctgatttggagagattcccaggatacattattaagtgaaaaaaaaaaaaatgactacaaatgtagggcgtcttcttcttcttcttcttcttgttcttcttcttcctcctcctcctcctcctcttcctcttcttcctcttcttcctcttctttttttttggttacggaggaggcaagatgtcactctgtagttcaggttggagtgcagtgacatgatcatggctcactgcaccttccacatctcaggctcaagtgatcctcccacctcagtcccccaagtagctgggactatcagtgcacgccaccacacccagctaatttttgtactttttgtagagacagggtcttgctgtgttgcccagctggtctcaaactcctaggcccaagggatctgcctgccttggcctcccaaagtgctgtagtacctcttcttttaaacaaatcttaaaattggaaatgaacacatgaacataaccatacatcaaatatataccatacccctacagaggaaggattatgtcacatgatcctagggcacacttctttgactcaccctccttagcgggatatattctaaagaggagaagaacttcaaataaatttgaaacttcaacttggtcattttatttttgtagaagtgctgtactgttactttgaaacatttctttctattgtatgacaaagcatataaatacgttaataatgttaggattcaaaattttcagtataaaagaaaagggatacaatgataaaaatcaaataaattacacaaaagagtatagtattagatttaaattttaaatatcaaaaagtactcatgattttaaaaatagatatggtatagctctgtttattgaaatggaccggtagcaacaatatcacagaagcaatgcataccccctatccccacctgagaaaaaattattggtaaaataagaattaaaatattattttaaatttattataaatcagcaaacattatgcttgatgataaaagactcagggcttactgtgtgcccataattgctcattgatgtaagtgtaccagctgactggtgtctccattctgactgggcagggcccttgtctagtttttacattctttaaaaatatcccagaagacattattaaaataaagaagtggatagcattcaccgttttgtaaataataaccaatttattaggcaaagaaataaaacaagtataaatattataaggaaatcatcattacttaataggtgatttggcttaacacctaataaagagggggagagagaaacaacgtaaaattgtagttgataatagcagtagaatgccagttctccccaaatttgtgtataaacttaatgcaatctcaaacaaaattacagaagggtttttctttccccaggggaacatttcaagtagctgggactacaggcacacacccctacrcccagctaattttttattttgttttttagtctcaatacattgcctgagctggtctcgaactcctggtgtcaagcaatcctcctgtcttggccttctaaagtgctcggtcacgggcatgagccactgtgtccatcctgtttctgaaagagacagcccaggtcccactgagagaccacagacggcaggaagcgatggggagggagggcaaagaggcgccagtaggtggcgttgtgcattttcccaaccctgacacttgcccctgggaacttagaccctcggccttggagcccaggttaaggacaggaagacaggagagttattcctttcctcacacccactccaaggcgccacttcagacctgagtaaaagggttgaggcgggaaacctgacagcggcgtgtccgcgcatcctcccacagggcctctgcgaccgctgaaattggggctgaagagaccccgggattttcyggagcatgttggacaactgcccggttccacagggcccttagaatgttaggccttgactcccccagcttctcagatccaggagtttgtttgcttattaaactgtgctaaaatacacataacwtaaaactcaacatcttaaccactgaaaaatgtacagctcagtagtgttaagaatattcacattgttgtgcaaccaatctttttcatcttgcaaaactgaaatgccacatcccttaaacagcagctccccgtgctccccttcctccagcccctggtgaccaccagtctacttccatgtctatgactattctgtgtgcctcacgtgagtggagtcatacagcattcgcctttctgtggctggcttatttcttagcataatggcctcaagtttgcagcatgggtcaggggtgcctgtcatttaactcttcttcttcctgactgtgaactagttgtgggascatgcattctgtttctctttttcttaaattgtcctcaggaaaattaaaatgctgggaaaagtcaaaaggaaaatgaaaacttatattgaaatgctttttgactcaggtagaagtcgaagtgagggaccctgaaggttttctcccaaattaggaagccgtcaggatgaatagatggtaaatatagaaacggtgactcaaatagaagagtgacatcagaatggaaaacttccaaagaaagcatgaaaagaattaggatgtttacatagaactaatttgttggggaataacacacaagcaaagacgaagacaaagacaaacttttgtgcaatcttggggaagagtgagagtgaacactcatcagtgtcccttggctttctgattgctccttttggaggtgcacaacctggtctttgggcaactttagcatctcccttcatttctacagcttccatcaagaagtcaggcctaccctcattaactcacagttgcctttgtaattaaactcaggcacgtgctcattcactcactactcttttgcatcaaaattccttataggatacatggattttattaagtaatctttttattcacagtatctggcttggagtcagcagtattcattcaatgaatgaatgaactcacttttatgaggagaaccacctcaactaaagacaagcatttaaaaatttatactctgaattcaactttcactcaattctactatcatctcccctaatgtgccctttattcatatggcaatagtggagtggtgccatatgtggactctatcacgtggcctgagttgaagttcattacacacttagtagccatatgcctttaatctctgtaccttatgctactcatctgtgaagtgggggtattaatcgcacctactttgctttgggcagcatttccagtggtggtcttccactcacatctctagggttagcaactgcttccactgtcagttgctaatctctgggttactccaccacgacatcgtgcatgacttttcagctcttccgtggctcttgtaactaattccccatatcagattccccgtttttcctaactgatagagctattattactatcatttatcattacctttggagtctcataatcactttccaaagactcctactttctcccccacaaaaatctcctatttctgtactcataagtacagttgtctgttggcagaaaaatattctttgatgttttgctgcatgtttggggacatgtggaaaagctcctgagtgacctgccattgttttctcccttcctgaactcccaggaagactgcctcatcacctgaaattttgtttgttttgatgtcagggctmaaatgtgctcaaaaaagactgctgcccctttttggccacgtccaggccaggcttatggtcaccgtgtgctcccagacccccaccactttggcagggaagccttaagactctgacctcactgctcacagtcactctgcttccactcactcagtgtgagataagagaagattcaagtaccgtcatgtatcactgaaccatgggtatatgttctgagaaatgtgacattcggcaattttgccattgtgtgaaggtcatagaatgtattcacacaaactcacatagtatagcctactacacacccagtggtccccaatctttttggcaccggagaccagtttcatgagggtggggatggggaaggttttggcatgaaaccgttcaacctcagatcatcaggcattagattctcataaggagtgtgcaacctagatttctggcatgcacagttcacgaaggatttgtgcccctgtgagaatcaaatgcygttgctgatctgacaggaagtggagctcaggtggtaatgatygctcacctgccactcatctcctgctgtggggcccggttcctaaaaggctagggaccagtactgttcccaaaaggccagagaccatggcatgttactgtattgaataatgtaggcagttgtaacactgtggtaagtatttgtgtatctaaacgtagaaaatactacacatagtatttgtgtatctaaacattgtgtacagtaaaaataggatatgaaggattaaaaaatggtgcacctgtatagggcatttaccatgaatggagcttgcaggactggaagttgctctggatgagtcagtgagtgagtgattagtgaatgtgaaagcctaagacattactacacactactatagccttcataaacactgtacacttaggctacactacatttattaaaaatatttttctttaataataaagtaaccttagcttactgtaacttttttactttataattttttttaattttgactcatacattagcccatacattatacatacattacattagcctaggcctacacagggtcaggatcatcaatatcactatcttccatctccacatcttgtcccactggaagttcttcaggggcaataacaggcaggagctgtcatctcctatgataacaatgccttcttctggatacctcctgaaagacctgcctgaggcatttttacagttaacctttttttaatatatataagtaaaggagtacactctaaaataatgataaaaagtatagtatagtcaatacataaagcagtgacttcgttgttttttattactgtaaagtatcatgtgctgtacataattgtatgtactttacttttatgtgattggcagtgcagtaggtttgtttacaccaacatcaccacaaacacatcagtaatgtgttgcactacaacattatgactgctatgacatcactaggtgataggaattttttagttccattataatcttaaggaaccaccatctgtgtggtccatcattgactgaaacattgttatgtggctcatgactgtgactgtatgtcctttcctctagcaggctctcctccccttgctcctctgcttcaccctgtcctgtggtgtgaagtggtcaccttggattcaggactgggagagtggcagggccagccctagagtgagcccsgagaggtgccctcctcccaggggtgtgcaatgcaggggtagcttcagagggagcagctccttgcattttacataataggctcttctcttgcctcacaccagtccctccccmagtccctccccagtagactggccttttccaccraaatgacaacaaaaaacctggaatgtcagggttggagaatgcctttaagtcatgtgacgccagtttctctaagtgtggtccatggagcacctacaggagacttagcagagtctaaactgcagattcctgggcccaggcccagacctacagattgagaatctttgggaggtggtacaggaatctgcatttcaataaakaatctctggcacttcttataaatcagcagctgagaacttctactgctaggtgcttgcttacaatacagacacacaacagcctcacaaagcagcctgcttcaggtctaagaaggccactgttacaaagtttatgacatggggcacaattcagccttcttgtaacttcattctatctcagatctggccgtctgcaatgactcggaatcaatttaatcccttttctacgtggcagtcctgaagtccatagggcacctctcattacctcagcccactttgagtaccttcacactctttcctaagcagccgctgttcggtccaccctttctcgtgtgccaccaacatgcagggagggcaaggggtgagaaggggctcgcaccagaactaagtccctaggtttagtgcctaagggactgaaatgaaatgtttcccgcgggaattcctaactccaaggggtcggccatgtttccacagctcccagggtcgctctgctgcccccctgcgggcctggggaacactgcaggggtatgagccggcggtggggctgctctccccacacgtgggagtgggaaatggagagaacccgccccttagaggaaaagccacgagttgctgttgtgctgcaggagagaaagggagaaagaaagcgtgcgacagggagtgggagccccaagtcaagaggagccccacagaggcagccctggacttcgggaccacagaggtgctgagtgctgcccgattctggatcccactctgcttagctcaggtgagtccggcaaccctgggcagcctgtgaagttggagagacagtcctagcagagggtttcttgaaatcattcttaggaagatgccaatgtgctgattatgcttcctggaaagaaaatgactacattgtggaagtgcttttcttaattgtgtggagggaacgaaaacaatcttcactgagtctaagggagatgggttttctggagaagagaacaatcgtaaaggaataattaactgcagggcgaaggcaagttgtgtgggactcttagaaacaacctaccggctgcaggacagcgagtggggaccacaggcatcacctccatgtcttacctattggggctgtgagcaagtggctttgacttggtcattttaaaggggtggtagagctcaaaggaagtgcatttttcatttcctaggagccaaacaatgaaggcatcctagggaggttgtggaatgactctgagacacagtaggtatgcgataacctccactgaattcatgcattcgggcatggttaggagagaaaacagcacaggttacacagagagctacagrtaagaaaggactgtgtcctgagcacccgaaatgtttgttgaaaatattcaacaatactagttaacatctgctttgaaggaacaggtatggggatggttaatgtctaatattcaatgttattcaaaaccaagagtgagttggtcctcacagctgatttaggaataaatagtttaatttaccaagccaatcagtaaaaacacaatcatatatatatatgtgtgtgtgtctacacatacacacatatatatacatatatatatgtttactgttgattcatgacacaactcagaggttaacaaaagtagaattttacaaatttgaactctaaaacygggaatgttagacagacatagaaagtttctcagacctagtcctattgacattttggagcagataagtgttgttggggactgccctgctccttggaggatgtttttcagtatctctggtctctttatcgacagccctgctccagccatgactattaaaaatgtctccacatattgccaaatgtgccttggggatcagatcacctctggttgagaaccactgagatatatcaattggactgaaaattgaaaatgcattgagcatatcatttggcaattattattgattaattcccatygtgccctttattatcactcagctgctaggagaggaagcagcaggggctattatcactgcccttctaggtgcagaggcaggtgtgagacacacagtcctatcacagcatgcccaaggatagacttgtaagtcactgtttgttcacactggagagaaggcactgcccggcctgttaccccaatctcttcctgtttcagatttctaacaaataagaaaactttctatcaaataagaaaaaatgtaygttttcttagtagaagatatagaaggtatagaaattgactaaaatctgtgtcattacagattttagtcaatcatttaatggattgcattgacatgaatccatcattagtatgtatttgctctattgggcatctcttgctgttgagggaccctcttttggaagagctgccgcttcaaagggctccaaggracgtgcagttttttgtgagttgttcaagtccccaccataatagtgaataggtcttttgtagtgtatttgaatctgcaaattcacacagtgaattctgtgaatcaaaaagcagattcactgctattttctcaaattgcagctttctttgtgggcttcctctgaattgaaataaatccatatcttgggtcataaaaaccaaatcacaagggggaacatacaactgggaaataagcctagaaagaattggcaaaatatcactggcaatcaaaaatgtaaattaaaataattaatttccacttttgcctatgagagtaataaaaatgcattagtctttcagccacccagtgctggttaggtgtggtgaaactgccactctcatattgctggtggcactggaaatggatacagctcatttataagtcaattttacctcaaatccaaaaagttgcttatgctttttaattacataactattccaagagatctacgtgtgcatgaaacaaagcacttttcatggagagaaatgtctcttaggattacttgagtgaaaagtaaatatccaacaagaagatatagagaaatatagtttgatatagcgtactctgtgaaatataattcagctgtgaaaatgagagttctgaagaccaaatggtaacagaaagaatgcttatgtcaaaatgtgatgtgttcacttaatgtgcctgattattgcaaccatgtaaaatgtgtgtacatgcacatatgcatatgtatatatgcatatacttaaaagctccaaaatactaacagttgggctggaagttctgcagttgtttataatgactaatgattttcttttctccttgatctaatttttctgtgaattcgcttttgtaatttttaaagaaagtattccaaaagagaaaaatcttgcctaccaccatcacatcatctctcttctttttgtgtctgctccctggtggacttactccttttctgcttatctatctcctacatgctactttttaaaaatctctggacttttggaaagcaaactacttttcatttcaaataatacttcttgaattttaagaggttttaaaaagaagtttaaaattataatggtaaaacctgctaatgggggaaaaggcaaggcaatatttgggtataaagtggaaatgaaaatactacccacgcctgcctgcggcacattcctccctacccctaccccagccccagtggccccatatccctgtacctgccttcatagggaacagttattcacagtggtttagtgtttatgctgctgatctttttctatgtgtttacgtagatctacagacattattacatgcacgaggtcatatgatgtgtgtgtgtgtgtgtttaacattttattccttgtaagggaagttgaacacaatatgcaaagtttgtcggccagcatttgagactgtacctgggaattctgtcttccctttcgggctggatgccaaagctgagttctactgccactgctacctgtctcttagggaacattctttaaggcgtgacagaattcacagcacatcattctttttttagttctcatccatcttgccagtttatgaaaataacaagcttgaaagaataagagtctcctcatttataaaatggatctaatacctgcgacttgtgttggtgtgttctattggctgccacctcttgtggtctgatattatcaataaagatatcactgtttttcaaattgatgtttctaccttatttgcagttagtggctaaagggatcagccaatttaggacatttgcattaaaaaatgtatatgcagctctattactttttgtggtgaaacattgttcttcaggattcacaggagattaaagcgtgacctcttaccccagggaatggcccaaggtagaaatgtcttgttataatgtgacacagacccatctcgttagtttctgcaaagctgctgtggatttgaagactggaatgtcttagtttgtaggcgctgatagaaaccgttcaacacatttcaaaggaagtttgtaaatcagtggcgactccaccaggcaagtgtaaagagatggctcttgtgtctcctccctctgttctatcccttctgtgatccaggagaaaaatgctgtggttcgtggctggaagatgtgaagtacacactctccctgttatgtgaagtgcaccctctgttttccctaagaagggtgaggaaaggaaccgaccttccgggcctttrggagccgtgatgggccatggcccctttagataactgggcttatcactggatccaggagrgttgtttttccaggcagggttttmagtggcttagcttctgtgacacccgtgtggcaatcaacctcatgaagtgtggacatcaacaataaatctgtaattcatacagtagccatttgtccatggcttggggcctacttgttatgtaacaaacggatgtgcacctggcaaaccccattgggccagagaactggtctcatttcaccttgatcggtagaatcccgagtcaaaggatgtggaaggaggctgtggtttcctcagggctgtggtgttcctgattttctgtgtataaggacatcacagccacagtttttgcaagaacattgtgggggaaaatggagccttgtgaagagacatttgaatagtagttcatagaattattcattaaacattactgaagacctactgcatgccagggagacagactcatgcgcatcccccacaattgcttccaggagaacagtgggcagggagcctgcgtcaggaggcagaaacagcagagggacccctggaatccaaagcgctgcctttgggattcccagggattggggggtcagaaaaccttgggtgctcagccctgccactctgtgtcccatcatctcactgcagtcaaaactgtcaaagtccgttctggttaacagagagtaggcacctcaagtttggcagattttaagacacctggattccaatctggctgtgtgatcttgggcaagtccttcacttttctgaccctcagtttcttcatctgtaaaatggggataagaatctttgcctggttaaataggatcaagcatgacaggactgaccagggaggcaccgtgacctccttgcttaatccctgactcactttgggaagcctctcctttccaggtttcttcccctttattgctctggggtgaagtggagagattgtgggctttgaaggcacaaagtccaggtttcagatagagtctcggaggcctcatttcaaaccccagttctaccacttactagctgggtgactttgagcaaacaaattgatctgaatcttggttttctctgtaaaatggggcatacgaactgaggagactaaattaggtaacatgtggaagaccttggcagggcgctggtgatatgcctctggttggggactgactatctctggtcacactgcttcctgccataaaggtcctgttgacataaagccaagttttgagcatgacatgtcctagaaggacagtgatgggraataagaaccccgagtctcagcccaaccaccgtgcttgtgtgctagcagtggatcagctgcagagagaagctgcgggctgcatggctcctgcctgcaggcccatgctgacgctggcggtggagtgacttgcctgctatgagccacagctctggtcaaagcaagctctccttctgtcatcatgaccatctctgtcctcagaccacaaatcttccccatcacggcctgttccccctgccctaagccctagttcacccaggagggcctgcaggtagtgctgctaaaatgctgtggtcccttggtttgcaaacccctgcagtatgaggaacaaggaccttgttaaatcgtgcttttaaatggagccgcggctactctggacaggttcctggggagacttttgtatgaagtaaggatgcctgccccagatcccgcctggatcagccagcccccatggaggccttactcccaagcaatgacgtggtgggaagtggtggaactacgcacacccagcctcaggaacaaagtgactcccttcctctcctagtgtctttacggggctacctcatttcaccgggcaggaaaatttgccgtcttgatgagctggagtttttttgtggatttaaaatgtatatggctgtttcttccaaggaagggaagccctttctcacagtgtcaaccaacttgctcagaccacagcaggtccacaggggagccggggtggtgctccaggccgctcgggtctccacccaggctgctctggtcaagtccatggttcctcttccgcttggaccctggggagtgcagcagctgcgtcaggaagtgagggcgcccttgctctgtacctggagccatacctggatcaagtttgggytctgccagttgccagctctggccttagggtgaatcttaagctctcagggtctctaaggcgccatctgtaaaacagagtcagtaacacttcccagataggattgttgtgggattaaatatgagatgacctatttaaagagttaacacaacgcctggctgcagccattgctcagcaagtgagagctgttaccatctccccctccaggcctgtgtcttcctggctggtatcactgggcaagcctcttaacctctctgagcttggttctctcatttgtggaatagggggtctttttctcagccccgctaaccactaacaaggccacacctgacactggcacccaggccacccgggctgactgagaccaccctgcaggccaccactgacatgcacagagagggttggttattggtgctgagtaaatccttccaccatcctttctaatgaattatttttgatcctcagaactttgtcagcgagcaagaacaatgccaggaggtctggagaaaacgtgtcatcagtgcatttctaaaatcgccagcaatggtgagtcacaactctgagaaatgccctggttttgtaggattgagacctctgggatcacccgatgagctaaagctggagtggatcatatgagtgggctgtgcttggtatggggtggccccagggtggtagagctggggaagacagtgtccggccctcggttggctgctttctccttccattccttaccaattcatctttagttttccatagttcactgtatgtgttttccatgtaatatgtgtttgaaaaatatgcatgtgaacggagtcactgctacaatcagtgtatgatggcagccgtgctgggcaacacggcagggcaatgtgacaccttggacctgggtagctttcccttactcctacctcaacctgtctccttactaaattggatattcccccactatcacctgctggggtcctttctgtccagaggggctggaccatattacagaagacccagtctgtcttgtgtttggaatatcccaaaatcagatcccaggccttgggggtccctgggatgaaagcttttacatcatggtgagatgtatggtctaacttttacagatgaaatgtggataaagggaacattgtgggaagccttaagcaactcatctccaggcactaatatcaggaagctgcagtcagtgggtagtggcggactaaggtggagggtcagcagaacaaggggctgacagatgggtgcctgggcacctttccttacctgtacttaccatgtcctagcacacactgtccacctcccacttctcctcccatgacgtttccygcactgctgcatgccagcacctccagcagtgcctgacacacagtaggagctcaataaataggcactggctgactaagcaggtaaatgagtgaagagccacctcccagatacaactgaccttctccattcgctgatgggcccagtgcccatctcattctcctaaygcacagccctgacattttactcccagggacagctctaagggccaccctcctttcatccctggagcacacctactgctgtgagggccagagtgggacagtggtgctggagtctctgcccagggcctctgatgctctggcaggatgaaaactcataggtttactgccggcagggaaaggagacaccatcagctatattgttgctctacatcttcgggaaattagttaccaccacctcccccaacacacatcctacctgtttatgcaacagaagtgctgatggcaacaccaggttggcaagagaggaagtatyatgctcagggtttcccagaaaaagggatgtttcctggctgcactgtaaatctgcaggtcaaggtctaggccaaccttggcctaatgatggcctccttgattgttgagatttctgcccttgttgtatgaataactccgtcttcagccagcacaatggcaaggcctcctaagtgttcttgctgcctcttgcccatcccctcagcacctcctctggggaggtccttcactgcacagtgactccccattcctgcagaataaaacagaagcgtttgctctcttgtgaaaccctttgtgattgagtccccgtttacctcttgaatcactctttcttcttcccttctcactctggaaaatccagccagacaaaaacattttaggtttcctaggaacaccagcttctgttttccccctgggccttccaacatgtgtttctttgcctagacttctacttcctcccacctgccccctcagataaaggttggatcaggcaagaatcatcaatagacactaaatctaagaggaaattttgatgacaagcagtacttggttgcaagggaggaataaaatagtaatcatacagtggagaaagtgggccacactttggggtttaaagtgaacattaccagtgagggacaggtggccgtcacctatgcagtaatccagccaagaatgcacagcctttgtccaaacacaagggaacatctgtcaaatacaaggtgaagaatgttctactaaaaaacagcagagaggactgtattcttcaaaaatgtcaacatcctagaaaacaaaacaaaaagggctgatgagaatgttctagatttgagggaggtctcttaatccactttgtgctgctataacagaataccacagactaggtagtttataacaaacagaaacttgttggcttatcattctggaagctgtgaagtccaagaatgagaggccggcagctggggagggccttcttgtgtcatcccatggaggaaggcagcacgtgggggagagaaaaagggctgaactcccccttttataatgaacccactccagtgatgacatgaactcatttactctgctcccagggcctgatcacctctcatttaagctccacttcccaacacgtttgcattggggattgagtttccaacacatgaactttgggggacacattcaaaccatagcaggcagaggagacatgacaacaaatgcaatacttcagcctagactggacccaarggctttattaggtcatcaacattggaatatggatggcagattaaaatattgtatcaatgtaaatttaagaagctgcgactgtactaaggtactatattaataagagaatatccccaggaaatgcacactgggattatttccaactaaaaaatttaaaaacttaaaaagcatgcagagggaaacctgagtggcaagtatctgaatgtttgctctattactctttgtatttgtttgaatgtttgagaattttcataattaagatgtcttttagaatttaggctgggaaaaattggcctccttggcctgatcccagacctgataaaatagtacatagatgcaaatgcatatactgtagtgttttcctttcaaatgacttctaaatttacttctttctggttttctacattttccacatttcctataaagctacatatttatgtaattagaaaataaaagttttggccgggtgcagtggctcacgcctgtaatcccagcactttgggagaccgaggcgagcagatcacgacgtcaagagatcgagaccatcctgcaacatggtgaaaccccgtctctagcaaaaatacaaaaaaaattagctgggtgtggtggtgcgcgactgtattcccagctactcgggaggctggggcaggagaatcgcttgaacccggtaggtggaggttgcagtgagccgagattgcaccactgcacactctagcctggtgacagagtgagactccgtctcaaaaaaaaaaaaagaaaataaaagttttatttttattttatgttttaagaacaatcttcagatatcccccttagattggttggtgctgtccctatccacatgtggagctgctaagtggtggcggcctcagaggagtrgcttgtttatctgggcgttcatccagggagtagggtggtctccgtgctctcagatcccagcaagccacttgggggagctttctggagctctcctgggccactgtgcagccctggctcccagcctccccatctggcactctctctgtcaagctctctgctgcagaacatttgcttccctgcagcctgctgccaccctggaggatcgctttcatccctgggcagcagtgaaatcttgatgaatacatgtgcagcgtgtgcagggctctagccctcataggataactcaatgaaacggacaagtgcagtgaacccaggctgttgcacctgtcagggggtcctgggaagtccccttcaactccacttggagacagcagcagagaagggcccagcaaagtccatgttcaagggggacaccaggagaaagaccttctgctcaggcctgggtgaaggaaccgtgactctaggtggtgtttgcagcccctcagctgtgagagaaatttacacaactcaacatactaaacagagagtggtagattttattctacaattctggccaggagaaatagcacattaatttatttttaatgtacttttaaaacttcaaaacttcttcctctttaataaaattaatttgactctgagctcctacttgccagagtaccaggaacatcaaccctgggctttgtgggtcacacgagaattcaagtatgggagttggagaggaggaatcacgttttcctcttttgggggtctggggcagggtgtgctcctgctctgtggtaagccattatttcctctacacaccctttgtgcaatgtttaaaaggtggcccccggcagtggtagcttccaggacacagtttagtagtagacggtgcttttattggaagaaaagtgcgcccctcttccaagcgagaggatttccaaccttcactcagccctgtagcctcacacaggccctctcttctctgcacaaactgcacagcagcacgctctgtccttgctatcaggtcagcaccggtgtcaagcttgagatgtcggggtctttacgagcctggggacctggtgccgcctccctaggtgcttctagtagcaattccttttggacactgcagggaaggggccaccaacccaaggttccaccctcagcagccccctcttcattgctcctcctctttgggggactcccctgcatccctttttattgggacaatcccatagaattgctcttggtgggcttcaagaagcacaaggttgccctctcttttcagggatcagagaaagagatggcaacatcagtattgtggaagggtccaatatttcttactaactcgtcctgttacatgaacaactgaaaatctcaaaagcaggcagtggaggtggttttagaaacccatactccagttcattcccctggcacattaaatgcagtgaattctgaaccgaatacatcctttccctaaagcccctcctctttctgtccctcacatttccgtcagtgcctccaccattcttgtcacccgagcactgcacttcagtcattctttactcctttcttcccttcattcccacacctaatgggtgctcaaggcgctgctggagcctcacaattgctctccaggctgagttatgmaacagccacttcgctggtctcttcactccgagagccaccccctttagtcctcattttctccaaaggttcagctttgattattatttgatgatattattgatgattatttgatagctgctttccaattgcaaaccctacaactctctttatcttcctaataaaatccagatacccttatgcaaaacagaaatgccctctcttctgactatctagtttccatctgatctccttttctctgttatgatggatgatggacgctcagctccatttcatgatttgccactcccccaaaccactctgagtgtctctgtctctcaaatcttttgtttcctctgggcttttttcctttgacagaaaagccatctccccacaactcagcccgtcaaaaatcctacccatccatcaacacccagtaccaatatcacctcctccttgaggccttccttgatttcctggggactctttcctcctccaggcttcctcactgcattgtgcgctgcccctgctggtcccttccacacactgatttgtactgtcccttgggtgcacatctcatctcccttaagaggtggtgaagtccgcattgccgaggcttctcatgctcactttgcatctacccaaaccttggtcgaatgcaagaatgaatagctgaatatctataaagaagttcatctatattcaaaggggattaagtgctaataaaaataccccctcatgcaaattgctattggctgtgacctctggggattagtgggtggctrtggcaatgcagggtgcttgtgcagggctggagaagaggggtgggtggaaacgaggcagaggcagaatgactgaacataccaggagagggcagaagtggtttgggtgactggggtttgggcaccattacagatacagggaggtggaaagggcagtttggaaagaggagtttagtttgagtttctcttcctgcactctttgccagttgccttctgggtatttgatagctcagtggagccccgaaggatggtgttgcagagaaaaactgctgggtcccagtctcagtttctgcrctaaactaagcaaaagatctggggatatattaatacttgctattcataggaaacagactccggagatccttgagaacagaccaaaagctacccacttttcctaycaagattacccatttaaaaatgcattgaattctcccagctacctrttttgactgataaccggatggcagcgtatctttaacacctgctaccatgctgctccctctgacaatcacgggcagcagcaatcagcagtcgtgagagcagcccaccctgaaatgcactgcaagaggggagtgaggatccagagccagcaacccaaaagccaccctgaggagggcacccttcccaatagtctgtcttttcccaaccttcagtaagtcaggaatcagcctatctgtgttcttagcataaagaatgacttgactccaacgttttgattctaatatcctcccactattgctctaattttgaattattttctcctttggaccctcaagctgagtttattttcacccagctctttcaaactgactttctagatggagactctcatggcatcagaagccagaatgtggcactctgagttgcattggaattggtgctcaatagaccagaaggcaggacagtattaactagtggtggtcactgctgtcaagccgctgcaatcgcaacagcggcatcaccaggaagctcagcctctgttccagagagctccaaagactgaggagtgggtaaccagatgccccaggaggcagggggatcaggcgagagtggggctccccaattcctgactgtggcttgggtgtccttattaggaccaagtggtaaagaaggcctcgtgctggtaactgctgatgatttccatcccagtggatcctacaacctagcccaaccccagcacctcacaccatgctgagcagacagctgtaggaagcccctgaagattctctagccagcttacagaaacaggctacgatcacctgagagttgcttttattttattttatttagatgaggtcttgcactgttgcccaggctggagtgcagaggcgggattatggttcactacagacttgaactcctgggttcaagcgatccttccatctcagccagcctccccagtagctgggaccacaggtgcaccaccacgcctggctaatttttgtgttttttgtagagacggggttttgccatgttgcccaggtgggtttcaaacttctgggctcaagagatccacctgcttcagccttccaaaatgccggaaatacaggtgtgagcaaccatgccagggtggaagttgcttttaaatgcagattyccaggcgccatttgtactgatcctggtttgtgagatctagagcggccattgagaccctgagagtcatggctctgaggtgcagcgagcaagagtgagcctcattagacttcgagcaagagtgagcctcattagactttaagcaagagtgagcctcattcgacctcgagcaagagtgagcctcattagacctcgagcaagagtgagcctcattagatctcaagcaagagtgagcctctttagacctagagtggtgatccagagaagcggactcactggatgaagccagggcacagcctgagaacagggccagggagtaaggccgcatccacttgggagttaaggtgtagaacagtctcatctctgctcagacaccatgagaaccacagtgtatacctcacctgttgttttctcgattcttcatttgattccgaagtgggggctgaaataaaggggaagcctgggtctccttccatcaggaatggaaaataataatagtaatgataatggccagcatttatcggtgtttattatgtgccagaccctgcgtttagtgccctacacagattatgcagattatgacatttgatgattttgacaagtctgttaggaaagtcttgtaatcgtgcccatgtttgcaatgaggacattgaaacctcagaggttaagagtcctgcagtccatgctgcaggtaatgaggagcggagtgggctgtgactcaggtggcttggttgcatggctgcaggtggtgagtctttacagcctcctccaggtagtcattaagaatgttctggccctggccatctctctcagccctgctgggaggtagtgaagaggaggtaacattttacctctccactcttagggcttttcagctgggcctgagaattaaactcacataagacagattaacaggagaaaagcacactaatttagtgcaagttttacatgacacaagagccttcataagaagtggaaacccaaagaaatagcaaaacccaaatgcttttgtacgtggctgaacaaagagaggtaattgcagaaaaggaaccaaactgtgtggggaggctaagggaagataagagtgattttgacaagatctgtttgtacagaattctcttggtctcartgtcccatccttgatgataagaatggtgctttcctttggtatagggaggacatcctctatgtggggcttttgtttcccacttttaagaaggaaaaggggagggtcagagtacccttcttccatctgctattttttaagtgcctttagctccaaataacccttatgccacagctgcagagtttggggtggcatattctgccacccttcagtaggaagcttgggtggcaggtgcctccttggggactgctccatttctttgtgtcactcactgcctggattatatatgtggccaggtggcaccatctgcctcaagcttgcagcacagggaaggatttttcaggatgccgatcactttttttcatccttgtaacaagctccaaggtcaaaaatgcagaataggattcatcgaccccttgaatttctatcctttgccagcaagaaatttcttccttgaccgccactctaagytgagaattaaaacaaatgtggctagattaactgaaattctctctaattcaccacacctgccagcagcactgtgtcactcatgaccagcagggccccggagcaaaacaaaaatgcaaagcaccttgttcaaaaagcaggaaagaagcactgttcaagggactaaaatataaaaagctttttcctttcttctgcagtctctcttttggcctttttatttgctgtttaatatcatttttaagtaggggaaatcaaaatgtgtaattattagtatatattttaccgttcatcttaatattgcataatgtcagttttaaatgcaactctaagagcatttaactcatatgttgagtcactgaaatgacacaacttgtgtttaatagctcttatacacattttgtttttatcggaacattggaaacattgtacaaaactaacaagtcttcattttgcttcttgatatgggtgtattctacccacattctccaccttctgctcacagataggtgaggaagttgtgagaggacaaggtatactaatttaggggtcagaaaggggttggtggagttccttcgttgttcctgtttcttagaacatcattgccttctgtctgcatctgaagcaagttctggttcaaatggaagtaaatcttttcaggactgtcagccccctgcttactcagttgaagacacaacacgctttcctcatattggccctgagtcttgcggagtaaatgtgaatattggcggtaaagggcagcagacatgagcatttcacaggctccctctgctcacacatattcctcactgtcctgtccaacttcacttacaatacacgatttcgagagaaatttatttagaatttcaagatggcaacagaagagcgtcaaaccagatgcttggggccgttaagttgcacgcctttgaagctggctctggtgatagcattatatacaactcaggggtggtctgaggggaggagtggaaattggggcaaatcactctgcatgcctgcccccatcaacatttcctggaggtgaaggtcaaggtgggcatggagggcaacttctcgggtctctttgagagaggggcagcaccctgccctgtgcaccctacccgctgtgggtagcaagatcagagctggcgtttggtggtgtgcacgtgaggctcccagccagaggcacttgcagccttagagctcttctctagagaagacagattcccagataaatcctagatctttgacaattcaaaaccacaaaggaccttgcagattaagccaggtacagtgggctctgtataaatacagaaagcccaactcaagctggctaaagtaataaaggggatttattggctcctataaatggcaagtccagaagtagtttagcatcaagggyggtgtgattccatgggtgatgaatgtctctgaggacccagtttctttttacctcttctcttgcctctcagggcgttgttctcattygcaggctggcttcccctcatgatggcaagaaggctgccagccacccccagagtaattcaattcctcaccagtggccagggagggagaaaccttgtttctggaagttctgtcagcagagcgagaaagctttttcctgactctcagtaaatctcccartataagtcatgagcccatccactaataacgtatctggtaagtggggctctgctggttaattgagggtgaaacttcatgcccttttctatggccagggtgggatcagcttctgccagagcacataaacggcacagcagaatggggaggtagggaggtgggggtacccgaaaataattaaggtgatgacctagagaggaaggagtagatgctacagaagctaccatgaggttcactcagagatcctctgctctcagcatgacaacaggactcagcagaaagcacagatgtgtgatgctgtcaagactctgacagtgggaactggggggcaggcctacccaagaggcattcaaattcacactttcaaaaaaaaatgctggccaagcaaaacctatatctgcagatatatctgccgatctggagaacagatgaggaaaccaagaagcaaagcagggaagtaattgcctaatcacaaaagttgccataccctgaggtccttgtgcatacatctgtcaccaccttttacagaagaggaaaacggcttccggatgtcaacgaatttgcccaaagccacatggccagtgagtgacagggccaggatttggacccaagcctgtgtagcccccattcctctgttctttcccaatgtctaaaagttggattggtggcattaacagaaagaaaaaccccaagccagttcaaagctctattatactgtgtgtcagcaagaagttttaggagcccatctaatgtcatgggctgtggaatatataaccaagtgaatggaaagggaagaagattttgtgaagcaaatactttcagtgataaagtgagttgtcagtgaattttatccagggaagagaagaaccatctgccctgagtacaggcacccaggaagcacagggtgaatcctgcctggctyagtggatgccggcagcttctggcatcctggcacgggcacagtggcagtttataaactccttttccataagctgtcagacttggagaggtcctgcaggatatctgggccttggcatcggcaaagtgatcacgagagatgttcagctctctgagaagtgcaagtcttggcttgcatccactgtgtgggagccccaggcgagctgcgaccttctcctcctgtctgctgacttgccactggagagaaagtcaggtttcacaggatgcttaagaaactgcagtgaagaggaaatgcaggggtctgtgtgtttctaacccagtgcctgccccttcttctccttgcagcctgcttcgttgttgtgctctgtgctttcctggctctgccgctgtccatgaccttcataggtaagctgccttccgagctgctggacgccacaggtcagccaggttggggcatggacccaaggcatgtaatctttaaacattaaatatgtgtttaagaagaactggccagcccgatgattcccagacacctatgtgccatctcagaatgacttggtgaagatttaaaaaatacacattcctgggccccgccctgggagatatcagtgcagtatatctgggtggggacagacactctcttttagaaatctgtccccagatgattctgatccctccagcccaagtttggaagtgactgggctagaggtttcccaaagtcccttcccagttcctatgttcccttgtggaagcaggttgcaagcaatacaaaaaatgcacctggcgttaggtgatgtatgggcactctatacatttttttttttttttttttgctgaatgaatgagtaaatatttccataaatcacgtatattaaacaacctcataatccagaagtgtgaggtctagcgaaggtcaggggaggggcaggatgggggaagctccttaagtagctaaaaattgttatcacgtgtcagtgaaattaatctcatgctcctgaacattgctaatgggagccctgtgtacaggacctagctacccctatttacctagaagcccagcatggctgggcatggtggctcacgcctgtaatcccagcagttagtggggctgaggcgggccgattgcttgagcccaggagtttgagactagcctgggcaacatagtgagaccttgtctctaccaaaaaatgcaagtcttgacttaaaaattagctgggtgtggttgcgtgtgcctgtagtcccagctactcgggggactgaggtgggatgatcgtgccactatacctccagcctgggcaacaagactgagaccctgtctccaaaaaaaaaaaaaacacaaaaacaaaaaagaagcagctcagcaggcccagtgttctaggtccaagctcacagcatattggagcagaaagtaaaagagcataggagttgttgcaaaacagcaacaacgaaacacccagtaccctaattgcttaatgggtaggagccttccttttgaggtgatgaaaatgttttcgaactagatggaggtggtagttgcacaacactgtgaatccactaaatgccactgaattattcactttagaatggtttcttttgttatgtaagtttcaccctgccacccctgctaaagccacaatactaaaaatggaaacaaaaacagtatccttagatctgtaagacatgaaagctaacagcctgacaggaaataaaaaagaagataagattttaaggtttgcagagaactgaaacagccaagtagtctggggccatttagtgtaagagtgaacaattcaatcacttcagcaggccctggtgctgtgattattacagtgcaattcaaaaattaacacttattatatggctctgttcttccaagaagagttcacaagatgttaggcatgccctgcttatgaagtcgggggtactctccagagggcattctatgcaaaatctgtaaggtaagagaaccctagcctttggaccctgtggttagttacctttctttttgctttcttttgagacagggtctcactctgtcgcccaggccggagtgcagtggagcgatctcggctcaccgcaccctctgcctacccggctcaagtgattcttgtgcctcagcctccttagtagctgggattacaggcgcccaccaccatgcctggctaatttatatatttttagtagagacagggtttcaccacgttggccaggctggtcttgaactcctgacctcaagtgatctgcccgcctcggcctcccaaagcgctgggatgacaggcatgagccaccgcgcccagccagttatctttcaaatgaacttaactgcaacaattcatccaccaataaggctgcataaaagagacaagaccccacaagccaattcccatggatattatattaaaatcaccacatccactgcggaaagagggttttggaggtgttattgcttctagagcaatattggttatagagtttgtgtttggggtgatgaaaacattttggaaatagatagtggtgatggttgcacaagatgatgcatgtaattatgccgatgaattgtacacttaaatatggttaaaatggcaatttttgttgagatattttatcacaataacaaatattttaaaaatcactacatttggtagttgttatcaactgaactagggagagatctaaaaccaaaaagaataatcgtgatactgcagatcagacaagaaagaaaatctagagttaaggtaggtcctaagaagtacatgagaacacagggggaaagatggcttttattaaatttattaggatcgttttaagccatctgtgcactgattgactctcctgtgaacagcagctgtttttattcattgggaatgagcagatatctaagccattactcaatgttcatttcacagctggcttttgaattgaaaggcagtccatgtccaacaaatttggcaccaagtacttaaaggtctttgtgtgaaaaggctgtgttgagacttggaaagtatttccatttaataacaaattcacctaaacatcagagataactaaaagacaagcctccataggttgatgattggatcaacgtgtatatttgactaaactctgttttgggccctgaatttatggctctctgtatacctagaaaattttgttcatttcaatggaatatggtgtagtcatagaaaaacagtttactccctctgcttaagtatcaaggcatttatagggaataaaattccaaatcaaagctaaaagtctaaatgtcatttaaacaggaggctttggttctacagtaagaattccctttcttggactctgttgacagatgtgttagtcagggtaacttaactgtgctacagccacaaattaaccctggaatcccagtggcttaacactgtaagagtttatttcttgcttacgcaaattccatcatggctcagggggcatggggacttctcaggcaatgtgatgacataatagtccagtctgcttcaatcttgagaacaatccatctccacccatggtttccaggtggtcaaagcagaggaagcaaacaacgaatcatgtatcagtttttaaatgctttggcctgggctgggcacagtggctcaggcctgtaatcccacgctttgggaggcccaggcaggaggatcacttgagcccaggagtttgagaacaagctgggcaacatagtgagtccttcttctctacaagaaaaaaagaattagctgtgcatagtggcacatccctgtgatcccagatactcaggaggctgaggtgggagaatcgcttgagcctgggaggttgaggctgcagtgagttgtgactgaatcatgctactgcactccagcctgggcaacagagcaagactctgtctcaaaaaaaataaatgctttggccccaaggtgtcccacagcccactggtcagaactggtcacactgccttgctacccaacaagggcacatgctgggcagtcagtgtctcccatagcaaaggtgtgtgttagaattcatctggagcttggttgtttgagccagactggtccctgagggaaatgggcatttcttctttatatgttaaatagacacatcatatcattggttaataggtctagggaacaaagacctgagaaaagtagacagagcattgctttggggagaaaaactaccattaagaaagggtagactgggtaggctggcttggtagtactctgtatctggtagctaaggatatgtgagtacacgcgtgtttcccagcatggggtccagcgagtggcatggtcaatggttatcatatggtgactgtgactaacacggcagagggcttgctgcacagggaggaagagcggctcctccctgccacctggcccctggaagcagagtagatgagaacctcattcacgcagagtcacattttggaaatgtgactcataaattgaaccttattttaagcatatcaagaaaaccgtatatttaaagggatcctttgaatcctgaatccttgaaaacttgagttctcatacactggctattcagaaaggcagagtgcaacccatagccagttaatacccagaaaaaaggtgcagcgacacctggtccctgccctgtctgcgggagtatttatcgccactccgctgtgagagccatttctgcggtgtcaatccactgagcttcctgaggatcaggtgactggtgaggctgagcagatcccacaagcatatggtttgcatgattaacattttggcttttgaaggtgttccactcattttcaaaactgggctttgtgctctcgaatgtatttctctcaatcctcttctgtttgccctatgtaggaatgaaatttttggaggactgccctatacagcccctcattcctttatatttgctagtgggtggcatcgtcggtaccttaaaggtaaagtatctttatctgctgtttgtagtccttgtagaaattaactcacaggcatcctgtaatgcacctgttatttgcctgctattcacaggggagacaaaacaacttccccctaagcgtggttgctgaagtgatggggctagctccagagacacagatttttccagatgcagggcatttacccagggctgtgcatatttgcaagagcttccttcctgctgttgagttcaatgtgctaagctgtggctttggtctgacaagagttgatgcagaggagtccctgactgccagttataccattgaattcagccagtgaaatcatggtctttctctgcgctgctgctgctgcttttttttttttttttttttgaggaaaaaaaagcttcctgttgaaggcagggtttgcatttggttaaaatatgtttgatttagcagttcctatttctgcttttaactatacttcctagttctcaattgactaacataggattaattggctgcagttatcaatcaactattaaagtattcttatgcctgaggtaggagtgcttctctgtgactctcaaggttatgtagttaatctgctcctgggctgtattgacatttgtttaaacagaaaaagcaactgaagaagaaatatcaggggcgtgcatagcctgcaattgttttcaagatccctggcccacagaaatgttacacctaccaagagaagcttaggtcagcctctgtctatcaacaactcttcccagtcttccaagcccacctcaccactttctatatcaaagccagaaaacacaagcatccattttcccaagatggtttcataaaaacaaagccgtaacacaagagaaaactgagtcaagagtgccaagtatgaactctcattcggacccagtgttgggtttctttgccagctgccttctggtgcggggatccttggagagatcctggccagtggcgctggtcatgctgttgatctaagacatcaaaggaacgtcttgaaaattgctgttctcatatgcaattggtagccacaagctcaactctgtcgtgggagacgtctgatttggggcaaaccttaggaggcttttgtgtttgaggtaacctcactgttaaatgtccccatctcctaacagcaatctggtgggcagtgtcctaaaatgtacaagtacacacaatcatccccatcacaacatccccatgggatctacctgggactctgttcagctccaagaaaacccaaaggctcttggctcagcggggccacattttccccatggcccccacagtgttaagggaaggctctaacggtttgagtgccatagagatgcttaaaacaagggcagcgttttcagcagtaattacctctgcctctcctgttctcactcatcgtcaagctgcccagcagaactttcctttagagatgctactgtccgtggggtctgttcctcttaaaaacagcaaacttttcctttctgaaagccagcccaggacccaaaggtaatttattttagtgaacaaactaaggccctaataagcagcattgattttttgccctggcaatctaaaaccgtttgaagccaaattaaatttttgtgctcatgatggcaaggtaatatacagtgagtccataaccattagagcagcggcaaacaggattagagtccccagaggcagaagtttgcctgtgataatgatggtttgtattcaacctcagaacctgcctagggggtcccaacatccttcgtgaaatgcatcagatagcttcacagtattgcattctatgaagagaaacttgaagagatgtgagctgacatttcatggagctaccaggaagaactgagggtcatgccccattaaaagatcaggaaatgaattaagtaggctgtgtgtgacctgctttttaaaaaataaaatagaaaattagagtgcctagtaagttaagtattgtgtgatacttacatatggacatgtgtgtgtttgggtgagttgaccgtgtaatttatcatcctaactgggacacttttgagagtacaagggggctctaataatcatcctgccagagcaacagcataaaccaggacttctctaagccaacaaggacatgcagttacccagtgactaggacctggcataaaatgtatttgttactgagggtcatgttaaaagacagtttccaaaagacggattcagtgaccattgcctaccctgcactccccctcatcttcccacatcacccttcctagtggcaattgctacccctagtaagcatgtgctttttgctgatgccatgctgacggctctgccctcatttggaattcattcagtcctcaccgtgcccctttgaggcaggtacttgcttcaggaaggattctttgactacaaggaacaaaaaatcaactctggctaacttaagaggtcattgattggaagagctcacaacctcaaaggttagtgggagagaagggggccaggtggctccaggaagcctgggcagtgggacccacttgccacggctctttccttgggctggttcctttctcctggcatcattgtagccaagaaccagtcctgggagggcagccagatctggggacacgtggtgggtgggggaattcctccaaggaatggggccctgcaaggaagggaaatgcatctgagtgatggaaacttgagctggactctcagttccagcttacagtgaggaaacagcgagctggtgttcagcctgggctttcccaaccacacagccaccgtcagccaacctactacaggcaattggtttttcccctaccctaaacccaccacccttcacctttgccacaccactccccctcagaggaggaccctcgcacctctccttgtgcataggggtcccaagtatgccccttcttccaggcagccctccctggatgagtcagctctactgtgggtggctctctgaactcccccaaggcctcactttccttttcttatggagatgttctgcctcccagccgggctgcaagtcttaggcgagaaccctccaatttaatttcctccgatttaatcatcagtgtactgtggtgtagacagtggtcaaagaggtgtggaccactgcccttctcattctcttactcactgtggatctcagtgaagtgacttaacttctctgagccttagtttcctcatttgggcaacagagataatacgcggccccaggctaggatggacattaaagatcacacataccaagcattaaactaaccactctccttaggttttgtatctttacataagtaataactctccattttggaaaatcagagaatgcagataagcacaaagaagaaaatcaaaatcatctgtaaatttcaccacccagagaaaattgctgttgacattttggcccaatggctccagttttggtcctgcgcccatgtttatttagtacctctagcctcaggctgggagaattcattgagataatgtatgtcaagcgctttgcccagcaccagggtctatttttgtacaacatccattcccagagtcactatcacctcctcacgggtaacccccagatctctgccaggagtcctcacctctctctgttcacctccaggctctgactctgccccctgtgggccactaggccctgcatttccatccaaaattttaaatggaacaagtccaaatctggagttatcacctacccaaggcacagcttggggttcgctgttcccatctctctgtctctctttattttatccttgcttctctttacagtttggagcccagttagctgcatctcttggctcctgcttgcccttccatttcactcaagctcagcatctctccccgcctctgccagtcggccacatcctccgtcatccaaggattctttctaatgccctgctctccagggttaggggtgccatgagtgtggcctcgggagagatgggtagcctaggaagccagagagagcagatacacaggtcaggctttcaaaaacatcacagatcaagttgctaggcagagaagacggggagctgttaaggcattccttagcaaagaccacctgtgtccttccaccgctgcatttccagggggaaagtgtgctcccctgtgacaaaggcatttgtggccagttagagtcgggtgggtcgtggtgctttgtgtaaccaagtggcagcagaatttcgaaggcgtgtcaggctggagtcagggaccatctaccaggggcccagatggtctgtcccccaagagtatcactcccaggacaagggtctgtgctcttgacttgaaagatgtacgaggactgagagggactctcagtccacagccccacttgggaattccagatgcctgagatgggcagtggtacaaacttccaagaagagagaaagcaggctgggcggggctggggtggggaggaaacggctcacggtacctggattcggccaagcctgttacatggcctggaagtaccagggaaaagtctgctaggggttcctcccaagacagagggatatatttcaaggtcctctagcatgcggaccaggtgtcatttttacattatgtgtgggtgcaaatgtgctagcacaatacaggagagagtcagtctgaaccttgatgcagagatgggttaccccagccaatcccttgtccaaaccaactcacacatctaaaaggaaaacaccactgaggatgctggcgatgaatttatgccttcattcttgccagttttaattcttattcttcaaattaaatttcgttgcttgatggcatttgtaactccagtgtgttgttcacttttcataacaccttcctctctctcctctttctctctccctaccaacaccccaccaccgctaccttctatcccctctcttcccgtctattttgctgctctgccttgccaccctggctccccaccacgccccaggtgtctctcctgttgtacgactccaccaggatgaggcggctgctgtccaaggccgtggtgattgatgacgatgacgatgacgaatacccctggaggcagaatgcgcacagatactacatccacctcctgctgagcctcttcctcttcctctggttcatcctgggaaactactgggtcttttctgtgtacctgcctgattttcttccccctttccagcagcctcaggactactgtgacaaaaccctgtacctctttgcagtcggagtcctggcgctcagtcacactgtgctggtcttgctcctgctgtgcagcggctgtgtctacctgtgctccaggtggagacttgctgccgatgaagactgacagctgccttgtccagcataccatgtatgcatatgcgtgtgcatgcacgcgcgtgcacacagacacacagacgcacacacacacacacacacacacaggttcagagaagggcataaaggtaataaaaccttccctgaaggcatttaaaaagccacccaaaggcactgaatataatagcagactaaagaaactcttgccttcctagacatggggaaatcacttctgctcttttcagagtgggaattttgttctcacaagagttttcaaagggataattgtttttgagggtatgaagtgtgggaggcaaagaatgggagaccttttcaaatcatagtgcaatttcaatgactggtgcaagagcaaggttggttgttgctactgctgctgtcattcagccatggtcaccttgaagttatagaaagtgcacagactttcacacaagatatatcttaacttcactcgctatgatggcttttgttattaaaaggaaaaagatattcttttagtgactctagctgccttttgggaaagtgaaggagcagtctcttccagccctatatcagataggtttgacgtgatgggtggaacatcccaaggtcagctataaaatctaacaacgtcaaagcagtagcttccacatagggggcgggctggcctgctacaggcattgcggagtgcagcgccgtgtgcaccgtgtgccgctgctgcaggttctttgcttggccttgagtctgtctctgcctctggctattcaagtacctctctatgatctgcggctggctgggtggcataaaccagttttgtatgtttctggacaggttgcatgagttggggtgccgtcagtgtagctgtttttggtttctgagcttaaatatcgaataatagctcctcaacctaatgaccagttaggctttggaagccttttgtaaattgagatgtctggaagtccaggatgacaccgaacagtgaccactaaccttccctctggctgccgctgttgagagatgaagtccaggtctgttgtcagtgctcgctggggagcctctttatgagcaaaaagtcccatgttttagaattttgtatgaagatactgtcatgagtgtttctagggcagtgcccaggggtgcgtggcacctgcttaaccgtgcttctctcagccacgtgcatagcatttctgtatatttacacactgctgagctgtgtttattttttaactttgttatgttttcgtgctttctcatcaaaccaatccctgagtggccatgaatggaggcacctcccttcatcagaagtgtcagctcaaaccaagaggctcattcttctccgtagctttaagagaaaggccccgtgagtcccatggggtcttcccatttcagtttagaagcactccccgggcagtcaccgttagtccccctttcctcccaggtgagaagaaagtgcttggtgtgccatctgctggacaaaggaagaacagccctttttttgcccctgtccctaagggcagtttctgttttcattttcacttgagccatggcagaaaaccagcgggtgtgcagtttgcagatcctacctcacctatgatgcccaattccatcctcactgtgtcccacgttgccctctctgtgttggggactggggagagtctgtgggctatgatactggggtggacaggagttccatgggctcctctcccaccctcctttccccagtccatgactcgtcagccattcccagtcacttagccaatgcttggacatctgtgagcagcaaagacctgggcccagggacacctgcatgactcccacatgaaagcctctgaggcttctgttgcgagggccttggcaaaggcggaaagagctgtgaacaaccatgggcatgaagatttctgttagcagatggcaggtactggttagtgctttggatacatcagtagctaggtctcaaacgttggacattcccagtttctggtaggcatgagtatcaccagagtgttgcagaaatctttcccagagggagtggtggatgaagtgtgctcattctcatatgcaccccaccagcccacccccagttgcaatggagaatactggtcataggtcctaaataattgctaaaatctggactgtatttttagctttgagttttcttgtcaccaaagcagtaaggaagaggtgatgatctctttgtataggtcatacatcttccctggtttgaggttacagtgagctatgattgcrccactgcactctactctgggtgacagaatgagaccccatctctaaaaaacaaaattacccccttctggggaaacaggttagatcctaaagaaaatgttcatgtgcatccattcatagaggggacactgaatggttcagtgggtgacatcttcaagcgcagcaggctttgaatgataactgattaaggcctccctcaggagatggtgagatggttatgataaggcacatttcaagaaagaggctctggggctaagtaaggcaaatggtctataactgtggttctttgaagtctggcttaatccagggatgacacccagactgtctaggaagggctgagctgcgtgccctttaagtgatcacctcttagtataatttcactgagctggaggtgagtgtaagaagttcctggttatagaagaagttataatccttggcatggcctgaagtaggcagtccacactgatatgaaatgtgctgtgtatacctggagaatgaaaatgcccatctaagactggcccaagagctgggcagccttcctccatgggaacctggcaaggcaatgggaagtggacatgggaacacctgaactttctggatgctatgaaacctcaagggaacaaattatgtggcagagagggataatctgttcttcccatctgagaaaagactgcagcaaagataaactatatgttgagatcattttatttgctacatcgggcatcattctaaaaaccattctttgcctgaatctatataaatgacagttgaaagcagtaaaagtgggactgtttcactggagtcagccacactagtggttctcaaatcttggtgaaccctgagagctacccaaggacttgtttgcaatgcagaatcacagcccccagagactgacttgtggggcccagctggttctgattcggtggccagagaaaccgcatgtgtgcactcgggccacacatacagcctggactggcttatgtcaggcccatcctggttgtcaccatgaggacaatataatgtcacttccagtacttcgtgttatttccttctcttttagtatgagaagtggccaagtggtcaatagctttcatctttgtgtaactgaatcttgtgcttcatttccttctgggcatttttcattgttgatgaaataaactttgttcaatttgttccccagtgtcttccttgaataccctgggggaagagaatcctccagtccttgggatgcttcatttgttctttcttccaatgggatttctgagggtagaagactgtgtccacagaagctgacaacctgttctaggcaaattttgctccataaaactcataatcctcataatcctcaggtgagtagatgagtctgtagtggagaattgagaaaaatgatctaacagaaaattcttcttagtaatcctagtgataatttatcttttataagtatagaactaataagacaactagtctgtcttttctagagctagaatttcagtagttcacttttcaggttagcctagcatcacagcagctacgttatcttggatatcccaggagacagcattttgccattgcaagcagaagagaaataagagaagagtgtttccaaatacatctgttgttttctctctctcttttttaagagatggggtcttgctctgtcactcaggctggagtccagtggtacaatcaaagcccactgcagccttgaactcctggactggggtaattttcttacctcagcttcttgagtagctgggactataggcatgccaccgtgcccagtcaggtttttttggttggttggttttttgttttttgtggggttttttttttaagagatgggggtctcactatgttgcccaggctggtctcaaactcctagcctcaagcagtcctcttgcctcagcctcccaaagtgcgcagattacaggcattagccacctcacccagccctgttgttttctctaagacacttcctttgttatactggtcagcttttaaaacttactgcattgttcagagaagtaagctctgcttcataggcaaaggaaaagcaactgggacttgctgctggtattaagagtttgcacatacagcatgttcccaaaaaggcttgtgactcaaaacgtccctctgttctgattacttcctacttaccctattggtgagggaggggtccctgtcctaaatagtgggagaagcccaaatgcaacccttcccccactggacagatgtgatggacagcagcttattagtcactagactcactgcctgggggaggaggacacagcatgttatgcagggccacatggggcttgcacttgggaacagagtggaccggcaggggccgtgggggtcatgccttgtagtagcaataggaccaggtaaccctgtgttcccatgggaggagtttcctgtcttgcttgagtaatttcacagacgggcagtgaggggaaacccattaggttggtggctgggtgagtggtggtgactgacagggtactggtcaggtgggagaccttgcctgctgagtcaggggcatgcctggtgagggcaggggaactcacagaggaactcacagttaagcccttgggcctctgtgaggctcagagatgtcaaggcagcccagagaattgtaggccttagaatacagcctcctagagccacccctgcctttctttggccttattctctgggttatctagtcctgggttcaaatctgtctttgaatttcctcaacttctcaatgccggaagggagatataatcagtggtgagatatacattgccaaggaagtgaaaaaaataaaaaagtcttcttgaccactaacagtagccagatcagaaccctcgccgcctgcttcctgagagcaggctggcacatcctcttctccagccttccagtgattttcccaccactgcaaaactcttgctgtctgatcggactcttgcaaactgatgttttttactctttatatctttttttgagtatttaagctgctatttaatacaatgtcctgtagcctgtaccttcccatagccatcaaaaagaaaacagaaaagaaaaacatttcctacatcaatttacagtttatacatttgtttataaggaagccagtttgggttcgattcccaagtcactggggaaaggggttgaagcccagattcccctgggatcccttctgtcagcccagcgtcccctcccgcccccagcagcaggtgctggcgctaatggcgcacacctgcacccttttgtgggggccgccttggttgactggagccagctggagcctgagagttctccccgctcccagttcaccccaccgacagccatagctaagggctgagtcggggaagagggaggaaaagcccaactcccttgtttcagggcaggtcaaacttgaggcatttatgcaccagagctgcccgcgggatcaggtgaaagcagggcttcgtggaaagccacatcctttcccagcgcttccctttccccagtgcttcctcccttaccctagttcgtttctcccaaggccacaccctcaacacatcccttatcccagagcttcatctcagactctgcttccagggaagccggcctaagccagggttatttctccacagctggaggcatgacataaattactagtatatccccttttacaaccctttttattttcctaaaatgacaattttaaagctttatttttattataaaagtgatacatgctatggctagagattcaaatcgtgtaaacgagtatgaggt

SEQ ID NO: 95343 - DNA, 98439 bp, Homo sapiens
ccctgggagtgagggggcctaggaaattcaggatattggtgaaaggatgacaaaatccactaaggatgcaagggtcattttcagagttataatttttaataaaaatgaatgtgaccaagtcatttttattaagttcatgaaatgaccacttttctcctctgataacaaaaaacataccaaagcataaagaagaaagtaaaaaatatgacctgcaaaactgccacccagagataatcatcaccggtaacatttggggatatgtctttttgagtgtggttttaacacacacacacacactctctctctcacacacacactctcttacacacacacactctcacatacacacacacaaactcacaaactcattttaatttttttgccataaaactaggatgtcctttcatttaacaatttacaatacatcttgggctactttccaagcccataaatatagatctgtgtcttcttgtttttttttttgtttttttttgtttttttttttgagacggagtctcgctccatcgcccaggctgtgtgcagtggcacgatctcagctcactgcaagctctgcctgccaggttcacgccattctcctgcctcagcctcccgagtagctgggactacgggcgctcaccaccacgcccggctaattttttgtatttttcagtagagacggggtttcaccgtgttagccaggatggtctcaatctccttacctagtgatccacatgcctcagcctcccaaagtgttgggattacaggtgtgagccaccacgcctggccttttttttgagacggagtctcgctctgtcatccaggctggagtgcagtggtacagtctcggctcattgctacctctgccttcccagtagctgtgattataggcacctgccactacgcccggctaatttttgtatttttaatagagatggggtttcaccatgttggccaggctggtctcaactcctggcctcaggtgactggcctgcctcgaactcccaaagtgctgggattacaggcgtgagcccccgcacctggcctatgtccccatttttaatggacatatattccattgcattcctcctgcaccacaactgcagagtcaaatctgctttgcttggctattaggaacatggttgcctacacccatttcctgtgagtgttcagtccaatccgccctctcctttgccttatgcgcctcccaatggcaagcccttccttcctgggtcacatgcttttctcttctagtggccaccagctccagggagcacagcttgcattctaactggatcctgcgggcaccgcgcagacactccgaggatatcgctgcccacactgtgcatactgtagacggccagtttcgaaggagcaccgagcacaggaccgtgggcactcagaggagactcgagaggcaccccatttatttgcccaaggctgtggaaggggccttcaacacctggaaatttaagcccaaagcctgyaaaaaagagtaagtgyttgggctaaatagcatgaccaagatgttctcgtggcctccagacgcttggggtgatccttaaggtgcctccagccccatcttacatgccaaatattattcatatatatatatatatatatatatttgttgttgctggtggtggtgaggtcttagtttcaacatttttttttggtagtctgcactctagcctggtgcactgctcctaacttgcttcttcctgggtctgcctccctttctttctggcccacttagcccatgcactgtgccatccaccttcatggatttccccccagtgccattgacgcatggcatgctacagacttttaatgagtttgaggttcaacagagcatagcaccaagaggaaaccaacatcaaatgaatcagatgcccctctctaaaatgcaccgggcaggctccaagatgtagaacgtcttgctggccaggcccctcttgggccatcttaccaccatctcctctggcctgtctccttttagatcctcctcccccaggcctagttaccatcactaaccgtcaaattcctgttatccactcgctcagagcagtaagctctttctgggtttgggcaacccaggccatgctgcagggccttgcctgtcacaacggaagggcctgtcaagcctcatcagctgtcttcctttgcttctacaaaagccactaaaccctgttggatttaggggctttctagatagcatttcccttccacagtaacagaccatgcactggacatattaaaatcacaacccagccctcaccacccgtccttccccttcaaggccaggccaaggtccagctgaggtccacccatggcccccatggcgacaccatttggtcctccccaagacccaggactagggcagcaatctgagggtctccatgagaatggtggtcattgagcatcccttccctctgtgtggccggccaagccgaacttaaacctcctgcctcattccttccttcwagcctggggagctccagacagatccttttcaacttctcaggagaagatatggagtgggatgcagagctctttgcgttggagccccagttgtctcctggggaggactaytatgagacagagaaccccaaaggacagtggctgcttcgagaaagactttgggagcggayggtgccctgactccatctggattccttgacgtgtctcagactgggtccctgagaagctgtccgctttcagcgcagcatgaggtatttggtagagttgaaaatgccaattgtaacccagtcaacccactcagcacactgcctgctggtgccgtgccagtgccaaacagacctgtggcttcccaggggacaggtctcaggacactctcagagcttgagtttctctgcgtgggctgatgaccagggacttacagcctggctggtcttcaagagctgaaggaatggaaggtcttgagtggagtgtctgggctcactcccctgacctcacctggcctggtcctcattctccacgtgtctgtccaggtggctgctagcaatgtgctcagtaccagaaatgaactcacctgtagatttctgggccaaagcttcaaagaggtagctcctctttctatgaggctcagagacatgctggatctgcactgaggttgccgtcttgtgtgcagaatgcagttgagaaagcagctccttttgctctaactcttttcagagttttccagaaactcctgctgcattaagctaagatgaggctaatgccctggcaatggggtgagggaaggggtatgtcacgagcctgcctgggggccacactgtttcctcaggccccaaaactcagctccccttcacataggcaattgacaagagaagaagggagatggggtgattcttttctttttcttctaattcttacccagaaaaatctttttaaatatccatggaaccagtttatgacaggccacacctttccctttccccagttaagagaacaatcagaatcattacgttcttttggtatagaaaggatttctgtattttaggaactatctgaatcagaattacatttaaaatatattctttgtatttctaaatactttttacatttttgcaatagttgtacccattcaagcttgagaaccactggtttggagaatatactgaaatttatctattctcacttctttttttggcattttcttgtaaaccagtctgtgcatgtataagggtctttgggcagaaggaagggagagagacaaaaaacagaaaacaaaacaaaacaaagaaaaccacaatcatttgaattaagccaaggatgttctaggctaaggtcaggctaagaactgaacagaggcttcctttctgccatgcctgtgggatgatattcttattgttccattttttaggaagaaccttttgtttatgtgaacctgatcatatgaatctaagaatatgtaactcttacaaataaaaaacagctagtaattatattgcattcttagaaattttatctcaacatgttttcagaatgaaaccatactagaaatgttttaatacctctctttattatttttcgagtgccaatgtcaatgtttggaaagtttctttcattttgttgcttgtactaacccagctatagccagaagcttgactggaaagtaaatgtttaggagatttgttttataaactgcattaaagcactgccatttatcaccacagatcttttattttccctaaatgtggccttgtttgaagcctcatctataaaagttcattgttggggataaactcaggataaaggtgtctttactctgcctcttatcaaactacagtttatcatagatccaccctgaaattatgtggtgaagatactgtgtacattttgtttttaaagataagaaaaaataaacatgactgcgaggatgtttggagtcctgatttttttaaaagcatttattgcttatggcacatgaagctgtgccgtcttattttgctttgttttgtatgttttttgtctttcatgagactatacacagcctgaaaaattccatgattgggaaacagaaggttgtcttgtctttggggatcatttttaggtgtttgaagttggtgataaacccaaggatctgtgctctgcctggggaatcttgagatggtgtctggtggggtttgagataaatgaaatctgaaacaataaaagtcaattcagaaaacccagttgagttgacagattcttttcttccttggattggccagttattcaatggaatcaagctgatcactgaggctatgttagatctctggctttcccaggattctcagttttgatacatgaaaatctacctatccctagacagaatgtcaaaaagagaggatgtgcatccgtggcatctggcttgttttttagcacctggtttctagctcccgctacagactgtcttctgcttcatggggcaagatgcatggagctgctagtttgatttgaatcgtgtgtacccagccatgtgccatgcaactgagagcattgctgccaagaccgaccttcctggtgcccattctcagacacagagcccaaagtgtctctaacaggacactgtgttcctctcaccactgttcgcctttgcagagagaatgagtttcctgttgctgctgtaataaattaccacagacttaaaggcttaaaacaatatatatttatgcttttacagtctggaagtcagaagaaccaaaatcagtttcaccaggttaggtcaagatgttggcagggctgtgttccttctggaagctttagaggagaatccatttccttgcttttttcagctttcaggggcttcctgcattccttggctggtgaccccatccttgcatcactccaacctattgattccatcatcacgtctccacctgctcagtctgtgctcctgcttcccatttataaggattttttttttttttttgagacagagttttgctcttgttgcccaggctggagtgcaatgggcacgatcttggctcaccgcagcctctgcctcctgggttcaagtgattctcttgcctcagcctcctgagtagctgggattacaggcatgtgccaccatgcctggctaattttgtatttttagtagagacggggtttccccatgttggtcaggctggtctcgaactcctgacctcaggtgatctgcccaccttggcctcccaaagtgctgggattacaggtgtgagcctacgtgcccggcccatttataaggatctttgtgattacatcactctcacctgagcaatctctccatctccaaatccttaatttaatcaaatctgcaaaatatcttttgccatataaaatgacattcacaggttctggggattaggatggaaacatctttgggaagccattatctagccaaccatacagcatcacaagatgttctagtcctaacagacccagcccaattcccttttaagcttcattataaaagcccaatattgggaggagccaagatggccgaataggaacagctccggtctacagctcccagcgtgagcgacgcagaagacgggtgatttctgcatttccatctgaggtaccgggttcatctcactagggagtgccagacagtgggcgcaggwcagtgggtgtgtgcaccgtgygcgagccgaagcagggcgaggcattgcctcactcgggaagcacaaggggtcagggagttccctttccgagtcaaagaaaggggtgacggacggcacctggaaaatcgggtcactcccacccgaatactgtgcttttccgacgggcttaaaaaacggcgcaccacgagattatatcctgcacctggctcggagggtgctacgcccacggagtctcgctgattgctagcacagcagtctgagatcaaactgcaaggcggcagcgaggctgggggaggggcgcccgccattgcccaggcttgcttaggtaaacaaagcagccgggaagctcgaactgggtggagcccaccacagctcaaggaggcctgcctgcctctgtaggctccacctctgggggcagggcacagacaaacaaaaaggcagcagtaacctctgcagacttaaatgtccctgtctgacagctttgaagagagcagtggttctcccagcacgcagctggagatctgagaacgggcagactgcctcctcgagtgggtccctgacccctgacccccgagcagcctaactgggaggcacccccccagcaggggcacactgacacctcacasggcwgggtactccaacagacctgcagctgagggtcctgtctgttaaaggaaaactaacaaacagaaaggacatccacaccaaaaaaccatctgtatatcaccatcatcaaagaccaaaagtagataaaaccacaaagatggggaaaaaacagaacagaaaaactggaaactctaaaaagcagagcgcctctcctcctccaaaggaacgcagttcctcaccagcaacrgaacaaagctggatggagaacgactttgacgagctgagagaagaaggcttcagacgatcaaattactctgagctacaggaggacattcaaaccaaaggcaaagaagttgaaaactttgaaaaaattttagaagaatgtataactagaataaccaatacagagaagtgcttaaaggagctgatggagctgaaaaccaaggctcgagaactatgtgaagaatgcagaagcctcaggagccgatgcgatcaactggaagaaagggtatcagcgatggaagrtgaagtgaatgaaatgaagtgagaagagaagtttagagaaaaaagaataaaaagaaatgagcaaagcctccaagaaatatgggactatgtgaaaagaccaaatctacgtctgattggtgtacctgaaagtgacagggagaatggaaccaagttggaaaacactctgcaggatattgtccaggagaacttccccaatctagcaaggcaggccaacgttcagattcaggaaatacagagaacaccacaaagatactcctcgagaagagcaactccaagacacataattgtcagattcaccaaagttgaaatgaaggaaaaaatgttaagggcagccagagagaaaggtcgggttaccctcaaagggaagcccatcagactaacagcggatctctcggcagaaaccctacaagccagaagagagtgggggccaatattcaacattcttaaagaaaagaattttcaacccagaatttcattttctttttttttttaacattgataaaatactattatctaaaccacaatccctatatacagagttcatccattgtctcaacgatgccctttgtaagtaattattattctggttcaggatctatcatcactcagtacatttagttgtcctctttagatttatttaatctcaagtattttttttttttttttttaattgatcattcttgggtgtttctcgcagagggggatttggcagggtcataggacaatagtggagggaaggtcagcagataaacaagtgaacaaaggtctctggttttcctaggcagaggaccctgaggccttccgcagtgtttgtgtccctgggtacttgagattagggagtggtgatgactcttaacgagcatgctgccttcaagcatctgtttaacaaagcacatcttgcaccgcccttaatccatttaaccctgagtggacacagcactttcagagagcgcagggttgggggtaaggtcacagatcaacaggatcccaaggcagaagaatttttcttagtacagaagaaaatgaaaagtctcccatgtctacttctttctacacagacacggcaaccatccgatttctcaatcttttccccacctttcccccctttctattccataaaaccgccactgtcatcatggcccgttctcaatgagccgctgggcacacctcccagacagggtggtggctgggcagaggggctcctcacttcccagtaggggcggccgggcagaggcgcccctcacctcccggatggggcggctggccgggcggggggctgacccccccacctccctcctggatggggcggctggctgggcggggggctgaccccccacctccctcccagacagggcggctggccaggcggggggctgacccccccacctccctcccggacggggcggctggccaggtagaggggctcctcacttcccagtaggggcggccgggcagaggtgcccctcacctcccggacgaggcggctggccgggcagggggctgaccccccacctccctcccggatggggcggctggcctggcgggggctgacccccacctccctcccggacggggtggctgctgggcggagacgctcctcacttcccagatggggtggctgctgggcggaggggctcctcacttctcagatggggcggttgccaggcagagggtctcctcacttctcagacggggcggctgggcagagacactcctcacctcccagacggggtcccggccgggcagaggcgctcctcacatcccagacggggcggtggggcagaggcgctccccacatctcagacgatgggcggccgggcagagacactcctcacttcctagatgggatggcggccaggaagatgcgctcctcacttcctagatgggatggcggccgggcagagacgctcctcattttccagactgggcagccaggcagaggggctcctcacatcccagacgatgggcggccaggcagagacgctcctcacttcccagacggggtggcggccgggcaaaggctgcaatctcagcactttgggaggccaaagcaggcggctgggaggtggaggttgtagcgagccgagatcacaccactgcactccagcctgggtgccattgagcactgagtgaacgagactccgtctgcaatcccggcacctcgggaagctgaggctggcggatcactcgcggttaggagctggagaccagcccggccaacacagcgaaaccccgtctccaccaaaaaaatacaaaaaccagtcaggcgtggtggcgcgcacctgcaatcgcaggcactcggcaggctgaggcaggagaatcaggcagggaggttgcagtgagccaagatggcagcagtacagtccagcttcggctcggcatcagagggagaccgtggaaagagagggagagggagaccgtggggagagggagagggagagggagagggagagggagagggtcaacccagaatctcatttccagccaaactaagcttcataagtgaaggagaaacaaaatcctttacagacaagttaatgctgacagattttgtcaccactaggcctgccttgcaagagctcctgaaggaaacattaaacatggaaagcaacaactggtaccagccactgcaaaaacatgtcaaattgtaaagaccattgacgatatgaagaaaccgcatcaattaacaggtgaaataaccagttagcatcataaagacaggatcaaattcacacataacaatattaaccttaaatgtaaatggactaaatgccccaattaaaagacacagactggcaaattggataaagagtcaagactcatcagtgtgctgtattcagagacccatctcacattcaaagacacacataggctcaaaataaagggatggaggaagatctaccaagcaaatggaaagcaaaaaaaaaaaaagcaggggttgcaattctagtctctgataaaacagacttcaaaccaacaaagatcaaaagagacaaagaaggccattacataatggtaaagggatcaattcaacaagagctaactatcctaaatatatatgaacccaatacaggagcacccagattcataaagcaagttcttagagacctacaaagagacttagagtctcatacaataataatgggagactttaacaccccactgtcaacattagatcaacaagacagaaaattaacaaggatatccgggacttgaactcagctctggaccaagcggacctaatagacatctgcagaactctccaccccaaatcaacagaatagacattcttctcagcaccacattgcacttattctaaaattcaccacataattggaagtaaaarctcctcagcaaatgtaaaagaatagaaatcacaacaaactgtctctcagaccatagtgcaatcaaattagaactcaggattaagaaactcactcaaaactgcacaactacatggaaactgaacaacctgctcctgagtaattactgggtaaataacaaaatgaaagcagaaataaagatgttctttgaaaccagtgagaacaaagacacaacgtaccagaatatctgggacacatttaaagcagtttgtagagaggaatttatagcactagatgcccacaagagaaagcaggaaagatctaaaattgacaccctaacatcacaattaaaagaactagagaagcaagagcaaacaaattcaaaagctagcacagaaaagaaataactaagatcagagcagaactgaaggagatagagacacaaaaagcccttcaaaaaatcaatgaatccaggagctggttttttgaaatgatcaacaaaatagatagactgctagcaagactaataaagaagaaaagagagaagaatcaaataagtggcataaaaaatgataaaggggatatcaccacagatcccacagaaatacaaactactgtcagagaatactataaacacctctacgcaaataaactagaaaatttagaagaaatggataaattcctggacacacaacaccctcccaagaataaaccaggaagaagttaaatctctgagtagaccaataacaggttctgaaattgagacaataattaatagcctaccaaccaaaaaaagtccaggaccagacggattcacagccgaattctaccagaggtacaaagaggagctggtgtcattccctctgaaactattccaaccaatagaaaaagaggaaatcctccctaactcattttatgaggccagcatcatcctgataccaaagcctggcagagacacaacaacaaaaaagagaattttaggtcaataaccctgatgaacatcgatgtgaaaatcctcaataaaatactggcaaactgaatccagcagcacatcaaaaagcttatccaccacgatcaagttggcttcatccctgggacgcaaggctggttcaacataygcaaatcaataaacgtaatccagcatataaacagaaccaacgacaaaaaccacataattatctcaatagatgcagaaaaggccttgaacaaaagtcaacagcctttcatgctaaaaactctcaatgaactaggtattgatggaacgtatttcaaaataataagagctatttatggcaaacccatagccaatagtatactgaatgggcaaaaactggaagcattccctttgaaaactggcacaaacaaggatgccctctctcaccactcctattcaacatagtattggaagttctggccagggcaatcaggcaagagaaagaaataaagggtattcagttaaattgtctctgactgtctacattcagtcaaattgtctctgtttgcagatgacattactgtatatttagaaaaccccattgtctcagcccaaagtctccttaagtggataagcaacttcagcaaagtctccggatacaaaatcagtgtgcaaaaatcacaagcattcctatacaacaacagacagagagccaaatcatgagtgaactcccattcacagttactataaagagaataaaatacctaggaatccaacttacaagggatgtgaaggacctcttcaaggagaactacaaaccactgctcatcaaaataaaagaggacacaaacaaatggaagaaaattctatactcatggatgggaagaatcaatatcgtgaaaatggccatactgcccaaggtaatttatagattcaatgctatccccgtcaagctaccactgactttcttcacataattggaagaaactacattaaatttcatatggaaccaaaraagagcccgcatagccaagacaatcctaagcaaaaagaacaaagctggaggcatcacgctacctgacttcaaactatactacaagtctacagtaaccaaaacagcatggtactggtacaaaacagagatatagacaaatggaatagaacaggggcctcagagataacaccacacatctacagccacctgatctttgacaagcctgacaaaaacaagcgatggggaaaggattccctatttaataaatggtgctgggaaaactggctagccatatgtagaaagctgaaactggatcccttccttacacataatacaaaattaactcaagatggattaaagacttaaatgtaagacctaaaaccataaaaaccctagaagaaaacttaggcaataccattcaggacataggcatgggcaaggacttcatgactaaaacaccaaaagcaatggcaatgaaagccaaaattgacaaatgggatctaattaaactaaagagcttctgcacagcaaaagaaactatcatcagagtgaacagrcaacctacagattgggagaaaatttttgcaatctatccatctgacaactggctaatatccagaatctacaaagaacttaaatttacaagaaaaaacaaccccattaaaaagcgggcaaaggatattaacagatgcttctcaaaagaagacatttatggagccaacagacatatgaaaaaatgctcatcatcactggtcattagagaaatgcaaatcaaaaccataatgagataccatctcacgccagttagaatggttatcactaaaaagtcacaaacaacagatgctggagaggatgtggagaaataggaatgctcttacactgttggtgggagtgtaaattagttcacccattgtggaagacagtgtggcgattcctgaaggatctagaactagaaataccattagatccagcaatcccattactgggtatatacccaaaggattttaaatcatgctactatagagacacatgcacacatatgtttgttgtggcactattcacaacagcaaagacttgtaaccaacccaaatgtccatcaataatagactggataaagaaaatatggcacatatacaccatggaataccatgcagtcataaaaaatgatgagttcatgtcctttgcagggacaaagatgaagctggaaaccatcattcttagcaaaatatcacaaggacagaaaaccaaacactgcatgttctcactcataagtgggagttgaacaatgagaacacatggacacagggaggggaacatcacacaccagggcccattgcggggtgggaagcttggggagggatagcgttatgagaaattcctaacgtaaatgatgagctgatgggtgcggcaaaccaccatgacacatgtatacctatgtaacaaacctacacattgtgcacatgtaccctagaacttaaagtacaaaaaaaaaaaaaaaagtcaagagccatgggccatggagagagactcaggccgagggaataccatgcaaggcatctgtgctagagggagtatggctcatgcgaggcagctccaagatggccctgactgatctgtagtgcattactgagcacccgtatttgccaagcactcttctaggccctgaaggcagaataggaccagatcccttccttcagagattttaaatttgggggcagaggtgtataggcaataagtagtcatctatgacatgcatatatatttacgtagaataaagggccgggggtgaaatgctgtgaagtctggtggagaaaggcacagagtgtagagaggcggaaggtggggagttcagtcagtggaggcctctcagaggtggtgacactttaatggaatgaaatgggggattaatggagaccagaaggagaactgcccaggcaaaggaccaggaggagaccaggaggagaactgcccaggcaaaggaaggctccatgtgaaacggcatcaagggatcttgaggagaaggaaggaaggtgcccaggagtgctcgagggttctgagcaagggaataacacaatctgatcacgtttttaaaagatgattctggctgttgggtgaggttttgactggggatgggggtggggtggggacagctgttgagcagctctgtagggtcctgagggagtagcttgatcagggtggggatagggaagtaaccaaagatgattggatttaggatcaactctgaaggagaaccttccagtatttaggtttgctgtgaattcgatatggagacatgggatcgtgatagaggttccctttattgagttgaatgagggatgggctgatgggcaggggtatttggtggcgagggaaatcaagagatctattttaggtatgtttacttagagctttccgtagacctccaagtagagatgtcaaatgggaaattaggtatctttgtgtagagctcaggggaatggcttggtctagggtgtaatcccggggccatcctcgcagaggtggaatttgaagccacagggaggtgaggtcacctaggtgctgagtggagatgtaagagggaggaagctgacacctgaggcctggagtaccccagcatgcagaagctaagcagaggaggagcaagcaaggttcgagaaagagtgggccaatgagcaggaagtgctccaagggtgcggactgagcccagagggcgagaggggaagcggcatgggagaccggcagggttggtggagcaggcttcacagccaggtgagaaaaacagtctcaattttkattcaaaatcggactgtccacagctgaaagctcactaacctgtctcatgagacccagctctgcactccttctgactgtttctaaaactcaagccctgctgagagacagttgcctgtagcagaagcccacgggcagctgaagtgtcattcatgacttaggtgctcctttcactgagtggtctctggcctgcactgggtgggagtgcggatggactctggatcccgagtaccccctcatgcaaagaaaaaactacccagcctcaccctgtctcacacggtctcatccaagctgcaggcctgaggccctggctgtgtaaaagtgggcagatgatttaggccctctacgccttatttttctcaaatgggaattgggcacgataataacatttcctaacatatagtgtcatggtgaaggttaaatgaatttacacctgttaaagtgcctggtagatagtaactgttaactattgtcataatgaaagaatgttgatttgctatcacttaggatattcaaaaattgtgccacacactctgaaagtagctgtaaaagagaaattctcaaaatgtttcaattggaggaagtacagtctcctgagaaagctgttttgaagaagacagcactgcaccgacttgtggttaagattgggctctgtaggcaggaggtctggcttgaatcttggttcctccacccaccggctggatggccttgaatgtgctactcgcctgctcccagccccagcttcctaactgtaaaatgaacaaagctcgagtgcctacttcatgggaccctcatgagcacctgatagcataatgcacataaagcccttggcctggtgtctggcagagtaagcacaataaatattcagttcatattattattattattagggctctcaaaatacataaatctgcaagttacattcagttggttacaatgtaacaatccttttttgtcatgcctccttatatatagtccccagatcacctggtttatttgcaacttttcctttatcaaatggaagtatagattaggttagatttgaagattgttgactttggtcttgaggagcccttacctsgagtgccagtgttgcgagacctcacctccattcttgcctgggttctgtacataatgtacaaagtcagatgtatattctctttgcagttctgggaccactgcacctggagaaggttgtagcctcattttacactgaggggcactatcacttgggaaagacagaggactttttcatgattactccagacctcaagtaccagttgcagggtgaagactcagacttgagcccagtcctctgagccatgatcctgcacctggtcaggatttgtgagtcttcagagccacacacctcctgcctcccttcctgcgggaatgacttacacagcgtcctgttggcatgtggggctttggccacacggtggcgctttacgctcagcaatcccgctggtcctcttaatgcatcgctgaagatttgaaaatcaaactgaaaaggaaagagccctgccctctagttcttagaatacacagatatcattgtcaacgagtatggggccgttagcaattgaggaggtgagctgggttcactagctggttaccaccctgtaggaaatgcctcagttcttgctggtttcatccatcctaaggggaaatcaaaggacctcttgtctgaaatcaaaggattcagaattccacattcagagcccattttcaggtgtttttcacaacattgtactcaaccacatgtgtgaatcaaacctcactttccagtgtggctgatgaaataaaatgggctcacataagccagagttttgacattcctggaaaaagagattttttttctgaagatattgtctgactccaagacaggcctaaacctcttccagaaaaaagagaggggttaacagcagctagttttattcttctcttgaaggtgatataggacataggcctggttgtgaataccagctctgacactaactagttttggagcctcaaggaagctacttcatgtctcttcacctcaatgctcccatcagtcaagggtgtttatgataataggacctacactataggattgtggtaaggctgaattaatattaagtagaacsaaatgcaagtggttcagttcgttcaattctaaagtctttgacctgtaaaaaatggcaatttcatgtggctcattctaaaacatggaaagtgctttgtgccaggcatattgtgaggcttggtgaaagtgagtgattattattacagctggcatgaaaagagtacaagcacttactatgaacatttaggaaaacaaaccgccctgtcttctggttatttttttcctgaagattcttactgatagctgactcagttgttgctgcatactaaagtttctaatacgcaaatatgccaaaagagatctggctgtttatcatagctccacctttagccaggttatcccagcctcaagacatctttcaatgagatattaatcctaccaagggagaaaactcaaggccatcccagtaccacctgccacacgagtaaagctgaactctttcattctgtgcctctgcggtccctaggtgatggagacctccctctgcagagcctgcctctcagagagcactctatgccttggactgatgtggaaattgatcctctcagtccctctgaagcacacacatcaaagttgaactgttctatgtccttttccttcttaggtgaatactagctaatctgttyagccaaaggaatatatttttattctgtcagaagtttcccaagttgtagctaaaaggaatgagaatttcagagacctggcaggcctgggggggtggggggtgggggcgtattttttaacagacaggcctctgggagcccagcttcagccacaccctgtcttgtgtccggggacaccttcctctgctgatgtaggccttgggaagaaagccagcagcggctcagaagccaggcagtctgaggtagactgggggcaacaaatcaaccacaggaaaggcttcctaccaggaatgaggcagctgcgttcccagaaatgcacaaacaaaccaccaaaaaccagatcagggtyctatcttcctctcagacactcttaccttgcattctccctctagtttctttccttaaatgatagaggtttactccagcgacctcccaatggtatcccgccctccctgcaagtccatgaaaaataaaagatttgtgtttctcatcgcacatcatacatagaccacgggagatgagatgtggcttattggatctcatcacttatcacaggacacgcatcaagcgagactgtgtttacatacatgttactaatttggggaatggtgtttgaactcttcaatgcaccaaaagtgagttaacaagttaagccaggcacaacagagaacagactgtattcacgtgaagttcaagagcaagcaaaactagtctgtggcgataatatgatagtaatcggaatrggggcagctgrgggtggtaggactgattgagaaggggtaccggggaaatttccatgaccacagagatgttcyatatctttattagggtgtgagctacacaatagtgtacatttgtcaaagatcatgaaactgcgcacttaatatagaaaaaggtaacagcgaaaaatatccctcaaaacaacagtcacagtatcggcagggaggtccattatgtcatggaggagagaaggggaatttccatatagtgaaatttcctccctggctgtctatgcarttgaaaaacatataaaacgtcagccaattttccagacagtttcaaaatctagggactttttttttttttttggtacaagcactgtctatgtcttttcaaatgtttacagagtatttacaaaaagtagtccgttgggtggcagttgtaattagggaaactggcagtgaaaattaacacataccataaaagagggataattactccactgtcatatacaatattattatcaaatggtattcacccaggaatccaattggttcattcccactcagcctcgttgttacaggaaagaccctcccttccttgttaccctggttatgaagctgccacgttccacgggtgatatgccatatggtacttaacatcagaatcaaaatgagcttgtgctttttgtgtgagatgttgaaatttatcagaaaatcagaaagcctaatttccaccaagttcctgagaactgccatctgccgcatgaaaaagaaaatggagattttttttttttaaaccatttacttattgtgaaatgtgagggtgctggtgtatgtgtttgaaaaagcgggttgggggcggggagggggtttgtgagagagcgccagagcaagcccgcttggcagggcagaaagaaagagtgtcagctgaatggaggcaagggtttgcgaagcgtaattatggaaatcatctattcctgagcctttttttttttctcctcctgaccacatgttccttccacagaggagcagcacatagagtccagcttttgagaataagtaaagtccccatttcagaaagaagagggggctgaaaccagtctctccaggtgtcaagtccttctatggaggagctggcgtgagttaagcagggagagtaaaagcaaaggagccagaaaggctgagtggaaggaggaccaggaagtctttctaaggagagtgacagaaagaagggcaggcaggataggagagggaggccaacagcggagagtgaaggagtgcctactgagaagggaagaatctttcagcaaacttcggatgccaagggaaagatgctgaagtcttccaggagggcgtgcgatgcctggaygttcgtttcagtggacggccccagtctgtggcgttgtggtcctcgacagactgtcttaaccatgagtcacatccctctagtgccccacacctccacactgcctggagggcttaccccagcctttgattttactaaatgtatttatttgttctctgtttttacaccaaagctagcatgtgtgttggaacagctacaggcgacatttgttggacctggttagtggctggatttctcacctctgaccacaagtaatactcaggaaatagacctctggcaaacagcccaccagagcctgaaacggaacagtgatggggatggaggataaggctcaaggcaccaggggacttcccattatgacactgtagggccaagtgttggtcaaggcaggccgttcttggatggcatccaacgtggtttaattaaagatacactaaaaagatcactcaatagacagcctcatctacaaggcagtcttcctacaggagcttaggggtgtatgcttttctgtgcttgcagaaaggcgttctgtgccgttggcacctcrgggagaagcttcaggtttcaggctgaactcctgagagcttagcatctggggtgtgcacgacttggggtgccaggcagcaggtcccacttgctcaccagagggggcggccttatgctttaccccgcaggtgactgaggacccaacagtgtgctccttgctyggaggcyagtgatgagctcctaatttcactgtggactgcccagatttctacaagacaggcttctggagacgctgtggattctctcctgagtgactaggggctggcaggaagggcgggcgcttggtgctgcatctcaatccctgtggccccaggagcagctgcggcaggaacatggtgagcagctctcagcacccttggccctgactttccttccgcttctgtttgttgagcacctattgttcaaaatgcctgttatctaagaggctacagtttcctgagcgcttactatgtgccaagtacctcacacgtattacctcatttaatgcttactaaaaccctatgaggaagggaccattctcacccccattttccaaatgagacaactgagggtgagtaagatctggcttgagtcaaacagcaaataagacttggggtcagcaatgagccctcatggtctaacatcagaaccgttactctataaccccaacaaccatcctccaacacagcaaacggtattatgtccactttagctcatgagcagactgggctcagagaggttaggcaatttacccaaagctgcacagctacaagtcacagaaacagaaacccttctggctccagagcccaaaccctttctcctaagctgtactccctctctgggcttactgagactgcattttattttgaagccacattccccagccaatgcctggcaggcacggtgagtaggactggatatggaatgtgaaaacatctttacaggagaaagatttggctaaaccttaacattttcagacattttaattgcttctttggaacgcagatgtttttgggggtgctgcagccatggcccaagtagcctctgaaagatttgggtgtcaccagcaaatgagagtccctgcctgcttgctgatctcactggttgagcagcactagttccagatggttagagaactttggtgctggcttgccattcttacttatttcagtgaggccctcaaatgtgtagggagtgtgtcctaccaagtatccccctccacctgggtgtgggcagcaaacaccaaggtccccgcatatgctcgacacatcgtgtgggatacattgcctcttttgctctctccaggggcagagaaagtcacctgatttcagtggacaggaaagggacatgtttataatcagtagagggtgagggggccactctctgatctataagctcaaggtctctaaatgattaactctggtaccagcttggggaactgctgaacaccaaagacaaatgctggaccacatgactcaatggccctaaattcatcaaacagaggcacactatcggggtggtcatgacctagaagtaggtgatgtgkttatcaactagcagcagacttcaaattccccactgcctcagtttcccttgttacacactagaagtttgtctctagtgctcgggcagtgggcatgatgttttatttgattgggcatacttttgcaaagattgctaagttgaacaattgctatctttgtttacattggattgatgttgaataacgggttatttaaagattttcatgagacttgaggcttcatttcagtacttccttgctcgataagtgtttgttaaatacctcctgtgtagcagacagtgtcttggcactttagtcaaaatatagataaatgacacttacttcctgaccctgaggagcttgcaatttaacaaaggacaggaaaaaaatatatatatacatacacacatatgcatttatatgtgtacatggccacatataaacatacataatatatataagtatatacaaatacatgcacacccatacatacatgcctgtgtgtatatatatatgtgtgtgttgacagatacaaaacccgagcgtgtgcatgtgatagttaacacaccatctctgtggtgttgaggacacagaggcatccagcagtgagcctgacagggaatgatggctgggtctggcagagggagaggaaatggttctgcagaccaggcagtatcccagtagcctcagagcctggccttgccctgggctgactgggtgagaaaggaggaaactctatccattgaagaartgacatctctgtttggggaagggcggtaggcattttggatgagcctaaggcagcaggagtaggtgataaaatgaaacaaattaagacagttctagagagtgctctgaatgccaggctagggtgcgggcacatattggggagcgtagaggcgggacaagatggagtaaggagtaaggatgacattggtggtggggaactggaaatatagcccagtaggacaaatatttccatttctggaaaataactaccagagtttagacactcrccttcctgttggcactgggctctttcactttaagaaattcctatatatatgaaaatccaaacttataaaataaatctggagcctgatatttgtgtgacaaaagaattcttcccttcaggaagaaatattttgaaagctgagctcacacagtgctttcaaacataactcaatcaccctgcttgtgttaggagccccgagttgcggaaggcaggtggcctgcctggggcacactatccctcactaagcagaagtgttcatgggtcctccttttttttttytctgatggaggaagaagaaagagcacagattaatgagcaaacccagaasacagttctttctgttaacctggtgctgtctttcttattggagtttcctcctctgttttcctgcactcgttatattctccacacacacacccaggtatagattcatttttataaagaaaaaaaaaatcatcctgtcactgcctttttggaatcgacatgaagtgtgtgcccttcctttctgccaggtctaaacacctccatgccactggtgtgtttttgaattctttgttctaacaaaccagttccttatttcggagaggattataattgacagtaaatactttctttaactttctctaattacaatttgatttcaaatgtagttcatatgttttctatatagaaataacccaagcggtggggtgccaggtttttcctaagttgggaatgagcagagctattaaattaaatcacgagaaacaaggaaaaggtataattagtttctccaagaggatgccattgcacatttcctaaaagacatgaagatgtgtatgactggggatttcatgcctcataatatatatttttcttctggttttgtattctagtatggatttatcaacacctgtctgcaatctcttgtgatagagaaatttggtgaagaaacatgggaaaaattgaagtaagtatgtgaaagggaagatgaagtatctctggagcaactggtaagcctccagtgttttaaaggttacagctttttactgaccttttgattaagccagttagttgaatgaacccatcataaaagatacagctggttctcaaagagattcatttactagggagaccaattcccgtaccgtaaacatatgaattagatacaggaaacacctggtacaccttatctgtcttcgatgaaggtatcagtcttgattaccaaaatcagccttaaatgggatctcactgtaaataataccaacattattttaacttttatctcatgaatgaattctcattttctctttctaatcacagaagagagagcaactgcattatttccattgcacatcaagggagctgccaaacagaagaggggagataccttttaagtttgaccagaatcacttcttaggtgttctttggttaattcttagtttttctcctctgcctctgtccagtaaccccttaatgtcatcatttatatctccatatagtctcctgtctgactcttgcaatcttgtgctatctgtctgcttccctagaggctcccagacctaaagtgttagaagctggggatgaaagtgcctcagaaatcacttgatcctaggaagggagaggaaaacaaaaatatggaaaaatgattggcttcctcagttcatcaatgccatgcaaattaaaacaattaggcactgctttgcctattaaatctccaaaaaatttaaatgataataaccagttctggttaagatgcagcaaaatgggtaatcgctgatggcatagtaaatcagtgcagcccctttggaaagcaatctgacaacatgtaccaaaagctgtgcaaatgatcaaatcctttgaagcagtaagtccattcccgagaatctattctcttagaaatgcacacctttgtgcacacatatatgcatatatatgcaaaaagatataatgtagctttatattgataaataataaaataaaaattgtctttagtagttaaaaacaaaccaacaaacacatagaatgacaaaagaaatatgcatcatgatatagtgattgcaaagatcatgaagcaacttgcaaatttttatgacaatactgttaaaaaaaataagaaaaaaaccaaaaaagacacaagttacatatctactaggtaaattacacaaatgaaaaagggttaagagaaagaccaaaataataactaatagtgactgaattagataaaatgctggatgattttttttcctaacatctatttcccaaatttgctatgtttttattgcttttgtaatgtaaaaacaacttaaaatgcttaatgcaaactttccctcctcttcctcctacccccattttaaaaataaaataaatcgagctgagagcacagtgacttgccacaggtaggtcctgcccagacccatggccctgcacaggcctggtcactgcagcccactgctcacacacaggacaccatcaaccatcttattctcgggaaggcagcccaggggtaaatcagcatctctggggtaaattgcttacagctccacaagtttagatgggaaaaaggagctctggcctcatagaggcgaagaatattcatttccaaatattttaagtaggagcactgagtaactatgatcagggaaaccttggactcgtggacccttgagagattatttagcccagatcttcacagttgacaggtgaggaaactgaggcctagaaaggttaagtgacttggccaagactgcacagcaagggagcaacagggccaggatgcgctgtcagaaccttaaagtgctccttttcagccccctatgcggccgtgggaagagaagcatctgaagactttttcatttttttattttttgtaacagccattgcgttgtaaaggctaaactcagtaagaatagaggacaggaaagagcagtcttcttattttaagcacttactttcggccatgcctcttatataatggtcttttgaaagcccaacaagaacactgcaaggcaaggtattgccctgcttcaccaaagaggaaacagtcccggagaggatgatgctgaagactgcacagtgcataagggggctggggtggggacacaaatccaggtcggtaactgcaaagactcctttctattaggccattctacctggggaaaggaagagcaactggcaacgggaattcattttcttttttttttttcttttttggtgagacggagtctcactctgtcacccaggctggagtgcagtagcgtgatctcggctcactgcaacctccgcctcccaggttcaaatgattgttctgcctcagcctccccagcagctgggactataggcacccgccaccacgtgggaattcattttcaggggctctgggtgaaataagagaggtgtgtctttaaacatgtgtttactgagctcccatagtaggcctggtactaygaaaaacactggaggattgaagaagcaaataagccttttggcctggatggctttagaatctgtggaaacattacaggtatgcctggaacacaggaactagggtgctgaagggccatgtcagatgggaaactgggatcgtttcctctgctacaaacttgacaggggcaggtcagctccagccatgcacacctgggccttccagaggatcagctgctcctatgcagagggcaaggcgtcttaggaggaggaaggagagatggcaggctcagccaagctgttgggtggacactgcatggtggggtggggaaccaacttgggaaataggatactcatattctcagaaacacggcattgttgcaagtccttaggaagcagtcgttggattcagcgggggctctggggctacaatgctgaactcaaagcccagaagcaaggcctacagtctgtatgaccctggcatggcacttaaccactctgcgactcaggtatttcatctgaaaagaaaaataataaaagcagctaacctcatggggttattgcaagtgttaactgagattgatgatacaaaccaggcacttagaaaaaatgagtggcccaggatgagcactcaacaaatgcaagctgctgttgcataatggctgcttcagtgcttggtattggcttattttcaagatgctcgtcctcacgtgggttgggggagaggtggggggcagtggcgtgcgtcccactggactggatttgcatctgggctctrctgctcagagctgtgtgatcttgagcgggttgcttcacctctctgaagctctgtttcctcattgataaagggggaataatgtacctatcttctagggttaaggagagaattgagtggtgcaatctacacagaagtgcctagtagaaactcagtaarcatccttcctcctctctgagatataggtgctacattaagattacattatacttgacattattagaaccactttgctgctggtcagataatgatgctttccatcttgaagaagcagatattcctcaaaggctttctctttgcccagaggagaccttgcctcctaaagttagtgtgatttgctgaatggctttatctccactcctcatttcagtctgatctccctgacgcctagtgtgggccactgtctagccctgccttgaggaaccctcataaatgctagggaccaggccgtgaaggggagagatggatttttgttgattgatttttgacttacgaattttctaccatgtgatttcctggttaggacatttagcctcagctcagctgctgcttagaagaacctgtcctgcctaggagaaaggccagggctctggaaatcattgaaaatagccagaaatagccagagcacttagacatgagcagaggtaaaatgacatgttcagctctgcctacgacaggcagctgagatgtgttgtttaaggagggactctcaccctccgggtatgactgaacacagatagcatggccagctgctggaaccttcattggttgagatattcagcatatctttccaaatcaagggggaaaaaatctccagctttccatgtgtaagtggatggaagagactttttcctttttggatccttggtgcgacctctctgaaaggctggaatgtcatctctttcttcctttagaagagcagttctcatagcattcccaaacaaacaggaatccacatgacctccagggggataaaggacatttgaatgagggtacaagaatgcaagggaaccagagaaatatgtctgggaatagagaacccagcagggtacatcctgcgcttgtgtcattaggttttatctctttcatcttgaagyttcaattatctgcttaactgggtctcaggatgtttgtatacagagcactagacatctatacgattgcattggaaatgcatctttaagccaaaaataaagccaatctaagaagtccaccagctatgaaaattgcatcatattagaatttactaaaaagaaaaaagaaaaaaaaactagtgcagaaaactcagcttttaaaggagaaattaaggtgagattattggctgtgcaaaaggatttgcttaggccacatttaaataacaaattccctaatgcttttagagtagaatttcagctgagaaagaaaaaacccatcaattcctacagaaattttaagaagaaatgattaggtaaaatgaagcatgtttccagaccttatgacataaattttatcttaacatgaaataggaaacagatgtttctcctcctttgcttgcagtattttcctctcttatagtctagatttgtagatttctaattataaatcactcttttttttttttttttttttttaagagacagggtctcactctgtcactcaggctggagtacagtggtacgatcatagctcactgcagtctcaaacccttgagcttaagtgatccttccacctcagccaccagagtagctgggactacaggaatgcaccaccatgtccagctaatttaaaaaaaaaatttttttttttagagacaaaatctctctatgttgcccagtctgtttgtgaactcctggcctcaagagatcctcctgcctcagcctcccaaagtgctgggattacaggtgtgaaccaccgtgcctggcctaaattgcttgtttataatcttttggttaaaacctttattgaaatttaacaatgagaaggaactaatggattaggaagagtaaggcctttggaatcagataaacctttacattttgcctggatcacttacttgctgtttgacttgggcaaatgtatttattcaacaagtatttagcttctagaatgtgctgaacaaagtttcaggcactgggaatagaggcaaarggaataggcaagtgctgtgttccctgggaatgtattccaatggggaggacagtaaacaggcaaataaacaaataaatctcaggttgtgcaaagagctaaatttagagtatttagtggtgactgggcagagaagatgccagttgccctgagctggttagagaaaacctcttggcaaaggtaatgtttgaactgaaaggaaggaaggagtcagcctcaagacagagaagttatatgtgttccagagaaaatggcaagtgcaaaggtcctgaggtcagactgaactcagtgaagaaaaaaatctaacatgcttggaatatcatatgtgaggagtctgataggagatgaaggtggagagggttttagggatcaggacatataaatgtgtagaagatgagaaggagctgaacttttcttctaatgacaatgggttactgaagtttctgagctttggtgtggtcacttgtgaatggagataatcatggtgctcacctcatccacttgtgagcataggtgaggtggctaacatccccttggcactttgtttgcagaacttagtccaggattttacttccaaggatcagcaatccactatgtaagctaatgtttaaaggagttactataaagattcagaagactctaacagaactcaattgcaggaagtacagataaatctcagaggaaacagaaagtcagcaggtctgtttccaactctgcatctcccttcacgtttactctattttcctggttatctcttctctctgaaagtcttttgatttctgttccttttttttttttctgtcacccaggctggagtgcagtggcatgttcataggtcagtgcagcctcaaatcctgggctcaagtgatcctcctgcctcagcctcctgagtagctaggataagaggcacatggcactgtgcctggttatcttattttattttttggtgagacaggcttttgctttgttgcccaggctggtctcaaactcctgactttaagtgatcctcttgcctcagcctctcaaagtgctgggattacaggtatatgccaccatgattggacttaatttctgtttcttccaagcttttctatatgccctttggattcaagagatcaccatcatcagactggctcagtttctcagtgcctcaattgcagatgcctgagaaagagggtttgatggtctttggtctggagtccatatgtatcccattcagatggactttggagggtggggtctctaagaagaggtaatgggtagagccatcaggactgacgtatattctccattgtataaataaatacatgaaaacggaatgaatgattggatgattcatgtgtgtatgaatggaagatgaataaatgaatgagaggtggatggatgactaccaagcccaaccaacccatttaggagagaggtgggtgggattacatggcttctctctatgtcatgggttcttaaccaaaggttcatggataggcttgagaaggtctgagaaccctccgaagtcatctattaaaatgtcgtgtacatgtgactatatgtattttctggggagagggttcatagttttcatcagaatctctaagaactctacaatctaaaaaaaatcaaggaaccctgattatgaatccttgggatttttgttcttgctaaataggaaatgctggccgggcacagtggctcgcgcctgtaatcccagcactttgggaggccgaggcgggcagatcatgaggacaggagttcgagactggccgggccaacatagtgaaacccccgtctctactaaaaatataaaaaaattagccaggtgtggtccagcacctgtaacaccagctacttgggtggctgaggccagagaatcgcttgaacctgggaggcggaggttgcagtgagccgagatcgctccattgcactccagcctgggtgacagtgtgagactccatctcaaaaaaaaaaaaaaaaaaaaggctgttaacattgtgacatcctgagaagcattccttcgagcccagtatatcgcaaagctaattgagccagaaaaagtcagaattcattcattcccttttctgctatccctcgtccatccaattgactcaccaaatttctcaccctctcttcaagactgaaaacccctggccctccatgttatctacttttcccataaataaagtctagtttaaaagtagctgaaagcagagagtttttatttttaactttgatccaaaaatgttgcttgtctccccacttctgtccctttcctggccacaaacatttttgctggttcatctagctgcctgaaaccacagcccctcagagccagaagggcccttagaaatcaatctggtcagagcatttcacctggaggactcagcctccaaaagatcatatgagaatatctgtgggaaattctaaaaatatagtgaatattataatattaaatatacaaagcagaagtatttttttctaacaaaagctgtcaaaggtaaagcttgagaaatacttttgtttagtatgactatatggaagataaattttcttcttccttttttttttttttgagatggagtctcgctctgttgcccaggctgaaatgaagtgacgcgatcttggctcactgcaacctctgcctcccagggttcaagctattctcttgcctcagcctcctgagtagctgggattacaggcatactccaccacacctggctaattttcttacttttagtggagacaagttttcaccatgttggccaggctggtctcgaacccctgacctcaagtgatctgcccaccttggcctcccaaagtgctgggattactggcatgagccactgcgcagggcctggaagataaacttagtaggagtagaaacagatatcacgaggcctgaagcttatataatttgggaagcctcctttaaaaagaatataattaccaataaaaatttagctacaaaaataagtactcttcttagaattaaggaagaaaactttaaagctgacagataacataaacatcaaaagctggaaacatgtttttattgttagtatcataaattaactaaccctcttttataatactttcctgcatctttggctgtattttgctttttctgttcattggacaatgattttataatgtcattttctataaagaggatagaatgaatattctagcatggctggctgaaaattgtatttattgtattttgttttcattgttagcttagacaaatttctttatgcacakccataactttctcagcagtttcttgctgaagtgtgcttctttcatgttggcaagtcctgggaaaactccagcgtttgatctccctcgacctgttccacccatctcccctacttttacgcaagtcctcttggaccaggcggtccccactgggaatgcgcagcctctctttcagatgcctttttgggggttagagtagagtctggatgtgtgttgagtctaccagaagcaagtggtcctgaggactgggtggtctgcagccccacccacaggcatccaggaccactaccagggcatataaggtgacccctcaggctggggatggcttcaagctagagggggccaggtgaggctgcttcctccctgtcctggaaacctcagcttcattagcttccaaagcaaacctgaagcactcttgatttaaatcagaagttcttaaacactttggtattcagaagcctttatactctcataaattattgaagaccccacagagcttttgtttaatctatgggtatttatggtattagaaattaaaacaaattaaaaaaacatttttaaatttatctaaaataattatatgttatataattatgctgtaatacataatagtacatgttagtgtaacatttttatgataactatattattcaaataaattaatgacaagatggcattactttacagttctggaaatctcttttaatatctgacttaatggaagtaatggaagtgggattccatcttccgcaatgtatgtattctgtgatatgattttggttgaaacttgtgaagaaaatatggaaggaagaagaatttaatactcttctcagataattgtggctattcttttaaacctcacaaaagcttgacaaatcgtattttctcaaaggtcagttataatgttgaatctgtaactgtactgatgaccttcttcgtactctgttatattaaaatctcttgatctgtgttacacttggatagaaattttttcgcatcattttgtactagcttgcatgagttatttggaaactattagctcactgacttgtgctaatcttacaaatgttgacatgtttcactatacaatatcaaaattgcatttgtcaatatcatcatcaccttagcctctaaggattgggatgctaataagcttacagtataagatgcaacttttttccccaaacttgagttttgtcattggcaacacattctgccagttattttccttgaagtgacaggctaactttgttattttcttaagagaatgtgtgccaaatatccaagtctgagtaaccatagttcgtctgtcagtggttttttaagtggaaatgatgttccattaaaaaaagtggctaattcatctcataactcaatcgtgtaagtacttttcctggaagtgaccattcacactcctgcatataggagaagtactttatttgagtgcgtacttcccattctgttacacaaaatattcaaaagatgtatactcagggtcaagatttcataacattagtaatttttactacctcaaaatgaacaacctaaagtaaaactggcatttttttttactgcacatatgtgacaatgagggatatgatgactataaataatatactgaagatttaaaaaaagaatataatagttttgtgccactgtcttgattcatgctataaggcaccaaattttactcaccaatgcttatgtgccattagtgcaaatatgaatcagtacaaaaggcaaataatgtcttaatttggttttgaaaatagtttggcctcatggattcctaaaaacaccttaggtattcgcaggggttccatgggtcatactttgagaactgctggcttaaatgccttaagcatccttctaagtgaatcagaggtcaaggaaggagacatcattggtggctgagggagagaaggggaggaccagacatgacagtcttcatgacaatgacctagttgaatactatctttgtaaaaatgaagaaatggaggcacagtgagatttgctccaagtcatccagctagatggtggtagagccagggttaactcctaggtctcctcctgacacacagagtctgtgagcctctgtcaagttaggtctctcaccgaaattatcttacaattatttattgagtacttgttgtgtgccaggtacagggctaggtattgaagatattaaatcaaatgacattgtcatgatccttcaacttggtagtctaggaagcatgcagatgggcaaatcaattccactcacagttagcacgaagacaggtgatacagagagcacggggggctcagagcagggacgcccggatctgcaagtggctgagaatgtccagaatcgggattctgacactgagttgggaaggaagaatcaagttagccagatcagggaaagtgagagcttttctagtggagcagagcctgtgggaaggcagggaagagaggagtttgagtagctggaggaatggatgtatgggataaatggctggaggtgaggagtgggtgcagaggctgggtcgtggaggctgggtatgtccacctaagaagtctagattttattaggaaagctgtggggagccagacaggctagctggaggacaggctagaaagacagtctggtgctttttctaaattccagatggttgtgacaccaggacaaatcttttgcctctctgggcctctctttccccaagtacaccttgagtcacacagtgacaggcaagtttgttatatgaattccccacctaccattaagagagctgttgaaaaaatgagttcctatggcttaaattgatcccattctcttggcctgaatcttgctacaaagtgctgttcatttttcctatgggctttatggctcaccctggactctgaataaccattacatcagtttagtaaggttgaaccacgtaaaatgtatcatttgtaacctgttgccttgccagactgaatcctaaaaagtgtttctgtgcagtggttttcaaacctggacagtcgtctgaggcgagtggttaaaaatatatggattttcagacactacctcctggggctcaggaatctgtgtatttattttgccctgtgagttgctctgctataggcagcctggccctgattttctgctcagatattttgggtatcgctagttggaactaactaaagaggaacatatattgaatgcctgctggtgccaattaaacactgattcctcagtctcctgcacatggatgcatacaagcacctatgtggctgacacttttcatgttccatgacaggtactcctctttgtgtgagctggaaacatctaactcttacttcatttcccacatttcttgcatctccaactcgatctcttcaaaatgctttccaatagtcatttttctctctttctcctctgcatatgagaggctctgtcatctcattggaagatatcaattggtttatttatttaaaaaaaattcttggtgaacatactgttttactaaagcagcttgaatgactacatatgcaagtgtgcactggctctgtgggaaatgttatatgcaggatcgtggagatcaataaacaaggctgaaaatccctgtataatcataacagtctgggcacgtctggcatcccagcaacgtgcaacatatatacaaacccaaataaatatttgacactaaaatatgatcagttcagcctacaggaaagaacaggctgccagatccagagattggtgaatgggtggtcccatcagagggccagggagcgccacagagtttgttacatttctgacggtcctggaggtcacttaaccctttctaaggtcttcagaacacattatgacaatgtgtcaagtttaaactggggtcacgtccacgtgtttctgttttgcttataggtgcagaaggagggcacatgttttcacagagacttgtgggcccctgggggcgagtaagaggcaactccaacatggtggagagtgccccacttaggcagcagtggtggtgtacagcactcctcgcccgagcaggcctacagccggtttctctgaacagctgcctccgaagatgcttagaaagcactgtataggcatgggccaaaacaggaactcttacaggtgaaggagaattcaagcagcttctagtcctagaagctasagtcctagatcctcaactgcgtgcacaagcgtttctggggctgtctgagaatccccagtggatgtgtgtgtagcagagaggttaaaaaagatggagaaacacraatcttgcccagtacctcctctattttacggataaagaaatcaaggcccagagggggaaagtggttttccctcagagcttatttgtgtaaggtataagcttggaaccaaagtctcctaaaccccagccctggtcacctcctactcactacgcagcccctttgttctcattgtcatcacagctctcctaggatctgcatggtggttctcattttccccaagctctttcagatttgttatcctgttttatccttaccaacactcctggcagataggaagggcaggtaataataattgccacattttacagagaggaagatgaagtccagaaagatgataaagagatagttaaatttagtgatgaataaggatcctcaaacattagaaggttaggtatccagaggagggaccagcccagtctgcattttcctaaagggtagaactaaggccagtgagtaaattcccagcagcacagtacaggagtggtgtgggctttgaagttcagagcccagatccttctcttgtcaaccggtgaccatagcaagacatttaatccctctgagcatcagccttctcaacagtacgaggaatgataagtaataaattggtcatctcttgggccaaaagcacatgcttaataaataggaggtattatgagggcccagaagggggtttcatttgaacataagaaagacgtttccatcaaagagagcagttggtaagtggaatgtgctgccttgcaaaggaatgagcttgttgtcactggaagcattcaagaagaaactggaaaaccagcagtcagaaatagcgtgcagtaagaaattggacatttagaaaattggayatgtagaaaattccatacttctcgcagtgtcaagattctatggtgtgctctggataagcttgaatrctctgacccctctctgttcttcaaacatgttctctgctgcctagaagcctgttctctctgtccagaaggctcttctttgcctttccatccttcagtctcagcaaaatctccctttcttagagaagcattccctgaccaacctccttcccccatttgttaactcagttgccaactacagtttgatgactcacataagggccaagccaagggtgcaagtctcagactcccaggctaagcctcttttcagcaggcttggctatctgttgaagactaaagtccatccataactcctgcaacatagccaactacactgcaaaacagtgagaaactcaagcagctgctctaccattcagagaacaagactctatgaccattgagttccagtttactaccatatattaagttctgaacatgtgctcagtacagtgccacttgctgggggttcaaagataaaaacaggtcacaatgctcatcctcaaggagaccagctagtgggtaagaccaacaatctttatataagttgaggaaatrcatagcctatcctgggtacttgagaaggggtctccgggctcaaactgaggtccagggaaggcttcttggaggagttgacacccaaacactccagtgtctcacattccttatgatcaagaagattattgttacattatatcttgctgggtcagtggatatattcctggggcaaagctccagctgatgagcattcactgcacctcgatttatcctccagaacttctgcagaagtacaagatgccttcatgacctacacaatgtatgatgacgtcatcaccattaagctcatccaagaggcctgcaacattctgggtaagtatgaaagaacttgttttgctttcttagagctgctgtaacaaaacccagttgattctcattatttgcattggttatagtctataaagctgctgcaatcctgaattagtgaatactgcaccattgttcctaggggaaatacagggttagtttcctgaaagtctctggtcacaagatttttgccaaccaatcaatgcataactttgtttcatgtgtgcttctgtgaaaaaaatacgtatttaatatacatagttgattcattcacattgaactgctggccaactgtactgtaactcatgcctgaaggaggctaatctaacactgcctgttctctggaaggatgtgacagtcttcttgtgcttagggacactagatggcacttcagcctacatttgggggtcattctaaacagcaaaatcaccaacagaaaagcagaaaaatgtgaaaaagatgacactaaatagactgcaagaaggacacttggttatagttcaaactaaaataagaacatagagcacagccttgttctaccttggctagaagcattcatgttggccggtggaaattctgtgtctgtgaatgaccttgatagctctgtgagtattgatttcgggcctacagataaataagtagccaaatttgtgaatatgaaatcctcaaataatgaggaccgactgtatcacaacctgggtggcttaaaactacagaaattcgttctctgtggttcaggggaccagaagtccaaaatcaggttgctggcagggccgtgctctctctgaaggctctcaggaaaaattctttccctcttccaacttcgggtggccccaggctttccttggctagtggcggcataactccagcctctgcttctgtcttcacgtggctgtcttctccctgtatttgtgtctctgtgtctaaatttccatcttctcattaggacatcaagcatattggatttagggtccatcctaaatgacatcattttaacttgattacccaatttccaaacaatgtcacattcacaagttcctggtagacatgaattttaaggggcactctaacccagtacagggctcaggtatgaccctttccatttgagtggccttaggcttcttacagacaaaaatgatgagcagcaccgtctgcaccactgccatcatgtttggcttcgatgttggctttacaggtgttgcaatacctttagaatggtctgctatgattatctctgggtgtcaggaggaacaacattgagaatccgcctatgccacctacactcgtgcttacctggaaatggacgtggggtgctctgcagtgtgctgagggcccttccccgatctgctctccatcgcatattttcccatctgcctggacatgaaaatgccattgacagggtcataggagggggaccatgtgtggatggtcccactgacaatgtacgtgtcctcccaggatggtttttcctgtggatgtattagcactggattttttttatcttgttaatctgctcactccccaggcccagaggggacaaggtacaggacaaaaaaaaaaaaaaaaaaacaagaaaaaaaaaaaagaaattagctctgcctctttctagtttaatgaccgaggacaaatgacctaaatagtcacagttttctcattggttgaacaagatctaatcttcagagttatttggaggattaaatgagaaaatatatgtgaaaatatcatatgtggtatctggcatataataggctttcaaaaaacattccctccctcccttcttccctcattccctcctttccctcactccctccctccctccttcccttcctttcttctttcttccttccctcccctttgtgtttcctgggctgctgtaacaaagtaccaacaaccaggtggcttcaaacaacaaacatcaattctctcccagttctggaggccagaagtctaaagccaaggtgttggctgggttcattcccctggaagctctagggataacttgtctcttgcttctctcccaacttctggcagttgctggcaccgcttagcctgtagacacatctccccaatctctgtccccatctccacaggccttcttccctgtgtgttcacgtggccttctcatattgacagcagcctttggatttagggcccaccctaatcccttatgtcctcaccttattttaactagctacatctgctctcttttcaaataaggtcacagtctgaggttctgggtggacatgaatttgggggcacactattcaacccaatacaccctcgctttctttatccttccttctcaccagcactgagtacacaatgagccagggcaggcctgaggggagggaggggcaggcagcctccaccgtcccaggctccagggatctatgcaggaagccgaagcccccctctgtacccaggatctttgatgaggttcctctttcccttcccgttgaacttccttcacccattcctcataggcggtgctgccttgggtcactgtgagagtgtgagatggcatttaaggatgatctcactcagacgctgcatcaggcctcatgcttgtcacctggcaccgggtatagccctgttggaagtgtcaggctaggcccagtccctgggagtgtgcaagctggctcttatgcagcctgcagagggtctggcagcaggggccatggttttgagttggtttcatggtgcctctgagggcctagcaaattggcttgccattctcaggaacaatttgtgaaatgatataggtttaagccagtagcaggtatcacagtcatcagcccagcaggcgtgcctgagaacacaccagggcagctagctaatgctaagcccgcagggacaggcagcttctccagagcgcagcagtgatgtgtaaagtgcccgtgtcgtgtgaggtattgagcttatttcccttccctttggatttcagaaaaattatctgatgattaaaaagatagtgccagctttacttgcaggcaactggatctgacagatgagagggcttttcccatggctttcacatggcgctgtgactgatatctacatctcttctcatgttcctggtcatctcctggatgcagaagaccttccagggatccatatccaggagaggcccaaagtctctgccaagctgggagggggaagtcattgaggctgaggaagctggatgtgtgtggtgctcagagtcctctctggtaacaggtggtcacctgcttcccctgcccactctgggccacctgcttcccctgtccwctctgggccacctgctgtctcatctcatcatgttgctctcttggagccacagagacaagcaggggccagagttgccaacgaggcctggcaggtgatggtgatcatagctaggaggaatctggtgtcccaactggttgttaaaacaacttccaaccagatgtatgttagcccctggtcacttcccacctgcatcttttgatagaaccaaggttgtgtctgaggctggaaataaggcacaaggagtgaaacagtcatttgctccttcagctcctggaactcaggcrccaagagcagcaacacctcccggatgcttcctaaagccagttcccagcctgccaccacggcagcacttagagggaggacgcaggcagctggcagacagggctcacgtggcttcccaagaatcacggctgggcctctccccgaatccaccaaccagctccgctctccaaagaagcttacagagagagattctaggccaaagctggcccaggaactgggaagtgtcagtgatacctgcaaacctcacccctatcctgtccagcctgtcttggggggactcccaggcccttttgtctctccagcagctaacaccaggggaggtttstgtggggctgggttatcaaaaagcacacagcatcgagctttctgcgctcgagtctgagagcgggatgtgtcctctttacagcactgtgctgctcccaggggctgcaggcctggagacctgggttctcgactcagctctgctccccagctatggcctttttgttcaacaggtggcagcagcacagccaccccagagggtcacctgtcagcctttatgcttgacacacctgccaaagagattacctgttttgttttcttaagcatcactttaattttttttaaaagtatgcgattacgatgttaaatatgcttttgcaaaccagacagamagatcccctcttgatcctaatatgtccaccccacataggcaaagcctaggtgctgcccttgtggctgacaattctgcacatctgtgatcctagtgagggcaggaggtccacgagcaagtccagtggtttgcaattacctcctttcttctagctaagtaagaggagcatctagtaaccttccttccacaggaagaatacaaatcattaggtggaaattctgtaatgagagatgactacttttgagctgaaaatctggagttttgacagagcttaggaaataaaacggcaaaaaagcttasaatgggtagtgaaattaagcccacctttagtcttttcttgattttattccaagggatcccagcagcagaaggacgtagtggctgtatcgtgtagtcttgatttggtctgagccctctgcgaaagaacatckcgttgttattccagaatgagaatggagggtggattcttttccgtcacaccagctgtgtgaccttgggctagaatttcactgagagttgatctcctgcaaaaggaataataccttacagggttgtgggaaggaatgaattaaatcaaataacaaatgtaaggcacttagcaacatgcatggcacatactgggtgtttggtaaatgtcagccaaatgttgaatctgaaggaaggatgggggtatttctatgttttgtacctctagatactgtcccttataagaagacaggctttgctgttcacttcaaatggctgtggtaaaaaattatgttccacatgtacacagggaggggaacaacacacactggggcctgttgtgggggtcggggggaaggagagcattaggaaaattagctcacgcgtgctgggcttaatacctaggtgatgggttgatctgtgcagcaaagcaccatgacacacatttatgtatgtaacaaacctgcacatcctgcacatgtaccttggaacttaaaaataataaaataaaataaaataaattatgggccaggtgcggtggctcacgcctgtaatcccagcactttgggagactgaggtgggtggatcacttgaggtcaggagttcaaaaccagcctgggcaacatggtaaaaccccatctctactaaaaatgcaaaaaaaaaaaaaaaaaaaaaaaaaaaaaaaattagccaggcgtggtggcctgcccctgtaatcccagctatttaggaggcttaggcaggagaatcacttgaacctgggaggcggaggctgcagtgagccaagatcgtgccactgcactccagcctgggcaacagagcaaggctctgtctcaaaaaaaaaaaaaattatgttctgagctctctgattagtggtcagcaaactacatacagcttatgggccagatctgggcccttgcctgtttgtgtaagtcacgttttattggaacacagccgtgcccctttgtttatacatcgtccatggctgcttttgtgttacagtggcagggctgagtagctgcgcagagaccatatgacctacaaagccgaaaacatttattatttactatctgcccttcacaggaaaagttggtcatttcatgctctcaagggtggatgcagatctttttcaagattctaaaaatatcttttaacctaagaactgctctggactgaattgtgcccccatgccccaaattcatatttggaaatggggcctttgggaaataattaggttgagatgaactcatgagggtggggccctcttgataggattggagctcttataggagagataccagagcactggctctctcactccctgtcacatgggaacatggtgagagggtgaccctctataagtcaagtaatcatgttatcaccttgatctcagacttccgacctccagaactctgagaaaataaatatctgttgtttaagccaccccatctatggcattttgtcrtggtggccctagtggactaatataagaacttgaatcagcttgtatatctccagaaagaaatactctgtatatatcatatcaccccagtccatttttgtggctgtctgtgctcatgtacatcaaacggtgtggcagtacctccagcagtgagatgccatcacatacctgccccactgccgtcacattcccaacccaaccaacatgtgtagaggcagcagccagtctacagaccaatgtgtgggctggcccacatcacctttccaccgaaagccaacgtacatcactgtggtttctctctgcctagctttgaatgtcaggaaycttttcttcttgtagtttatttccataacatctattggcctatatctatctgaaagagtaaatgagtatggtgaatgcatttttcaaacaagaagttgggatgcaaaatcgagtgaacacatgtatgrgatgtggaatcaggacagccccaggaagcccgtcgtgattctgtatgtctccaactcccatgagtctgagagagcaagacccatccaaaggaaaggctacaggaaggacattttactgtctaacaaaatatactggtcagttgaaaatcctccctttgacaagggaaaaagtgtgcttagtcaccactagtgagggctttgctttccatgtgggcttcagaatgcaatttccctaccttgaagcaattgctgggacttttccagaccgctctgccactgcatagctctgtgctttccaattagcataattcaggaggggaccagatggcaggttgagcattgcataaggaattgttctgtatatgaataagtgcctacttagtgtgtaagtgggttattagtgatctgaagcgacaaaattcaaaacaacacacaacagccatttggcacagctgtgtccgtctagactttgcttgcgaagacacccacagtaaaatgtgtttcaacagttagctatcagcaaatgccagcaagcctctctgcactcacatctttaaaaataagaacaacacaaaattgacaacgtcttgaaatcaggcattataacgtttgctcttcactattctcctctgaggatgggacaagtaacccaggctgtgcaaccagccacgaatggagacttgaattcaggtctgctgattccaaggctgatgcttaatcccacagactggaggggaagtcgacaatgtctagagcaagggctttggaatcagacggacctgggtgagccccctggctacaccggctcctgataatgtaacctggggtaaatgttcccctggtaatgcagcaatgatacctgtgacgttttgctcaccttatttgatttcttctgtaggacaacaacccagggggtttcatctgtcctacagaagaaatcaaataaggtgagcaaaatgcctgacaccgagtgggtacacaacaaggtacctcgccctgtccctcacccctgcttgccaccagatagacccctggccccctgctgtggccctggtagggctgactactctgttccaaggtttgacgggaaccaggaggcttcttctctaccaggcttcagcggaattgcttcatccctgcagagcaccaccttcctgagctgccttaatcgacttccagtttattttttctctgtgcctgtataaacttacgactacttctgaaacccaaccctcctaatttagagtcttcttcctccttgcaaactacagcatggacatgggcagatgtttctttccttttcttagactactctttctcctactccaaaatatttccccataaactaactcatgcctgacattagtgatatcattggagaaaaagagtatgtgagattctggctcttttcaggtatctgaagagtaatcctttggataccaacgctttgggggaaaaattacccattttcaacggaaaactttgtcaaatgtagagcatgtacttctctttcctgttgaagagcacatgttttgctgggtgactcaggaagagtgccatgaggaatagctcttgttgcctgtgacttgggtgacgggaggtgggcaggggtcttgcaagtctggccctgagtgggctgtttgtccaggaggctctgctttggtggctatggtgtccctgccagcctcactggggcttcaacaggcgctctctgtcccccagccctggacagcccaactctactctttccagtaccttgagctgaaacccagcaagaagcaaatgtttcccagtgacaaagaagacccatgcttgttaagtcagaaagtttgagttcatgcaacactccaatgtaaaagcttgttagaggtctccacacctggggaatcaagcatagaagctttgtgaccatcattttcctcctggaaaaaaagtcttgggtgggtgttgtaatcccagcactttgggaggtcaaggtgggtggatcacttgagcccaggagtttaagaccagcctggacaacatggcaaaacccccatctctacaaaaaatacaaaaattaaccaggcgtgatggcacacacctgtagtcccagctacttaggaggctgaggcaggaggatcacctgagcctggggaggttgaagctgcrtgagccgtgatagcaccactgcactccagcctgggcaacagagtgagaccctgtctcaaaaaaccgaacaaacaaacaaaaaaacaaacgaaaaaaacccaaccaaacaaaaaaaaaaacaaccaaccaaaaaaaactcaactcctttatttatttaaaaaaaatgttttaatacatacgcaaaagtagagagaattgtgtacagaagcccacataccctccacccagcttcactaattaacaatattttgccagtcttatttcatctatctgattcctccactctttttctagttttattttttctggagtgttttaaagcaattaccaggtttctcacaatttcatccataaatatttcagtattagtctctaacaagataaagacattaaaaatgtactgataatgccctgattataactaacaaaattcataacattacagaggcctgggctgcagctgtatttcagctggccatggataaacatggtctttacggtcttattatgtaagattccctatggtcttttcagagcaatcaacagaatcttttttactttgacataatttcaaacttgcaaaaggcttacaagaatagtacaaagaattcccatgtagtatttatccatattccccaaatgtygacattttaccatatagtgtctatccttctctttatatctagatttatactttttttcttgaaattgttagtatattgcaaatgtgatgccttcttgtccttaaaaattctcttaaataactacagtacaacaatcaaactcaggaaatgaacatagatatagtgctattatctaatctatagaccttattgagagttttccagttgacccartgatgtcctttagaacaaaagaaaatcctgaatcatgtcacttatcgtgtctcttcagtattcyttggcttggaacagtttctgagtctctttatgttttataaaattggtatttttggaaagttctggtcagacattttgcaaaatgtccctcaattgaggattatctgatattcctcatgatataattcaggttatgctttcctggcaggaagatcacagacgtgatctttttccttcccagtttatcatatcaggaggcatattccattcattgatctgtcctattattagtgaggctaactttgatcacttgatttacgtagaatttgccagctttctccactgtaaagttacattttccctttgtaattagtaccttgtgaggagatactttcagattatgcaaatatcttgtcatttctcaaactccctctttcatagttttagtatttatttgtgattcttgtctgaattgatacttatgatggaagtcaaatggtgattttctaagaatattattccttttgtatttattcattgagtttctgtaaggaagaatttccccctctcccccatgtatttatttacttatatcaatgtagatttgtgattcttattttttaaaaacaggctgtaatcctttccttttattatttattttgatgctcaaattgtgcaagagttagccagtgagagccaccctaaactggcccctgtgtccttttgacatgtccccatcattctttgatcacttctttaccttcttgcataacaagatgttataggctgatctcatcctttccctgccccagccctggaatctgccatttctccaaggccctgattccttttacaggagaagagcatttaaaaactaagatctagacattaggcaaccccactgctactgggatatcactgcttttaggccctcttagtggacagtgctggaaaatacatgtcatatacacacacacacacacacacacacacacacmyacacacacayacatccatctttctctctctatatatatatctatatatataatatatatctatatataatatatagatataatataatatatatagatataatctatatctatctatatatctatctatatatagatatagatatataaaatatagatatagatatataaaatatagatatagatatagatatataaaatatagatatagatatagatatataaaatatagatatatctaaaaccatgatagatttcattgtcttattatgttagattttctaatccagaggcacagggttcattctattcctcccctttccataattgtaacttcattctcagatagggaaaaacctggctcccactatccacaatatatttacttgttcagaacatagtttcagaattgctaacccacactgctgtgaaaaggaagcctactaactacagtaaaatatttgtttaaagttctttttgtttttggcctgaagacacagtagtgtaaatactatgttcaaatattactgggttaatttttttcctgggtgattatgttattcaaaactgttctgttgaaatgctgttctgtgaatttgtttctgtttgtactccatcttaggggttttctctatccttgttgatcttatattttatttattttaagcatatgaaacattaacatgactccccaaaccagaactgttcaaaaagttatgctcagaaaaatgtcattttccccaactccacaatttttctaatctttccaccccattccctaccaatgtcctgtaggtaaccaatctcaatagatccaggtttatccttctggtgtttaattttgcacaagyaggcagatagatgattatttccttgttttcccttctttcttacattaaagaatactaagcatagtataaagtctcccctgcactatcaraaaaacattttarggcrcctaagttagtttagttctttcttgcagtttctaaccatttcctgtatatcttggatcccctatgacttagcgggttcttggaatcttaaatacactgatgtgaaactgtataaaagactaaaacaggtgctgatttttttaaaaaagcggcctttattccctgctggacaagcattctcaactaagaattctagaagaagctccaaacccattacaggtggaaaacaccacactcaaacccaagatccttgtttgggaaacagttcatctctcagccagatgtcctttccttttaacagagctgggcatccacaaacaaaataaccagagcctggaacaaacagcttcatggattttttaagtttaaagatttgaaagtcaaacaggcagtctttyacccaaagctgccactcttacttgaatataactttgcttggcttacacgcagcccagtcctcctggcagaggttcttgggagaaggggggccgctgggacccctgcttttcctggcaggtaacaggatgcacctgctcagagctccagcctccaggatgcacagcacagctgttttttcttagtctgaataagctagatcagaggtaacagagggatggaagcaggagagcagaaggacaatttcccatctgtctgtttaccttttagcagtccccctcccagagactcaagcactggaaaggaacttggtagaatttgtctcagatcccctaggggttagcaggtggtccttgaatttataccagtgtatagacaagcctgcctgaggccggccaggatgcacccacaagcaaagaagccaacggaggcaattaacacaggccattaccactggcttctctaccatcccaagcttcgtctagattsagatccgactaatcaatttttggaaaatatgtataactcatcttggaaaatatgtacaactcatctctgacaaaactagaccaattcagtggggactctatcctgctcagattacagaacaattatctgccccatggtctggctgtggactatgagctgtagggaaactgctcttcagaccatcctaggaagcaagcaggggctggagagtgcccagacctccttcgtctgtcctctgtaggatttagccctggatagctcatgagacctggaatgtcccttgctgtgaattccaaatccagccagagcatcacagagtttttcaaggatgcaaccacagatactggtgatggtgagctcttcaggccttccataaacctgggcattacagacatttgccccagcccccaggacttacatgtgtcacagccccattgtaaataagagggtgtttctcacaggatctccagaccagcagcatggatggatgccctgtctcctgtgtcaatgatgccaacgcataagcagcgcttcccttggggagactccttgcttctctcattgctgcttcagaggctgggggatgtggtayaaaaagtgctaaacttagagttggagcctcttcaacaaatctggcctctgcaactctatgtgactgcagtcaattcacaaagatgactcagccccaacaggctcagctgtaaaaaggacatgataataaggttagctaccttataagagctgggcaaacattgagtaacagaacagtaattaatgtgtgttgtcagaactataaaayattcttttaaaatgtttgctgtctttcccataaagtggacacttkcttactgtctattccaacagtgtagactggggagcggggaggtgggcagcagctccaactaatgccgcaaatctacctccaggtgttcatcaggcacctatgctgtgtttagcacagaaaacgtgtaggatcgggttgcttctctccagaattaccatgaattaggaagaaaaaaaaatgcaacacttaggaagagagaattcagagaaatctttatggagaatggaacaggaacactgggcctcacagggaggtcaggagagaaagggaaagacactgcaagtatttggtatcatctttttggtaaatcaggatcctgtagccttgaaggcatagttttttcattgtgtattagttatttctcagaggcatccttgtattcttgttagagactgactgttacatttaaagatgtgggaggtgttggcagtgttcgtggagggtcgcgccctccccacccagagtgaagcttgttctgggcactggcttcagcagctaagcgggtacagcatctctgcatccccttctcgactttgaggaagtatttgtcaaggagacttatgtttcacaagcacctactcagtgccaggctgcacggggctcctcccaagggcccatgacatcaatgtggttattggcattttaccgaggaggcaagtgacggcttagagagtagctcgatagtgtcacacagccaggatgtgaaccctttggaaataaatgaagaccayacaaaggacaacacacacctccaggagattttatttagggggtatgctttggtttctacaggtgtctccatggaagccatcctgaaactctttggagaatactttcaattctgaagatgtctggctatgacaggatgctacggacactgggaggaaatctcatggagtttattgaaaacctggatgccctccacagttacctggcactctcttatcaggtaaggccacttgagtctggtcttggctgcccaagaggaagcaaatgctgtggcagtcctgggccagctccccgcctcccccaacagaggcacggttgcaggagaaccctcccatctgcagaatccttggtacctggtgttggtgggctcaggagttctttttggaagagaatgaaaaagaaacacctgctggccacttttataaactggctcacaaaaaccgaagggatggccttttcagatagggtgtggtgttgatttggaattaaatcctggagactcattacaattggaacaaaggctggaaaacagtcaggtttcagtgcatttgcaaaagctctcctaaggtttcctggccaggatggagctgataaattgcatatgcagccagattcatgttattcatgtatcagaagggaagacttgacagggctaagagccagaatcggaaaccatccaactctgattaacccatgggtgactgactgaggtgttaggaaactaatttccctactgggatatatccttctggagttctttccttgggtttcttgtttgtagagatcactggaaattcaaatgcctagattctcttttattttttagacaagaaaaggtgaaagagcatttatacatatcataataatagtttattgctttagagaacatagtttaattttaaggccttatatatttcaccgagatcttccttcaccatttctatattggtgttcatatccaccctttcagggttgtcatggggacaaaatgggattgtggatgttaaaaagcctcagcaacccttacacccccccatagacgataaatgggaaaagtattattttctccatttttcatataaggaatcagaggcttggaagccttaactgacttcaattatgaatcatgaatagttgggcatgaatagctgggcctgtcctattgttatcatgtgaactactcaagggtagagggagtggaaacagccctgcttatggggtcagatgggcccatgagactgtcccactggctctaccacttaacagctgtgcgatcctggacaagttagttgccgtctctgaatctcaatttattttatttaataatatttattgggtaactaatatttattgagtgatactatgtatcaagtactttttaaggtattggacacaaacagagacaaaaaggaataaatagggaaaagataacttacctcatagcaatatgtggattacaagagataagatggaaaagtctagcattgcaatcagcccagaaaaatcagctttccataaataaataataactctattccttcccctttcttttctctctgttcaatatggccagtttaagaattaacgataatttgcatgacaacttcctttcaatttcttagctaaagcacaacaattaggatataaagaaatagagttaggcccttttaatatttttttataacacatatattttttatcctatgatctttttcctttgcttttttataatttcaattttttaaaaaagattcagagggtacatatgcaggttttttacatgggtctattgcatgatgctgaggtttggggtatgattgacgctaacacccaggtagtgagcatagtacccaatagtttttcaaccctcgaccctatcccttcctccctcctctagtagttcccggtgtctgttgttgccatctttatgtctatgtgtattcaatatttagctctcacttataagtgatgctagagaagcaatagaatagaacttatctggtggtatttgaggacattttgcacataatgaggtaaataaaatatttaaatattataatatacaagttggaagaaaatacatgcaatgatacctaacagctatatagtgctttattctgggcaaagtattatagattgtctctttaggcaaaaataacaamgtaagataatgttcactttttttgtgtctatctagtaatttggcagtgcctttaaggtatacatttctggttataactgagcctttaatcttgttatgctttggccaaacttcattgagtgctaattatgaggcaggtgttgggctaagtaatgtgtcaacattgacktaccttcttgatgccataagagtaggcagtcttatttttcctgttatacggatgagaaaactgaggtccrgaaagttcaagtaactgtccccaaatcacccaggcatggtggctgagctggacccaaacccacacctgtctccaaagatcctgccctgtgctgttctcattattctttggaayaataagaactttgtcaaagatcacgtggctttaggtgtacagccttatttctgggctttctattctgttctgtaatgatacctaacrgctatatagtgctttattctgggcaaagtattatagattgtctctttaggcaaaagcattttttttattctgttattctttgccctaattctccacttttaaaaagccctatttgaagcaagaaataaaagtgtaattatattatttagagacttagtgacattgaccagaagaactaaaagcatgaacttttggaagtgtctctgggcagggggtaaggagtgaggggcatgaagcaggatcacgtggactttctttcaggcctctgtattctgttactttattttcactatgtaggatttggatataatttttaaattaactgttaatttcctattttatttatgctttttatatgtgctgcctcaactactctttacattttgtcaagatgtaaacacacatacatacagataaatatatgtactttctctaggtacatacttttggaattagaaaaaaatagtatttgagggctgggcgtggtggctcatgcctgtaatcttagcacttttggaagccgaggtggacaagatcatttatgcccgggagtttgagaccagcctgggcaacacagcaaagccacatttccacaaacaatacaaaaaaaaaaaagtagctgggcatggaggtggcgtgactgtaatcccagctactcagaagcctgaggtgggaagatcatttgagcctaggaggcagaggctgcagtgagccgttaccgtgccactgcattccagcctgggcaacagagcatgactctatctcaaaaaaataaaaataaataaaaaattaaaaaaaataaaaataaaaaagtatttggggaaaaaaaagaaacccattttaactaacaacatttcaccatggaagacgacaaagatcttggaaggaacccatctcctttacctattccctcacttggaccaaaagctgtgtgtccagggtgctgagttgccctctaactagctagagactcccctaggcaaaatctctatccttctttcctagtatacatctcatttactgtgaaatgataggtacttgaatgtcaacatttctggagaaaggggaggatctcttctgatgtatccttgaaggttctacttttttttttttttttgagatcgctctgtcgcccagtctggagtgcagtggcgccatctcggcttatggcaacatcggcctcctgggttcaagcgattctcctgcctcagcctcccaagtagctgggactacaggcatgtgccactatgcccggctaattttttcgtatttttagtagagacggggtttcaccgtgttagccaggatggtctctatcttctgacctcgtgatccgcccgcctcgcctcccagagtgctgggattacaggcacgagccaccacgcccggtggaaggttctactttctaaatgttcaaattgatatcacagaagacattatcctttcagaacaagacattgattaattctacttgcaaattctctgattccctgatgtgttggaaagtgaagatgcccatggtcacttggtcacaggccaagcgcggcggaaactcactaaggcttcctgttaccagcagacagctgcttttggaatatgggtagaaacagcatggcacggtgcaaaggctcatttgggaatcaaatgttgttctaccattaacctaggtttgccttccctgagcctcagtttcttcctcttcaaatggaactagtacttgccatatagagttgtttaaagtacagtaggtatagtataaaattcctgacatacaggagcagaaacagtgggagtttctatgtgattggagagagggttggcatatagctctgtatgatgtaatgggtaaatactattgtttcacaaagcgtcaaaagcataatttacacaatttgtgtccactgggaaaaatgtgtgtcttttaattaggagatgaatgcaccatcgtttcgtgtggagagaggagcagatgggaaaatgtttctccattrctactcggatagaagtggtctgtgccacattgtaccrggtatggaaatggcttagctggccgcagagctatggggcttctgaagtgaggaaggtttccccatagattctccaggatggctaataactggctaygggtaagaagttaaaactcttagaatgtgtgacttcatatcatcttgaccactgctcccaatgtccttgagcttttaaaataagtttccaaaattccacaaaaatgagtaatttgtacttttctttcaacattttaaatcatacaggcttttacatagttgtgataattctgcgtatattattttgtatcagctttttatttgcatttagcattgtagaaaaagcatgtttccacataatctttaaaaccacatattaaatggccgaatgatattccatattgtaattatcttaactaatcccctattattaaattttccattgatactaatcgtttgcttttgtaaacagtgctatcatgaacatcttcatacatgctttccatttatatatttttttcttttttttttttgagatggagtctcgctctattgcccaggctgcagtacagtggcgcgatcttggctcactgcaagctctgcctcccgggttcatgccattctcctgcctcagcctcccaagtagctgggactacaggtgcccaccaccacaccttactaattttttgtatttttagtagagacagggtttcactgtgttagccaggatcgtctcgatctcctgaccttgtgatctgcctgcctcagcctcccaaagtgctgggattacaggcatgagccaccgtgcctggctctttccctatattttgtatataaccctgggatagattcccaggggaacacttttttgaacttgatccttaatgcttttacaactgaattttgcttacattatctctaggtttatttgtttgtttaatgagttaaatgcctacctgaaataacaaacaaatgaatagatgccaaactagaaattaaagtggcatggatatatttggtatccaaacatgtataacttcagtctctgcatatttttatttaattggctgtcactgatgtctgatttgaagcagggcctgggcttggtgaacttcagaatattcatcagragttttgccatttgattattttatgatttttgctgataaagttsccttcggccatccctcgacaataggtgtccttctgctgcaggtatcattgaggctgtggccaaagacttctttgatattgatgtaatcatggacattcttgacatgaatgaagaagtggagaggacagggaagaaggagcatgttgtgtttctgattgtacagaaggctcacaggaagatgagaaagacaaagcyaaaaaggttacaagacagtcagggcatsgagagagaccaagaggtactgggtttgctgtgcctttagaaagaacagttgcacttaagtagagctacgagtcttggaaaaatctatgcaaacaacagaatcaactggacctttttgtttttgtttttgttttttacgttttcctttaagttctgggttacatgttttgaatgtgtaggtgtgttacataggtatgcatgtgtcatggtggtttgctgtacctatcaactaggttttaagccccacatgcattaggtatttgtcctaatgctctccctctccttgccccctgccccctgacaggccccggcgtgtgattctcctctccctgtgtccatgtgttctcactgttcacctcccacttacgagtgtctgcggctataccaccctgaacgtgactgatctcggaagttaagcagggttggtcctggttagtgcttggatgggagaccaactggaccttctaatagtggaattaaggcagagtttctcagttttggcactgctgacattttgaaccagataattctttggtgttgatggggtgtctttcacgtcatagtgtgcttagcagcagccctggtcttttcctactagtagaacctcatcccctcatttgtggcmaaacaaaaaagaaagaaaaagaaatgtctcctggcattgccaagtgtctgcgtagtgggggtaatggataaaatcattcccagttgagaattgctgggttaaggttaagtggatatatrctgggaagcattctgggatgcacctgagcctggacaatttttcacctataacaataaccatatgaaggrtttgaaatttgaatttgatggcttttttttttcaatcctcctcaaataaattgatctttccagtcttcagtgcccacttctgcagctggaaccagtcataggtcctgagtcaactcaagactctgtacttggccaccccagttgcaactgatagggtgatcattacctgcttaagttaccatgtatgttagctgaacagctctccatgcacatagcttgtgaaaatacccagattaggattagtctctgattccttagagtattttcaaagtccatctcagagtctgttcactgcagaatcttcaaccacaggaagaaatgttcgtgcatgattttcttgccagatatcatcctagttccctcttgagattttctaaaaagttattgctttctttgatagagaaacagcatgaggactaatttgattaaaaaataccgggaacgctaaagtcttggtagaagtgatcttgtaagccctcatgctgttcctctggccatggatacagttccttatttaaaggtggaccccatcacagcaaatggggtttgtgcttctccagtcatgtgaccaggtacctgtctccctgccacctgcaggccctccaggcagctttcctcaagatgaaggagaaatatttgaatgtctctgcttgtcctgtgaaaaaatcccactgggatgttgtgagaagcatagtcatgtttggaaaaggtaagtgagtgattctcccaagctcagctctgagatcagaaagattgcttgattctcaggagtagtggccagtgtacactgacagggccaagccctctgtgattgtgttggcactagtttctgcaaagcttggatttggtgaccatggtttttaactttaaaatgtcaggctctaattgtccttccattgcctctcawtatttgtgccgggtgacatggagacatcatctcccctgtcctaagaaaaagtttttggagacacaattggaatcactcccaacaggtgatgggtggagagaaggaagatgagcactgatgtgccatcaggaacaatgaattttccacagctcgtcttctgcagtcaggccttctccatttggacacatttctggactggagatctgtggataacaaccctagtcgcccaagcaaaggacactagatcaagagccaagaaagcaagtttctggctctgtgcctaaggagctgtgtgaccctggacaagagtctccatcttctcatttgcaaaatgcaggcattaggcttgctaaggtacccctgtgggcactgagcccgtctaacgattagcacctaacgcctgagtctgaataagggctctgatccattgggagaagggagttagggtgctctgcgtcacgactcaatgggccaggtgacacgcatctgggagaaggtctgcagggctcaaagggctgcattttgcgtccttcaagccatggcaagtgagtcaaacacgcaattgacatcctttgtctaggagattttcatatcaaaaaggctccatttcgaatctctaccccctgccaaataggactgttggttaaattttcacgtgccacccaaaactgtcagtctaaaaagctccatggcaaatgtccctgatgctgggcccggagcacacgctctgctctgctagctcattgtctggctgtcaccatttcaatgccgactctgtgttcatggcgagacatactcaattggcccagaaactcttcagcggcaggcagaaacttggcagggggcaggagggcttctcaacctggtagcaagttttctgtttgttttaatttggaagaagaattgctgtggccatctggagatgctgagggagtccatgcaaaagaagtgagattgcactttgcttgtgaaacacttaagatactatccctatcccgagctctgctctgtgcaagggtggaggcgggagctgcttctcatcagcacttcctttttctatgtccagggcatctcatgaacacctttgagccaatttatcctgagagactctggattgaagagaagacattctgcaacgcttttcctttccacattgtattcgatgaatcagtaagagactcttccctctgtagcttagaattggggctaagccagggaartgagcatgatttacagtccttcatgaacagtggagattttcaagtccctgagaaattcccagggcttgggagactaggctttatcctggcaggaccattgatttgcttttcatattgtggtatcctccagaatccattatgcaggatcttcttgatagggtagaaagggaggtttgaactagtgaatgcatgggaaagtttaccattagaaaaaaggggaaaaggaagtgacactaaaattcactacataaagagacagcagaacacagtcagtagcaacaatagggtggaattctacccatgaactcttcccatccttgtgaccaccatgtatgtctccatcccacccagcttcacattctgcctcttgaacatggggaaggggtcatgccaactcaagccactgctctgtaagagttgtgagcataactatttaagtttgattgttaatccatttctatggwtaaaatatatgtcaactgaattgattaggaactcatttaaaggacacctattttacttcttccttctgtgtgttcactggagatagcagtgaaaggtattccccyacccccttgatggatttcttcacccaggcctgggtgatagatccaatgctatagaatttgctagtttcttcattagtaaatgatagagagagtgagagagagagttgtctcagagagcaaggaggaactattagcccaacagagagctgtaacctcatttctctttagtcggaaataagcctctgagcactctcgtattattcttttctctttcagacattagcacagatttgattgtttcaaaaaaatttattacttccatgatgttgattccattactgaccccctttcccgatagtgagccacagaacatggctagaatgttatttccaaggggaagtttatgggaagggaggttgctttctattcctcagcttatatctgtcctctgtggatagctacaggtgaagcaagccagagtgaacattcagaagtacgtaccaggactccaaacccagaatattcaactggatgagtatttctccatcattcatcctcaagttaccttcaacattttcagcatccgcagatttatcaacagtcaatttgtcctgaagacacgaagagaaatgatgcctgtagcatggcaaagtcggactacactcaaacttcaaggtaatcactcactcctttcctgttgctccccacctgtttgagagattgatccgaaagggaagaggcagttttccaatttcctaaaaagtagggtaggggctacgttgagaacacgttttcttttttctgacgtttccacttgacttgatctgtaaagaatatattttatttcctcaaccatctctggcttagacrtaaactatgtatgtaatatagttacatacataattatacaagtatatacattatgtaattataaaattctgatatgttaccaaaattttcagaatgcatgaggtgctattggtattaaattaatgtctgtattttatgtagcaacatgatcatctaactcactattagtagggcccacattttgtttttaattgtagtaaaatttacataacaaaatttaccattttaataatttttaaatgtacagttcattggtattaagcacattcacacgttgtatgttgtaccttcactaccatccatttccagaacttttttatattgtgcaaaactgaaactctgcctattaaacaataattcatttgtccttcctcaattccccagtaaccagcattctaccttctgttcctatgaatttgacaagtctagatacctcatataagtggaataatacagtacctgtccttttgtgactggcctatttcgattagcataatgtctttaaagttcatccatattgtagcatgtgtcagaatttcctgcctttttaaggctgaataatattccactgtatgaatatacaacattttctgtatccattcacccatcaatggacagttggatttcttccaccactttgctattgtgaataatactgctacaaatgtgggtgtacaaatctctttgagtccctgccatcatttatttggaatatatatccagaagtggcattgctggattatatggtaattctatttttaatttattaaaattaggaacttccatactgattttcatagtggctgctctatgttacattcccatcatggacatcaatggacaagtgttccaatttctccaccatcctcatgaacacttattatctgctttttaaaaaatagtagccatcttaatgggtgtgaagtggtatctcattgtggttttgatttgtatttctctaatgattagtgatattgagcatcttttcatgtggttaatggccatttctacttattcttcagaaaaatgtctattcaagtcttctgtccatttttaattgagttgtttgcttttgcagttgagttgtaggaatttcttgtacattctgaatattaacctcttatcagatatataatctgcaaatatattctgtatgttaccttttcactgttggttgtgtcctttcatgcacaaaagattttaattttgatgaaatccaatttatctattttcttttttgttgccagtgattttggtgccatatccaagaaattgttgccaaatctgatgttgtgaaacttttcttctatgttttcttttaagagtttatgttttagctcttacatttaggtctttgattccttttgagcaaatttttgcatatgccttgaaagggcacacattctgagctatctttctattagagggatgtttagttattccagggataagcacaggcagaactcgggggatgtccaaggggagaatgacatgttctgggaacccgagtgaggtgtagagtggagtgatgggagaggaggctggcaagatgaggacttgaactctatcatgcagctggaaacatgctgaagtgtctgccatgatcagatttgatgtttagaatgatcactctggaggtgtgtgaaggatgggtcacagtgtagagaaaatggatcctgggaggccagacagaggctgcttctggagtccaggaaagaaactctaaagtgctaaactctggcagtggcactggagtggcaattggaggatagactcacaagataattaaggcaggacttggtgactggatgtggggggtggaagagaatcgttaggataattattagcttccttgattgggtaactgggtgatgaaggtgcaattaactgaaaaaaagacataatgtaatgtccttgaggcagggatttttgccagtttgagtcactgctgtatcctcaatgcttaaaacagtgtgcctagctcatygyagggactaactacatatgtaatgaaagaactaatagaaagagaagatttgtggaggggatcgaagttgagttcagtgcagatatccatgaacagatacctaatagggagaacagaagaaaaaaaaacactgttcctggaggtattaattgtcagaatcatcctagagtgtattttggcaatacgtatcaaaagccttaaaaatgaggatattctttgtctaagtaacccgtgtctaagaatatatctttttaacaaactaactagccatgattatacacaaagactgcctcaagcttattcatcacaatgttgtttatacaatgataagctagataaaatataatcaatactagcttattatttaataaaagwatgagcaaggtaaccagcaaaaattaagatgaatatctatatttaatactatgaaagaatatgttatatattttaagtgaaaaattcagattatgaaaagaagatgccatgtaatccctgtttttttgtaaaacaaagatatactacaaaatattaacagtaattatccatgtggtatgattatgggtgatttttactattttctttcactttttttgttttctgcaatgaatgtgtactgcttttacaataacataacaaacatatctatttttaaagaaatacacatattgagttcaggaagcaaggtttctctggaaattcagatgcagtcagcrtggtgtaggatgcagttgtgtgatgctaaatgagaataccaagacaaaaccctcaggaacactaacatttaaggaatgagattaaaataatgtaagtaaaaattcaaagaattaggggacatctcagagagaaagcagtgtcagagaagtcctaggaagtgagatttcgggaagaagggtctggttaacatcatcaaacagcagaaaggctgagtaaagaaaaggccaaggaacttgtgttggcatcggtagcatggaggccattgatagatgggagccacttcaatgtaggcaatggacacagctgctagggacagaggggagatragtaaggtctcacagaccttgggtaaaagagaaagagcgtgactgtgcagtaactagaagcacacagtgtgggagatgattggttgtccagcgagctcgtctcagtccctactggtgacatactctactgttgcatttctctccatgatggcaaggccagatgatytggatggagtccatgtggtgcatggtgtacctgygctytccgaagctccgcagcctgcaagagctggaagaactcaatatgcatctttctgacatcgcccccmacgacaccaccagggatctcatcctcctgaaccagcagcggctggctgagatagagctgtccaaccagctggaaaggaagaaggaggagctacaggtcctctccaagcacttggccattgaaaagaagaaaacagagaccttactttatgccatgctgcccaaacacgtggccaaccagctgagggagggcaaaaaggtggctgcaggtaaggcamcctctcctccacagcgtcctctgagcagagcgtggtatgtcttagtggtcagggccacaggctttgaagccagacagaagtggttttgaattctggctctgtcacttgtaagtggcatgatcttggggtaattactccacctgcatattctcagctttgttctctctacattaataataataataataaaaataatacaggagtgaaacatgaattatataaaaatggttgtcaactacacacacattaaattctctaagaatttaaggatatgtcctgagactggcctcattactcagtgacaatgagtagggttcttaactwtaactagaaataatacactcgcacactagttaaatcatagggttcctctgaggaccattctgggacagtatactatttatggaggcagggatgctgtgtttaccctgaactcactttccgtttgtcatgggattgtgttcattcaccagacacgcctggtgaacttactctgtgccagggtgctgttccagatctggggacacagaggagtttacagcctcatgagtttgatagatatatgcagaataaattaatgggggtggaaatgaccaaaggaaaagaaactaatttgcattaaggagcaattattgtgccaggatccatgttagacattttacatgtgcagtttcrttaaattttctcaacatttctatgaaggaggtgttgtccataccatattgctgagcaaattgacattcagcgcagctgataaatgaaagaggtggaaactaactgcgttaaggccatctaactccaaaatccatactctttccatcacacaaggtgctatggcaacatggggacagggaaattaataataaatagatgtcaggagataagagataggggggtgggttggagttgtggaggtacctctcaaaagtgtgtgacacttgagttgggccttgaggctgaatttcagcaagcaaagaggaaaaaggcatttttggagaatgggctagtaagagtcaaagttaaggcaatgtgcaaacgaataccatggggcatgttcccagagcgtggggtatgtggaaaagtggggtctggtgacgctgagtgggtagggtggggttcaggtgatgcagtgatgaatttggactattagggaaaaggaaattgtcttttgtaggcagtgagaattcattgaagtttcttctcttattatggaagtgacaggatgagttttataaatccgattttggctgcagtgtaatgaatgcatgagggggtgctgaaagaccataagggcgcagctgattgatggtagaggcctgaattagggcagcctgaggaagaatcagcaggatttcctcactgaccagatggggaaggtaagacagcggaggcaggcatgggtctgaggcttctcgcatggaaaaatgggatgctttatcctaagacagggccagaaagaagagcagggttgggggagaatgataaggtccattttagaaccattgagctggagatgtctgtgggatactccacacagcatgatcagtggtaggaatcttagtgagagctcataggaacattgtggcatggagctatacatctgggagttattgcaatgtgggcggggttaatcatagactctgaatggtggataagatcacctagaggacaggaagtgagaagagagtggagtattactctttagggaacatctagtgcttaagaaggttgagaagccaaggaaagatataaaacaaggagatcagaaaggtaggaggaatatgaagagaggatgataggccagaagccaaggagaagggaaagttccacaaaggggaaattaccatcagaggcttaactaacaaagaaggcacccggctgcattcaaggagtcattgattcactcactcaatatttattgagcatttactatgtgccaggccctgctttaggtgcttgggatatggcagagatctaaactgacagtctcccgtctcatggagctttgtattccaatggggtggtagacaataaccaaataaaccattccatacaaaatatcaggccgggcatggtggcttacgcctgtaataccagcactttgggaggctgggtgggcagattgcctctgctcaggagttcgagaccagcctggacaacacggtgaaaccctgtctctactaaaactacaaaaaattagccaggcatggcggcgtgtgcctgtagtcccagctactcgggaggctgaggcaggagaaatgcttgaacccaagaggtggaggttgcagtgagccgagatcatgccactgcactctagcctgggtgacagagtgagactctatctcaaaaaaaaaaaaaaaaaaawatatatatatatatatgtatatacatataatgtcaaatgtatggagtgggtggaaggcaatcaagctaaaaggatagccagtctaggggctattttatacagggtggtcaggagagttctcactgagttggttacatttgaaatgtgagtaacaggccctgtagatatttgagaaaagtgtcaggcagaggaaacacctctttttttaagtgtagaagcctgaaggcaggaggcacttggcatgctggagaaaccccatgaggccagtgtggccagagtggagggagccggagggacatggggtcagagaggtggcagggacagaggtggggggtcccctctgtaggccatggtcaggactttgggttgcattctaagtgtgatggaagtcatgaaagatttgagattgaagaatgggagatctgacttaaacagggcatctggctgctatgtggaagttagcatgaatgggggccaaggtggaatcaggggcatgatttaggagcaagtgttcaggacaaggtaggtttcctgccattcaaagacagggacccatcacttcacagtgaccagtctctgtcagccctgtccccaggtctcctgtagctcaggctctgcttggcccacttgctaggggccctttctgtcctcccacagcactggtcacattttactggaaggatttgttcacttttatgtctccttcattagactgggggctccttgggggcgagggcctggtctgcttgccccctgtgatatgattctcctactacgactagcttgcagcgggcactcagtaaacgtgtgctgggtgatgctgaatggggaatggcatccagctacttttcccacaaggcacagggcaggtttgattctcacagggcctcttaatccagaattcatggacttattagtcgatctccttgtttctcactgatacctggtttctgttgtaggagaatttaaaagctgcacgattcttttcagcgatgtagtgacatttactaacatctgtactgcctgtgaacctatacaaatagtgaacgtgctgaattccatgtactccaagtktgacagattaaccagtgtgcacgcagtctataaagtaagtgtctgtgcagtgtggggtgtttcacggtgtgctcacgcagggcgagtgcttgattctaagtctccctttgcctctgtctgcactggtctggggtttggtgtggatgagtgtggggtcagaataaaagctgaaagggaattggaagtattttaggaattctagtttttagaaattctttttacaatgctcagtgctaagatggcactctggtgcccttgaggggcacctagatgtcaggtgttttcatagagtgtagttctcctactcctaaattcagcagaaaatcgaatctaaacaatgtgttatctcatatatagcatcacatgactaccccaggagcttcgtcttttctgggatttgtttccaccaaaagcagaaaggccttttggctctctcatggttgtttcctgagtccttttctttctcacctcctccctcatgctcctcatacccttagcaaagaatcaattaccagctttagtatagtccctttgtctatatatggaaaatgaaaaaaagtgtagtgacatgtttagtgcatgaaggaatccctctgaatacctatttttttttccctgacaggtagaaacaataggagatgcttatatggtgrtaggaggtgtaccagtgcctattggaaaccatgctcaaagagtggctaattttgccttggggatgagaatttctgcaaaggaagtgacgaatcctgttactggagaacccatccaggtagagagcaactgagtacttggcttaatgccaaacatctcacacacaaaagtagaattctgcttatgtgcttaggtgattactgggtaagttgctgtcattaaaatgggtaatgtatcctagcccttttcttctcttgcatrtgtccctaatagagatattcctaaggctcctatagtctcaacttttctcaaatttcagaggaggctgcggtgctcaaggttttcctacgattgactgcaagcttcctttgttggtaattcaggacagtgctgagcagttcttcctatttacctagcagggctcaatccatcttaaacaccagctcatttataattcctgcttttatgttcaagcatttcaacaagtggttcaggtttaatgagcagccaacttttcctgcttaggaaattgtgtctccaacatgccatctgacaggttcagaactcaggctgaggtgtgargctgcctgcagtcagcaggccaggcaccgtgatgccgtaagatattcagaatggctttccttccaccaagtggccactagcgagacatctgctcgcctttctcacagaaaagtacgcttccaagtctggaagtttgttcacactctaaaagttgaacagttttggagrtgaaaaatgaatgtcctcctccgctggctcagcagatcctaatgctcctgggatggctgagagtggcgtctctctgcctttgatttctaggtccttcctctgctaatatcagtcagaaatttaaaataaactagtcaattcaaaataaacaaagccaattataagatggaatatgatttttccacattataactttttacaggagattctgaaaatctgctgcactcactctgaccatggtgagttagaagctgagaaacagtgcagatcatggctacagcatccactgtagtcttctaagtaaaagctggccttagatagtcacaagaacaagatagctgccataatgactcattgtaaacacagtgtgcatcagtggaataaaaatccaatgtaataaataaaaaatcaggatgagaggcaatgagggaagagatataagaaggttagataagagataaatgtttcagttaaaggatgcttgtgtaagtcactggtgaaaaataaaaataaaaatggaaagcatagtgtgcgtgtgtgtgtgtgtgcgtgtgtgtgtgtgtgcatgtgtgtatgaaaggggyatagcgccagagatgaaaataatgctacaccaataagaatgaaattagacaatgaattgttggaaactctcaaggtggatttaccaagaaaaaaataggaaaggatgttagcaattccaaggtaagactatggacataattaggagcatcattaaatatccaccagaaacagcatatcatatgggtttattcaaggatgtaggggagagaactggaaacactttctctcttaacagaattgtgcaattattttgcactgagatattctattattttattcatatagctttaatatacatttactgagatccatccatgtatgagacagtattactaggtgctttgaagggttcagagaatcctgttttcctagagaaattataattttatttcaagcagaagaaaatctagcaagtaaaaacaacaagcaatctgattaggatgtagaaagctgtaagagactgttgttcccatgctagcagttttttttcccccaccagaaagcaaaggaatcaaaataaactaaattccaggaagtgacaaacctttcaaagagaagacacccataattgcattcaatcctggcagggcagcagaagaagtaatccaccagaggtgagggtagggataatcccgtctaaattttagtggacttttaatggtcacagggctgaaacaacaggttagaatgccaaagagtcccagccacagagtctgtacccatctaccaactcttcctcataggccaagtgcaggggattagtcagccaaaaactaggacaggagaggagagctgagagaactcccgagtccctgaggtgtttggggcctttcccaaatgcaaagcagtggcccattaaaggctaatgttagagtaagagaactgagagaaatccaactgaagtactcttcgtcttcaccaagtacactacgatgaccttttgaagtatgagggcaaggaggaatggcagagaaaattttcccaaggtgcagagagccagggtgggactgaagagcaaagagacttctgaaaatctcactgttgggctgtaatgcaggaggagatctcctacaactccaaaagctgtggattggctrtacagcattcaaggtcctcagagtcttgctggtgctcagattctaagctctgctgtactgaaagttctgattcagccttcataatatttgaaaccagtggtgcatggaatctaccaatatttctggaaaagccctgacccaactcaaatatggattagatttacttactgcccattccagcagcctaattctgtagggatgtaacattttctggtggataaatattatctacttcagtctctactgtattttcacacacaatatgggtcattcaattagataatgaaaaatatgagatgcaagaagcaacaagaaaatagtaatatagtggatagccaatagagaaaatagtcaatagaagcaggtccagaaatagcctagatgttggatctttaaaattagtgtgataaatattttaaagggtctataagaaaaggggcaaaacaagtgtgaagatatgggaaatacgtacatactgtctatatttacatctatatctatatctaacagaaaactatgatatcagaaatcagaaataaagaattaattttatgggctcaacraagactagacacaatagagaaaaaaatcagggaatttgaagacagagaaatagaaatcacccaaactgaaatgcaaagaagaaaacagggttaaaaaggggaacaagacactctatatctgtaggacaatatcaaatggactcccatatatgtaactgaaatgctagaatgagaacagagtgagaatgggtaagaagaaatatttgaagagataatagttgagaatttttcaacatgaaggatatcaatgcacacatccagagctcagcaaacccaagcagaataaatacaaagacaaccacttctagttaaagcataccaaaaactctacccagtgaactaaggcaagaagaagaaatataagacattaagtttggaaatgaatgaagaaataaaattatcattattcacagaacaaataatggtgcacctagaaactcttatacaaactacaggaaactacaagatctaataaatgagtttagcaaggtcatagcataaatacaggaaaattaattaaatttttatatgttaaggacaaaaaattgaaaatgaaataaaaagaaaataaacttaattaaatttctaggagtaaatctaacaaaagatacatatgacctctatgcttaaaactataaggtattgcttagggaaattaaagaggacctaattaaatagagagatataccgtattctttggaaaactcaatatatttaagctgtccattttccccaaattgatgtatagattccgtagaataccaatcaaaatccctgcaagcttcttagaaaatattcacaagctgattttaaaatttatatggaaatgtaaagaatctagactaacccgaacactcttagaaaataacaaaattggaggatgtacacarctaattttaagacttattctaaagcaacagtaaaaaaaaaacagagtgagattgggagaagaatagacaaagagaccactggagcagcacagagtgtccagacatagactccatgtttagtccattgatttttgaccaaggcaccaaataattgagtggggaaggcaacctctttttaaaaaatgattctgttaccattgaatatcatgtggaaagaaaaaatgtacctcagttctaccttaccccatatacaaaaaaaatcatttgatatatatcacaaatcgaaacataaaatctagaatcacaaagcttcttgatggaaataaagaatagcatcatgactttggggaaaacaatgatttttttttttttagataggacacaaaaaacactgaccatgaagggaaaaaaatgataaacttcattgttacaggctgaattgtgtcttgcccaaaattcttattttgaaactctagtactcactacctcagaacatgactgtctttggagctagaggctttactgagtaaaatgaaaccttaagagtaagccctcatccaacgtgcctgatgtccttataaaaatatgaaatttggacgtaaagagacactaagaatgcatgtgcacagaggaaggaccacgtgaggacacagcaaaaaggtggacatctacaagccaagcagagaggcctcaggagaaaccaaccctgcccacagcttgatcttggccttccaggctccagaattgtgagaaataatttccattgtttaagctacacagcctgtggtattttgctatggcagcctaagcagatgaatacattcatcaaaattaaaacattctgcttattaaagaaaataaatacacaaacccacagactgataaaaatatttgtaatacatacatattacatatccaaatatgtgtacaattcatacacattaacaataaaagacaaacagctcaatttttaaaacaggcaaaaaattgaacagacttttttacaaaagaaaatatatgaatggccaatgtgtgtgtgacagtgtgcctaacatcattagtcaccaatttaacgcaaattaaaaccacagtgagatatcatttcacacccacgagaagaccaaatgatggtgaaaatgggaacaactgaaagtgtcacrtcgctgatagaaatgtaaaacagtaaaacaactttggagaattgctgggtagttttttggcttgttttgttaaaaaataaaattaaatctgtatctaccttgggactcagaaattccacttctaggtatttacttaagagaaaggaaaacatgtctacaaaaatatctgtacaggaatgtttatagcagccttaattttaatagattcaaactgaaaaataatctaaatgttcatgaaaaggagactggataatgaatgtggtgtattctaacaatagaatgctattcagtgataaaaataactactgatatgtaagacaatatagatgaatctcaaaaacattatgttgagtaaatgaaaccagatataaaacagtatatactataagattgtacatatgtgatgttctggaacaggcaaatcattctttggtaaaagaaataaaaaaggccaggcgcagtggctcatgcctattatcccagcactttgggaggctgaggcaggtggatcgcctgagttccggagttcgagaccagcttggccagctggccaacatggtgaaaccctgtctctaataaaaatacaaaaattagtcgggtgtggtggcgggggggcacctgtaatctcagctactctggaggctgaggcaggagaatcgcttgaacccaggaggcggaggttgcagtgagctgagatcacactgcactccagcctgggcaacaagagtgaaactccatctcmaaaaaaaaaaaaaaaaaaaaaagaagaaatgagaatgtagttatctctgctgaagaagatggggagagagcttaactagaaggggcacaagataattttgcaaggtaatggaactagtttacattttattttgggtggtggttacagggatataagcacttgtcaaaactcatggagccaaacactttaatatctttttttattttatgtaaattatatctcaacttacaaataaaatcaagagtattagatggtctcttttcagtgatgctgtctctgtacagctcagagtggggatccatactggaccagtcttagcagatgttgtaggagacaagatgccacggtactgcttgtttggtgacactgtgaacacagcttctaggatggaaagtcatgggcttcccaacaaagtgcacctcagtcccacagcctacaggtagccttccatttattcatgccttcctttgtcccttcctctttctagaacttacagagtgcctagcagccatgggttggggtagtgcaggaaactcatgtttttccttccatgtctcaatggcttacagaagatattgtggcagataataaatttagttgagcttctaactgtagcatagtttttactgtcaaggagcatatagtttagttcagggaacagcaaagtataaccccacagaccaaatctagtctgctgctcatttttgtaaataaagttttattggaacacagccatgcactttcatttacatatagtctatggctgatgtcatgctacaaaggcagagttgaatcwctgcaacaaagaccatatgatacacaaagtctaaaatatttactatctggtctttatttatataaaaagcgtgctgacctttggtctagcagaagaaaaaagaaaagttgtagttgattatttttaaagtgagataagtacaatgacaaatatgtgcataaaacaatacttatagtttcttgagcacttaaaataggccacattctattctaaattcttttatatgttaattcatttacagttgcaacagctctgtgaagatacattattattattatttacatgaaagaaaaggcacaaaaaggttaatcatttgcctcaggaccaggtaggctaggaaggagaatagcccagatgcagcccacggagtcagagttcagtgtcccccctttaactgctgcactcttatcctcaaggtagtcaccgggggtgtcatgagagcccagggcaagggtgcttgacccagtaaaaaagggcttcatggaggagattcctgagctgaatcttgagcaaggagttccagagtaaaatttagccaaaattggggtattgggagtaaaaagtgggtagaggctcacatgtagaataggtgcagagaactataaacacccgaggttttctgtattggaaaatatgaggcaggagcagtgagagctgcacatgccttactgaagggcaagagccctatgccgtaggtgaggaaaagcccccaacgaatgtgaggttgaagacagtgacagggtcagggtcctatttgacactgaccactctagagaccctgaaagggcatatttgagaaccagaaaatgagacagatgagacctgttaggagtttggtctgaatcagaacattagtggtgggaatatgggggaaaataaaaccagctaaagtagttagaaatgggggatgagaagaaggggggagcccgggtctccattctgggtgactagggcttgaatggtggcctggccatctgcaatgggacaaatgagaagtatcccagatcataggggcagacaatgagtttaggttggacacgctgggttcaaaggaactgtggaacattcagctagaggtgccataaaatggatggagttgagttattgaagatccagacttggagtaagcaacatataggtggtaataacagtcatgagagttgatgagatcaacccagggaaggatgcagtgtgcaaagaacagtgggaaaagaatggaatcctgtgcagaaccaatatttaagtggcacagaaggaagaggagcccagggaagagacaggagaagaaatactcagaaaggaccaggagagttgagggtgagaagcactcttgtggatgactttaggaaggaagaattgaacaaaaatgtcaaatgtagtaataaggactgaaaaatactcactagaggttttggggacattctcaaaagtggttgtagtagaatggtgggatagacgttgggctgaagaataaaaagaggagaaagtttgcatgagattaaagcaggtgagaggctrttttgtttgyttctgtttaggatggaagagacataagcacactgaaaagcagaaggagaaaggcaaatggaatgggagatgaagataagcgtggggtggccaatggagcaaggcccagaggtggtgggaagggggtgagggtgaggagaccctggacaagaaatatacctcatcctcggagattgggggacaggatggtgtggtcatggggtgagaagtcacaggctctcacctgtaatcaatgtaattttgtagatgaatcagggcataargtaggaggcacagccaccagcgtatgagtgaggggagcagatgccaaatggaggcccatgaggactgtggtgaaggtctgaactctctaccaacctggccaagggcaagggaaggctcgatggagtgccgaggcaggtggtcatgaatttgaatcctcattggtctgagtggttctttggcttttctctaacatcacttggtggctagtaaataaataaacagggaaacgttttgtaattaccccatagctctgtctcttttcatggtcccttccctatagtcctcctcttcagttccttggcagacagaaattgtggtggagaaagcttgggtagttaggatgagcatagtagcaagcatggggtatatggtgcacttggggaagatggaaagaagagtgttgatacccaagagtcttacgtggcagaaacatgaaaggtggtgtccacatgggcactgacagcatggtgtgtagaaacgtgagagatgcccatatgagggttgagctggagggaggaaaattggtggcagggttgggagggttttgatgggtccctgtgttctcttttggcctttggcatcctgttcagaatatctcatcctcactttccccacggcctctgtcctgcttcagcaggcagatgtctgggatcttccctcccctgctgttgtgtgtcctgtgtcctggacttttcctcttgagtagccctttgcattgtagccaactcttgagttacagacccacaatctttgatatctgatgcactttttttctctgtgcagagccttgaaaaatcaagggtttaaaatcattgagaggggtgaaattgaagtgaaaggtaaagggagaatgaccacatactttttgatccagaacttgaatgccacagaggatgagatcatggggagrtctaaaaccccagttgatcacaagggtaagcaaaaaagagaagctttgtcattagtgttgagtagtttttccactaaccacttcagatatgtttattatttgcaggktcaacacagaaagcatccttgcccaccaccaagctccagggctcagttcaaccatcttgccctgaacactcttctcttgcatcctggttattatgacgttctttgagctgggccratagatccagctgaagagttctacatacattagtcttcaaggttcttctctgggcrtttcccatgcagctctctggtagctggggaatgatttgtgagtgcttcctctgctccacagcctcagaggctccagcacaggcttccctcgcgtgctggaacctttttcacattttgttctagcttccaaaactgggatgagggacaaaatttgtgactcacccagctccaggaatgacaagagggtgggagtttagggtaaaaaaacccagtactaagctggaccagggattactgtttggctcatggtacccccaaaaagaagctggaatccaatggcgagctctccatcagctgcaaggctgatcagtcccacacactcagggtcccttagccacagcctggctaagacagaagtgctgacctgaaggggaaacctggtaataggaggcaagcctttctgaacctccaagaagggaatgaattccttctgacaggagctaatctttagccactccagaggcccacaaggggaatctcaaagtccagaggttccttatttacacagctattacacgcagtatgtctctttgggacatgtggattatgatgactatttttaaaagtrgggctatcccaaagaaaagatggattatttgaagaatttttaaaattgttgtcataatgctttcattctaatatcagctcactgtagtatccctgtgagctatagttggtttaggccacattttactgttgtagacactgagatacaaatatctaaataaaaaacaagaaataactttggtaataaggacsaggagcagtcctcattagaggttttagccccagaatttccaggctctgggcacctcatccactgctatctcccactccctcccacccaccatcatgccagccccacagtacagagggtttctagagagaaggcaaacaaacatcccccccttttctcttcttcgttgtcaagaaatgaacaaagtaaagtggggagggggcatcatatcacgtgatcattggagaggggaaggcagggctggaggctttggcacaggacagggcagatgggtctcagctgtgcctggctgtaaccccacactgctctctcccactcgttcrctgagggttcccacacttcttagagaaacagtattccggagcaaggtctgagtcagtagaatcaaacccactttcagttctgagctagggaaaagcaaccctgagtagaaagtgaggaagggtgcctcaactgggagccctcagaatggagcctgagaaagaggagggagggtaggtgtgaaaggagggcaggggatagcagcccccatcccccgaggccccagtcagtgtctctgtgcaaattaagaacaaggacccctttgtgggctatggggtcgacagcccccagacatggcttatcatagaggaaaatggcaacctctgtgtggactgaggtcagtcctcaccctgaaccccttggccaggtgcctccatgtagagaaaactgcacaaacatatatgtggtcccaggaaggaaggatcccaacccttttcatgcttctgtgcatttcccagtcccctctccctttccccagcagccttggatttcctgctgtgagcctcagccaccaggctctgggggagggtgagtctgtctctccctgcctgccttcatctgcagcatgggggctctagcaggaaggccaggaactctcaggggagacctcatgcagatactgcttcctaaggaaccccattaacttccggggtccagggtgttttctcccagtgaccactgacatctccatgaggcaagatagagcctctcaaagacagtgatgggggaggggcatggaaacactgttatgttcactgatactcttttcacatgggtctattccctcagattatctcccatgggacacacacgacttttttgggggggttacttagggaggagcagcagcgagggcacttcagtgattctagtgtgcagtcagcattaagaactatgtctaagaccaaagcaatgcagaagaaagggccctgcagggtctttcttgtgccccactccaccctagcacaaaaagacccagaaggtgacagaaacaagaaaggatagtgtccaggagagctcttcctcaaatgagcctcctctcctccacttcgttctcaagacagtgcatttcctcgttctaggtaatgagtacatgaaacacgttaaatgtccttcagcctccctaccacgacatccaacagctggaacttccatccagtccttcacatgatgggcacctgtgggaaacctgccaggggcagccgatgttcagaggcatccaaaaaaagtctcccacttcggcagccatgaagcccactcatgcaaccgtcctcacttttccttcctctcacggttttttgcagaagcaagtgctcagggaaatgaagacaggagaactgctgccgtcatgagctatgccgacagtcagcagctgatccccgacagaracgcagcagatgcagacggtgagtgcagcaggcctggtctaaaatacttccagccttgcattgctcataaagacaatcggacacttcagaggtcacttcayaggcagtgagaaagagccgggaagggatagcacaggtggagtttggtgtcccggggcaggacgctactgacttgcttgctgtattttgaataaactgttgttttgagcacccctatcccaggtgtcccaagggctctcattccggcagggccatctatactcgcttccaaaagaatctctaataccagaaaaacgtattactttctgtgcatccacaaaacaaagtttctctggacagcgtggccctcagtagcttgccttgtcttgctaaggagagctgagacttcctcttcctgcactatctggtgctttacagagacctcagggcattgacacttccgcagagtagcccagttactctcttctccactttgtcctgagggtcgtagggacaggagggtttgcttaattcatgcttattctggacggccttggcagtcattcagctccctcagagccagagccattctcaggactgacaaggcttggtttttgagtatggagtcacaaaggaataatgaagaaccagggatgggtggacaacatgaacccctgtagcagcagctcccccatctttttctagaaccctcatgctaggtgatccrtgtggagttaaaagcggcacggccacagtatagaggggatcacatctcatgcattttctaaaaaccatctctggtcactgagacaatttcttaagacaaatgaaatgatccatgtgatgagttagaacagcttaataatccatataaaaagtctagctctcgttatctttattagacaatatctctaaagttgagtgttgcttgagcccttggcattggcactgccctgaygcccaaaggcttccctctagcttgatcctagaacctgaggttgagggaatgaatagcagcctcctgttcatttcaggtgagaggagacagagcaaaacttctctcactctgatcctggggtcagatggacatttgcattctgggacatgagaagctcaaagcaaagtttttgccattgcctggaggcatttccctcccgtccccactcctctccttcctggagttgcatgtttctggcagtgcccaaaaccctgaatagttgtccaacgtattacaggatagaattataacactcataggtccatttgatagtgttccttggaaaactgttgctgctgcaggaatggacaaagcrtctagtcactgtcctgggatctgcaatgctcactgaactaaacacwtgagattcctgcctttgggcagcttgtggtttagtagagggaaacagacaattaacatgtaactaaacaaataagatcattggggtagtgatgaatgttaagaaaaaaataaaactcagtagagggccagtgaagtcttctgagagggagcagcatttcagctgagacttggatgaaggaagaamccccatgtggctacctgggtaggggcttccaggcagcgctgtgcccaaggcagaaacagccttggcaagttcacaggagacaagaagaccagtgtgcctggaaagggctgcaagaggaagggagacatagggatgaaatcagacaggtgtgtcggggcctgggacagtcttggccttgagactgcttatcaacgtgcaaaaaagcatgagcatgaaataaggggtaggtgaggaggcgctggggctcccggagaccttcagagggagaacggctctgccatttgaattcctaaatggcggttccataaacagttcagaagggaaggtctaaaaaactctttatgctccaggaagatgagtaaattaatttttcaaacttctgctgcgtgggagatggggaggtcctgccacagggaccagcagggctggatgtcttgcttagaggtgagagatagaaatttcacagcacctcttctaactgtggctttcctggacaaaaagcaacactgaactagagaaggaaaaattgaggccacctcagttttggggggaaactckagcggtgaactggcatttttttggcaactactttgtgccaggcattttacccacattatcttatttacacaacagttatataaggtcccacaactagtaagtggaagaaatagcatttgatcttcatttcagacttgtttgtctagggcagatcaygtccgtgtgagttcattttgagcatcagaccaagacaattccatagtttccctaagtggtggccactgcacttgaactgcttgggttgacaatggcccagccatttgtctctcagatcctctgggccccatctgaacagatctctgattgttcggtgtgattagcaggtgtattaatgaggaagcactcccacactgtgggttcatgacagactggtgtgcaccaggagtgccactggacccaaagctacccacaccgagacgtactgaaccagaaactgccctttcacaatgtgccccagtaatttgagtttgggtttaccactgacatgggcttcttcctcatctttgacagttggcagcagacatagaatttagcagtggaggactcatgccacctgctcatgggagctgcctcttcactgtggttcgggtcccggttctcatgggttttcaggtctagctaggtctcctatatcatgcttagctctgaagtcagtgaaggctgccagagggtcactgtgggagcccccagcctcgtcactacccctgggccatcctgcccggcccctatgtgggcatcgcgatggggaagtgtctgcatcagtagccatgacctgtcaggactcctcagagaccaacctgcttctcaggctccaggcagctgggtggacgttcaagacttgcttcrttcatcatctctgccaccaatctcaccaggtggtcacctggctgccaaacatgatggctcttcagtgscacaccattccatctgacttggccctcttgggtgggaaacgggcactcctggccccctctccccggagaggaccgtggatcctgacaaagtatctcagagtcttggtagcctgtgcagctgcagcgcacctagacttctctctgctggccagctgaggcctggggctcacgcgtatctcgaccctctttaaaaagggggccacagggagtccctgcaaggcccaaccaccttctgccagggcagtagggagcgctcagcgggacccaggcctgcaggctgcatggaggacctcatttgcacttcaataacatgcttttctttcacttaactatatatcttggtgttagatttgtcagtggagagactcccyagtgcaattaaacgggagtattgagccggagagaaatcagtgtgtgttgactcagatatttaagcaaccacctttcagtattgactcagaaattggccttccagctgtccctgctggcagactcttctggcatctcgtcaggccgctgttaatgtgtttttcaaatttcaacttgcttcaacttgtctcctaactgatcctcctgttgatgacaataatggtttccaggctgacctgcacacagcacttaggcaagcagcccaggcccctctctggaggcgaccccttccttataaatcacagtcagagggcgtctgcttgctgggttcatggcaggttaagtcagcttgggggacttctcaagcaactcctaattgttcctctggagaacttgagtggtgagggtctctctcctgatgaggttagactttagcggtctgctgctggaggggttgggttgctgattccctccaaatttcactcactcttccaaacaggaagaacttttccaccatttgcagtctccctgatgagtaattattggatgggtttgtggtcacttaattaccagggcccttgccccttgctttacagagtcgtgactatacgagcacctttcccagacgtggccaattagggggggcccagctggtttggagccaggcttctaaggaaggctgggtccctgttctcagctccgagccctttctgcagcctctctcagtccttcctaagtgtggctgtcaaactttgctgacctttcycccttggggctaatgagtgtcacagctatttttaaccttgggttttctagaagttgagcygttaacctakctcctacagaaggaggatcctgggaggtataaatgaactcttcacacacaaggaggtgactaatggaggaacataggattttcagtgtcagggctagccttgaagttttgtgttgacacccttgatagcatcgaccagatgtcaaatcagagctggtcagcacaggcggcatgggtgggagggcagccagaccatctgtggaacaacctgttsatagtatagacggctgagcctcacctgagagggatttggcaagtctgcagtagggctgtgactggttcgttaaccaactttataggggattctgatgagccaactggcttggggatcaccatcgtgatggaaagggcaatagactgaaatcagaattccaggtcctggcagtcagcgacctgtgtgttacttcgggcaagtcctcttcaagacatttttctcatcctgaaggcaggggtaatggcgggccttcttcacagggttgctttgagaaatagatgagatrgtatgtagcacctgaaaacagcagagtgtcaggtgtgcggactgctgagtcacttgggcattcattcgcttaacaaatatatgggtcttaacacaaaactgtaagaggtactgcagaggtttktttttttttttttaaatatgatctgttgtgtgcgaagagcttcagacaaatgggacagaggaatccacatgggaagtcaggctcccagccttgtgcagggcgctccagcatgacagtgtgcacaagtgatgctgaaacacacactgggatttggaaaacctcttagacaaggtgcatgcaacagcagaaacaagaatagscaaggatctgctctggtctctggaaaatgtggggacttctggaagctgggaatttatttcctgcacggcatggcctcttttgttcatggatggaaagaggcaaccaggcagtgtgatcctagaacagccaccccttccctcatcctggaaatgccactgcactctttgtatcgctagggtagaagtatacactcactggtagaatttcccctaaaatttcatttttggaatttgtgtctcttttgtctgttcacacatcccctgctcttcctctaggatgagggtgaacgctgggaaaactgagatggaagcaagtgggagcggtacagggctctgcacaagtggagaccacacagagcaaaggccagtccagggtggggagagaggtgggacggtggcacaggccctgtgctgtcaaggaccaggatggggtgaagcggtgaatggggtgaagcggtgaatggggtgaagccgtggtggtgcagggccctggagaagactgagtgcctgatttcaggctcaggccaaaccctccaccccagtcgtggagaatcagtgttgaaaccaagatgtggtcttccatatcttattctgtttagaaggttagaaacagatgcagaaatgctatgaagtgattatcttaatggcaawtgtaagaatccttcttgtaaccccatatcatatcgtgtatgactcatagagcctgcctgtgataacaggtgatgatccacatcccacctctattccccaaggcaacagcatttcctcacattccatgctgctatcgctgcagccactaccacccccaactccccarcctccaagtttgtgtttgacaatctcacatgataggtgttttccaaatgggaagatttcttctgcaaccattcttttcatttaatctgttcttgatctacattgagatagatttctgtgctgattttaatactgagctatgtgatttttccaattaaagactatttgtttatttgtattatagaagaaatatttaatttttaataagtatggataaaccaaaagaagaaaaccaaagcacctataattacatcattcagagagactactattaaaatatgggtcatatcttccctgacttttatatgggaggctgtgtatatgtgtatacagacatgctttttcttacaaaaatggaattgtcatgtatatactgttttgtaatctggcagggcatgaatttctttcctttgaacatttaaacacttaataatactgaggaggataattttaaaaagatataatgtgcttcacatggtacccttatttcccatgtgacttgtgctattacatacccccaaaccacttttacattgtaccaaatgaaaatcccaattatcttatactacccacatctacaacacactttggtacccttgatgttccatgagtcctgaagtttcctctaaattttccaagaaagactaaacttgttcaagttagctttggtgcttagagtatcccaggtgtctagatgtcagcaacacatggaagatgtaccttgtaatttctattaattggaaaatgtaattaaccagaaggctacatttcccaactgtgcacaacaatgagcattaactgtaacaaaatgatggtactcataggcagtccttgggggttgtgaacaatggttttgtgggagcgaaagatgatggacgagaatccatctcaagtaaacaaaattcttccagcatctggattgtggaactgaattggagtagaatgtcaaacatatatgtgtgaaaattccaagacagccttgcagttctgcgctgaccaagtcttgtttgaattgtcagaggcrtcaacccaaattgatggagtcaggtttggcttgtccaactttcactgtgctgtttcagttcattttctcagcacagtcctagctgattgtcctttctgtctgttctctgttcactctttagggagagaaaagggaaagaagaaaatgaatttaaaggaaataggagtagaagtggaggagatggaagatccagttaagatacaagtgagagaaatgaaaaatggtcaggctagaagagagaaaaatgtgctatgaggcaggagagatgaatcaacgctgaaaagctacatttctgagaagagaaattgcaaggggaaaaaattagagtgttgaataaagaggagacgaagatatctgtaaaatattgtttcctagtgttgagcttacttccaaaataccttatgagaggttaggccagaaaatagattattccttttggttacaaagaaatcatggtgctctcaggaagcaagagcagatcatgaacacagcctgacagctgctgggtacagggaatggtttcctttaccgtatttctgctcattttagcaattccagccctttccagctcagttttcattttcactagagtgacctccacttttcatacaattacaaacatacaaaacaaataagttctgggatcacaacacttttgtggatatttttttctctcaaagattcttataacatttctttgagttgagggggagacagatgtgttgtgtggtgttgttttacatctggagaaactggggcacagaggagtattgggggagagttcagctgctctttgtagtgctgttgggtggtgatggatgtggaggcagatgaccaggtcttctcaacagaaaaaaattacacttccatctgtaatcaactcattttttctctatttgctatgatgacaaaacaaaacggaacccaaatttcacaaatacactatttttatcatttaacctgcatgtttccatttttgaaaaatttagttctaattataatagtttttacatctcaaaaaatacaatactgcaataaactccataattcaaaatgaaagagagtattgggaataataaaattagtagagaatcagcaaaaagcaaaaacaaaacaycctgtatctgaataagtaacagtttccaaagagcataaaatactgctgaatataattcagtcgtgtgtgtgtgcgtgtgtgtgtgtgtgtgkatgtgtgtgtcagagagagagaatatgtaatagcaatcaaatgaacatatagctaatgatatctgtacttagctaactctggttgcgccataccctataaaatgtcacagttgagagtttcatgaaccttgattccttttcagattggccccaatatatgcatgagctaaacgcttcctgtaaatcattgctggaagttgcctcagtgacatggccctacatgtcccaggaatccccctttctctgctccagggccctctctccaattttcacctcattctgggcctgagactgagatgagactggggagaggtctggtagccccaaattttccacatgtatgtcatcactgacattcctcaatgagcagtgcattagcgaatggagcctgtttctgtctcattgtttgtgctcttaggatcttaaaacaaaaccgatcactaatccaggttcaggatgaagtctgagtgctaacagcctctaatagtggaaaaaaaaaagtcatccattattttgggaagagaaggccgaagacaggagcccctcttgatttcccgctttctataatactagatgtacgtgagcctcagacctaatacatgcgcctttctgaacttgaatatctctgggacaatgatttatatttttaaaaaaggaaatggcaatgatatatgactttaaaatctcagacgctgcccttccaaatgaaactgcagggaacgcgggaggagatagattcagtgtcctccacccggcctctatcccattccttctctgatcccactctctctcttgccttggctcacagtcccggaggcggtttttctccagggccttctcccagggctccctcccatgcttagaaatactaattggcatctttgagtttgtgctctatggggcattgcgtgactcacttggtataaatcatctagtttaatgatcataacaaccctggarggcaggtgttatttctccatttttcatatgaggaaaactgaggcccagagagcttcagtaactcatccagggttacaggtcaagtagtggcaatgctggctctgaccttcagcctccgtgtctgctgctcagaagtcacagacagccacaggccagaagacaaggagacttggtgctattgtgtgagttatgcagaagcaaagatgtgggtatgaccaaaaagatggcacagggcagttcaaagaactcatatagccacaaggcagtggtctgtccgggctgtttggccttggctgtgaagaattcttcctgtccaggatcacacygagtagaaaaggaggcccgtagtgtccacacgtgttccccagggtctggcccagacagacagtctgaggctcgatcacttgctcacccctctgtgttctttcagctcctgatgaaatcatccctgtggggagtgcagggccagatggggactccatggagacagccgaccggcgacagccttcagctccgacaaagacacatcaccttgcaaatgacactttgccgtctggtttctgtgttttgttgtaacaggttaaatgaacccctgggcttaattttccccctacttagttctgtggcagcaaagaaaagtgacttcttttcatttctcagctcaaaacttcttaagccgtgtctcttcctcatcatccctttgagaataaaagtctagaaatgaaacacaatcctgacaagtttggaaaatgtgcttttatattcttagttcaaagccaaccctaaactttgagattttgggtcaaatttgttctcagagacgtaagttcggccttgaggcctatttctgtcttcttctaacaggaatgaatggcttcaagctctcatcactatggttccactgaacctttgcctgaacaagagccccagtggctgacaccctgactctggaggctcaccttgttttaaagggtggtgggaaggagaaagggaggaggaggggaaggcggagggggagggggaggggggggaggaggaggaggaaaaggaggaggaaagagacccaggctctgcagtttataaatcaccccagaacacagccgggctgtgaaaggcactcagccagaagttgtgaaagcaaataattttcattccctgccctgggaattacgtgaagcaacagaacaaaagctgcattccccagagattttctgaacgtaaaatgaaagggaaaacatgaaaatcaccggaaaggcagagttaggaaagctaaggaaagaaggcagagcacagccaagacacctttggccggttcgtctcctgcttccagctgtaggtgcagaataccttctgcaaagaagagtgttggaaatgttctcagaggccatcccaactaggagaagcgaggcatgagatggggctatgcatctgcatttcgtgatgataagaaaataagtattttttttgacctagacattaacgaaaatcttaagggcacacaggagcttgtgatccatttaagctagtaccttacttgtcccaagaggcattaactgtctcagcaattcccaggagggcacaggcaggacctggctctgtcttcagccaatcccagggcctggagacaaagggaaagtgacaagggttgaattccttgctgcaatctttctagacagcaactgtgtttggtgtctagaaatggacaggtgtgacctgcagtccagcgggaaacagcaagctcagattagacaaagtgcagagtcaagagatgggggttcttgcccaagctttaccacctgatacaccagctataaaatggggttagtgacagctgccccacctacctcatagttttatgtgtgcatgtgtgcgtgtgagaattcagtgaaatctaagagcacaaagataatgacaatgcttacagtagtaataaccacagatgctcctccacttacgatgagggttctgtccagataaacccattgtaagctgaaaatacaaaaatgcatcaggtttatatcctgataaaatgtttatatcctgataaacccatggtaaagttgaaactgtaaatcaaactagcttaactcagatgctccttgacacacgacaggattacttcccaacaaacccactgtagagttgaaaaactgttaaatcaaaccatcaggggaccatctgtactaacatttatggagcctcaaacatgtgccgggcactggccctgcatgcatgtatgttacacattacttctgctcctgacagcaaccctataagaccactattccagtccttacttgacagacaaggaaatgggaactcagggagacttagtagcccaagatggcaccactggtgagcagccaaaatagggagcctaaagctcagttattacaccatcaaaagaggtgggaaagcctggtggtatggacccgggactagctgtgcaactttggcaaagttgcttaacatctctgggacttggcatcctatttgtaaaataagggtaatcagagaacctgctgcatagggttgtcatgaagattacctgagatgtccacaaaacgcttagaggcagggccgacactttggtaagtgctccttaaatgctagcattttaaaattttcttaaatgctcctattgagtgactgatctccctgcttaagtggaggcaaggaacgatgttggagctcacgctcttgttactttagtgatacggtttcctttgaaatccttagctctgctgtgagtgagaatcccatacagaacgaggaaccctgttatgtggtagcattgcctgggagataaagagcaaaacagttggtggggtggtggctttctgtttcatttttagaaagaagaaaagccagagcctgtggttttagcccccagctggcagcttgctttgcttccttggccctgatagaatatgccagcttaatgttcatttgtaccgacaactgccaggaattgtgaagcaggtgccctcatcctgggctgaaaatgaagagaattttgctcaatatttattaggagtaaaataatagtttccagctttaaaggaatgactacatctccccgcatttggtgtcaccctggaaactatttattcttttgagtaaacactgctggagacaagcttcaggtgcccaagcaacctagccaggctgatgaagtgctctgtgagcccccagcactcactcgcacgggcaccttcattctctcttagtctgcttctctgggttggaggcctcaggagccctggtaccaagctgggtgtgtgaacactcactaagagggcagattcacttgaaggaggcctgcacctctgcacacatctgcaagtgctaggctctaacaccagcctctggtggtctgtctgatgtccaccaacccccacgtgtggctgtcactccagacaacagacttgtttacaagcagtgaatgctttgctcagcagagcaggcagaatgaccccagaccaagcccctctcagcctcagaatcttcaaggataggagccctcccacacctacaacctgtcagtttcatttgactgcccccttactccagctgcctccatctcaggcacctgttcaggagcatggcagaccaggatcccagcagatggctggtcctgcaggctgaggactgacagactcattcgcctgtggcccacagagacaggcagacattgtcattaggaagaattgaaaacattgttcactgcccctttccagtggggcacagaacttaatcccatggcctctacagcagcctgcgcccctcctctcagcctctccacatcaagccttccaggcaacattggatcgtggaggtgaagttcacggatgtgtgtggaggagacaacaatgtgtcgggtgtcccctctgtctccctgtcttctccttcgtggacatctggagacagttcttggacgctcagggctggccaaggcctggagtctcactcttcctctgggctacgaggacctgcttgttctttacaatcacccgttctcccccgccctttctttttcaccctttctytcttttccaactccccttcagctcgagttgtgtgtgagagaaagaaggcggctcacgtgcccggctgaggaatgagatcatttctctccccgtgtagcgggcttgctgtctgctggtcagggttactgggagaaagcaggccagctcgctctccacagagagccatctggctccaacagactcacgcggatgctaatctattggtttctttttcttttattctttcattctttctttttgtttgctcccaaggaacacttcatctgcagctgtaaattcagacctggccccgtgaaggcgagcgttcattcatgcacttatttattcctgcattatgccccctcgccccctctcctctggtaggtgtcaggaagccattgttatcattggtgggtctatgtcattttaatgtcagggctgtactttcaaatggaaatcaggcaattacgctccacatggagaaatctgacagatgcagaggttttacaccactggccgtgtggcagggacaaaggcgaccagggctcccaggggacggttaaataaatagaatatgtttcaagagtgcagaaaaattcaagaataattaactgcctgatgagagttcatagatcctgtggctgtttatcttcagaatgtgataatgatatgtcaacgaaccacttaactcatccttgtaaaggcagcgttagaaaactgattacaatgtgcatttacacagaggcagactgctctgtgcatctgttttccggtttctaaatgcaaagctttgcagtattttaacttgctctgtttccccctcgcaggggttctggttggagaaagatggaggcatgttccaagtctgatgtctacctgatgaagcactgtcatgtctacattcactgttagctaaccacagtggtatctacagataccagtggtgtgtaatatcagtgttatctaatatcagtggtatccacctgggaactcaaactgaaaaacatggtaactatatcattgtggctattgttggttgatgcttgttttgcatcaagcacccagctaattattctccataggtggcctcttatagtcccgtgagtgtgacgtatatagtattattatccttgtttcacagaggggaaactgaggcttggggctaagtggaagaagtggccttcagacctagctctgcctaactctgaccttagctctcagccactgggccccggtcctctccaatgttccagcaggaagaaaggtaactactcactcacaccctgtataaagcactctcatcatgacagacacatatagttggtgtgaactaaacaggagagatctaataaaagttaaaacttgatttttttccctgacatatccagctgtttaaacagacagttcatttggagcctgaaaaagggtcattattcaatgtgtccaaagctgggtttacattagtttattttataaaaaagtaaagtgcctccaactactggtcattgctctcttctattgtggaggagtcagggagcaggcgagggtgtgtttggacttcagcgccccctgcgcttcctcactaagcagctgccttgaaatacacggaagctgatgccaattagaacacagaaaaaagggaggacgttttatccctcaggaaaagtatgttttaaaccaaacaaatgataaaataaatacaacagatttatgtactaatctccaatgctttctccgatgaatgagtgccatcctgaaagtccatgaggcccctctgtagtgagcaaacatgaatcaaagccagaggtatcaggagacaaaacatctactaatttgctagggactaataaacatcagtcacacccacaacaccctccattataacttgttttaccttgtccaagggtaaagacataagtaaggagactcacaaccttttagagcattagctttgtcttaggtgaggaaaaaaaaataaacatgcttatggaggaattagttttcttttttcatctctattgaacacattggtttgaaagcattagcataataaacttgcgttacaaaaacaaaaagtactattaaagtatcctttccaataaacaccttaattaaaaggattcaaatactagggaaaagcacgaaagagacaaagtcatagctcactcaagaacggatcactcgagagctcaagaaaacaacaggaacatcaagccatgggagggctgatgcaaggtctgggatagtcagaatgaacaactcttgttccacagagaccaaacactaaagaatgaagggaatcaaaacagagagaagaaaacgggaaaaccaattcaaggccagcattaaaaaatctgaagaggatgggcgcggtggctcacgcctgtaatcccagcactttgggaggccgaggcgggcagatcacctgaagttgggagtttgagaccagcctgaccaacatggagaaaccccgtctctactaaaaatacaaaaaattagccgggcgtggtggcacatgcctgtaatcccagctacccgggagtctgaggcaggagaatcgcttgaaccctggaggtgsaggttgcggtgagccgagatcgcatcattgcactccagcctgggtgacgagcaaaacttcgtcacacacacacacacaaaaaatctcaagaacaaaaatcgaggtcaacggccctcaaaata

SEQ ID NO: 95344 - DNA, 30343 bp, Homo sapiens
tcccgagaatcaagtgactctcctgcctcagcttccagaatagctggcattacaggtgcacgccaccatgcccagcgaatttatatatatatatattatatatatatattatatatatatatattatatatatatttttagacggagtcttgctctgtcacctaggctggagtgcagtggcaggctctcgcctcactgcaagctccacctcccgggttcacgccattctcctgtctcagactcctaagctgggactacaggcgcctgctaccacacccggctaatttttttatgtttggtagagacagggtttcaccatgttggccaggatggtctcgatctcctgacctcgtgatccacccgcctcggcctcccaaagtgctgggattataggtgtgagccaccacgcctggcctgtatttttactagagacagagttttgccatgttggccaggccggtcccaaagtcctgacctcaggtgatccactcaccttggcctcccaaagtactgggattgcaggcatgagccgccacactcggcctttttttttgagatgaggtctcactttgtcacccaggctgtagtgcagtggagtaatctcggttcactgcaacctccacctcccaggttcaagcgattcttgcgcctcctgagtagctgggattacaggtgcacaccaccatacccggctgatttttggcatttttagtggagacagggtttctccatgttggtcaggctggtcttgaactcctggcctcaagtgatccacctgtctcggcctcccaaagtggtagaattacaggtgtgagccaccacgcccggctggtgtgtattattattatctccattttacaaatgaggagaccgaggcacagaagaggatgggcttcacacaaggtcacagagctgctgaacagcacaggttatggagaaaaagaagaccattctaccccacaacctcaggtggactacggatggaataaagactcaggaaaagtaacaccatagaatgggccgggcacagtggctcatgcctataatcccagcactttgggaggccaaggtgggcagatcatgaggtcaggagttcgaaaccagcctggccaatatggtgaaaccctgtctgtactaaaaatacaaaaatattagccaggcgtggtggcatagcctgtaatcccagctactcgggaggctggggcaggagaattgcttgagctcaggaggcagaggttgcagtgagccgtgatcacgccactgcactccagcctgggcgacagagcaagattctgtctcaaaataaataaataaataaataaataaaataacaaaaccaaaaaacgtagaatgaagaaatgaaaatggggccaggcgcagtgactcacgcctgtaatcccagcactttgggaggccaaagtgggcagatcacgaggtcaggagatcaagaccatcctggctaacacggtgaagccccgtctctactaaaaatacaaaaaattagccatacatggtggcgggcgcctctagtcccagctactcgggaggctgaggcaggagaatggcatgaacctgggaggcagagcttgcagtgagccaagatcgtgccactgcactccagcctgggagacagagcgagactccgtctcaaaaaaaaaaaaaaaaaaggaaactgtggaagagtcaggtgcggtggctcactcatgcctgcaatcccagcactctgggaggccaaagcgtgcggattacttgaggccaggagttcaaaaccagtctggacaacatggtgaaacccggtcttcactaaaaaatacaaaaaattagctaggcatggtgacacatgcctctaatcccagctactcgggaggctgaggcgtgagaatcgcttgagcctgcgaggtggaggttgcagtgagttgagatcacatcactgcactccagcatgggtgacagagtgagactctgtttcaaaaaaaaaataaagaaaatgtggaagtataagtttgccatatagggatgaaaaggccttcttttgttttgttttgggagatagggtcttgctcagtcacccaggctagaatgcagtggtgtgatcatagcttactgtaggcttgaactcctgggctcaagtgatcctcccacctcagcctcctgagtagctgggactatagtccagtgcctccttttctggctaatttttattattttttgtagagacagggtctcattatgttacccaggctggtcttgaactcctggtgtcaagcaatccacctgcctcagcctcccaaagtgctgggattacaggcatgagctagtgtgcccagccaagcattcttaatataacttcacagtgagttctattatatcaaaattaagaatttccctccaatgaaggatatcatgggtgaagcaaattttcccctgacagagtgggaggacaaatatacaatgtgtaaaactgcacctaggtcatcaggagagttacatggtttaataaataggaagttcttggaatgatgcctggcacataggaagctgtagctcatagctcactgtagcctcgactcctgggctcaagtgatcctcctgcctcagcctcccgagtagctgggactacaggcacacagcaccacacccatttttgtagagatggaggtcttgctatgttgcctcggctagtctcgaactcctgccctcaagggatcctttcagcctcagcctccaagtcactgggattagaggctgcagccactgcacccagcaaaacaatgatgttctaacgcacacaaccttcccttctgcatgtgttagctggcattcaaggatggaatttttttcttttttctgttttttctttttctttttttttttttttttttgagacggagtctcgttctgttgcccaggctggagggcagtggcgcaatctcggctcactgcaagctccgcctcccgggttcacaccattctcctgcctcagcctcctgagtagctgggactacaggcgcccaccatcacacccagctaatttttgtatttttagtagagacgaggtttcaccatgttggccaggctggtctcgaactcctgaccttgtgatccgcccgcctcaccctcccaatgtgttgggattacaggcgtgagccattgcacccggcctcttttttcttttaaaggaacagaggtagcgctcacatctaagctgctcaccattggacttcccagcctcagcttttaggcattcctcttgagctataaaatcgggaaggagggctgggcatggtggctcacacctgtaatcccagcacttttgggaggccaaagagggaggatggcttgagcccaggagttcaagaccagctctgtgcaacatggtgagaccctgtctctatcaaaaaacaaacaaatgggcctggcacagtgactcatgcctgtaatcccagcattttgagaggatgaggcagttggatcacttgaggccaggagttcgagaccggcctggccaacaggatgaaaccctgtctctactaaaaatacaaaactagccagatgtggtggcgggtgcctgtaatcccagctaatcaggaggttgaggcaggagaatcgcttgaacctgggaggtggaggttgcagtgagccgagattgcgccattgcactccagcctgggcaacaagagtggaactctgtctcaaaacaaacaaacagacaaacaaaggaatagaccgcgtgcagtggctcatgcctgtaatcccagcatttcaggaggacgaggcaggtggatcacttgaggccaggagttcgagaccagcctggccaacatggcgaaaccccgtctcttttaaaaatacaaaaaatttagccgagcatgatggcgcacgctgtaatcccagctactcaggagactgaggcgtgagaattgctcgaacctgagaagcggaggttgcagtaagctgagattgcaccactgcactgcagcctgggtgacagagtgaggctctgtctcaaaaaaacaaacaaacaaacaacaacaacaacaaaaattagccaggtgtggtggtacatgcctgtggtcccagctactcggtaggctaagatgggaggattacttgagcctaggaggtggaggttgcagtgagctgagatcctgccactgcattccagcctggccaacggagctagacactgtctcaaaaaaaaaaaaaaaaaaaattcagaaaggaggtgcccagtgctgctctgtgtcttgagcaatcccacaatcccatcaccccttctccgggcacttcctcatcaggaaacaggagccagttggagtctggctcaggactctgcagcctcagtcatgctgtcccctgggctcagcatcccgtcctctccaagtgtgcagggggcagcttagatgccaggctcaagcagggcaggcagcacagtcccacagagggtactggccagcccaggcaactgattgctcagtgggatggcagaggtcagcagaacaggaagggacggacaatagctgtgcctgttgcctggcctgccacagcaatctcggtgtttgccagctgggtggggctggctaggcaatcctcagcagcaaagctcaaggttccatctcccattttagtttgcccctctgcaggtcctggtgggactgatatgcacaacatctcaccctgggaactgcaaagaaccagtctttctatggagcttgagcagggtctcagcacttagaggcttccaggaactacagttcccagaacacacagcattcagccccagttgctgtccaagtggctgggtttgaactagaacaaggaaatctcacttgtcccgggaactgagcgtcctggcctggtccaggtgcatttgtgactcttgtttcttggatctgtgtccacctgataaatcccccttccttataaactacatggtctatttgtccacacaggtttgctgagaacctgccgtgtggcagcctgaggtgggagtgaggggttgacaagagagactcagcctccaccctcacagtcagatggaggagacagatctatgaaaggctggctgggtaccttctgtgacctagcacataaacaaaccaacaagcagataaactatctcacccttgtctttcattgcatcttgcctttccacactgatttactagctcccacgatattgcagtatcctaaagcgtgctgtatctctctgtccggcttttgcacgctctgttacctctaccaggagcacattcagcttattcactgacgcgtcttcagaggtaggacagagtctggcacggagcagtctggcacattaaatatttgatgagtgagtgaacgaatgaatgaatgaatgcctttgtccattgtacagcccaggaagcagggaaactcgggaccctccctattcatctcgatcccccgcccgcccccagagattgaatgcatctttttatccgctccgaggatggccaggctggggcagaggaggccgggcagggaactgggttggggactgccattgacccccacccaggtctcctaaactgtccgctttcctggacgtcggaagttcgaatcctttccccgaaacctggcctaggtcacctgactcccccgcccctcaccacccagggcacccgagactgacactcagccgacagcacgtggttcaggggccccagcttccttcccattggccgcttgtctccttcctccctcgcgattggccggggcccagctgcagctcccccccctcctcagccctccggtggtacagccagccgcggcttaggcggggcggaacggtccactgcttcgcggcgaggggaggagtcgggaagagccgggcgaggcggagggatccctctggaatgtttccgtcgggtccacccgaagcggaagacgcggattggctgcgagcaccgagaggcagccgctgattggccggccgcgggcgtcggccccgccccccaggcgccgctgcgggagaggcccggtctggagtttgcggagggccgagccgggtgcgcacggggaggcggaggcagcggcggcggcggcggcggcggcggcggcggagcaggtgagtggcctctgcgagaaggatgtgtctgctccgggggcctcgggggtcgcgggcctgcgaggatccggccgatcctgcagggtggggccggcgccgtggacgcgactggagatctaggctgcgcgcggggatgccggaggccccttcccaggggaagcgggggtggggggtggtgggggcagctcccttcctgctggcgggcaggggacaaacgcctcccaacgctgggctggggtttctgggcttgcccctccccccgtcccccggctggactgtccccatcccagcgtggacaggcgcggggtcagtgtttctgaccctttcctgggcacttcccctgagctaaccgcgtctgaaccctccagggccttgggggggacgcagtgaggaccacggtctgaataataatcgtcatgaaaaactccacctcagctagcatttattggagagcttccgtgtcaggcatttaccatgaggataattgactctaaacacctcatgggaggtgctgtgccttcttgtaaaaaaggtgaggcagcctacccagagaggtggagtgacttgcccaaggtcacacagctagtaactggcacatctgggactggaactcatgccccarggtccagaactggagtcacacccactagactggataccaataactccacggctcagttgttgctgagtagctccggccccctacccctcccaccccctaccccgtactcatcatcagggccacacctgctggtcttttgctttaccagccactcaaacaggaagctgccctcctttcccttctccccagagctggagagggcaggtctaactacctgggtccagagaagagagtggcgtctgcagggggccaggatgctggggtctgggcccactgggttcccccctggcaacctgggccgaggctgggaagtaggcgttctccccggaaacacccaggagccggtttttcaagagtgaatcagaggcctctttccctccttctctccaaagcaacactgtgctggaacggggagcctgggcgtggtttcccccttcccctagcttctgtgtgctcccaggaacccccttcccctcctcctgctggccacactgcttctktgtggccgtggggttgctaagtttcaggcccttcccaggatgagggggtgaggatgctgaaattccagcccaaacactcaatatccgggctgaagtggctcttcatctctgtgttcaggtgtgaggggagccagsgaaagtggggagcctaggacagttggcaaccgcacagcaggcatgtttagggggctgtttcaaggatggggagcacagagagcaatcagaacgaggacctgagacacattcattcactcagtctacaaatatttagtgagcacctgctacgtgcatgtgctaggcactgttcttggcacagaaaatgcaacagtgaacaaaacaaaatccctacttttgaggagttggcactctgaaaggaaggaagcagccaacaaacaagttagcaagtaaataaagaagataatttcagatggcactaactgctatgaataaaatatgagcgggtggtactgtagagagtagttgtgggcaaggggtgccagcccagcaaagatcaggcaagggggccgggcgtggtggctcacgcctgtaatcccagcactttgggaggccgaggcgggtgggttgcttgaggtcaggagtttgagaccagcctggccaacatggggaaaccctgtctctactaaaaatacaaaaattggctaggggcgtggctcacccctgtaatcccagcactttgggaggctgagacaggtgggtcaagaggtcaggagtttgagaccagcctgatcaacatggtgaaaccccctctctcctaaaaatatgaaaattagctgggtgtggtggcgcacgcctgtaagcccagctactcaggaggctgaggcaggagaatcgcttgaacccrggaggcggaggttgcagtgagctgagatcgtgccactgcactccagcctgggctacagagcgagactccatctcaaaaaaaaataaaaataggccaggcgtggtggcttatgcctgtaatcccagcactttgggaggccgaggcaggcagatcacctgaggtcaggagttcaagaccagcctgaccaacatggagaaaccctgtctctactaaaaatataaaataagctgggcgtggtggcacatgcctgtaatcacagctacatgggaggctgaggcaggagagaatcgcttgaacccggtaggcagaggttgcggtgagccaagatcgcgccattgcactccaacctgggcaacaagaatgaaactccgtctcaaaaataaataaataaataaaaataaacaaatacaaaataaaaatacaaaaattagccggatgtggtggtgcgtgcctgtaatcccagctactcaggaggctagggcagaagaatcgtttgaacccaggaggtggaggttgcagtgagctgagatggcgccactgcactccaacctgggtgacagagcaagactccatctcgaaaaaaaaaaaagagagagagatgggcaaggccaaggtctttagkctggaccaagtttggaatcacatggttggagcagaagatgaacccagagcagcgattctgcaggggtttgtgggtcacagtaaggagwttgcagtttttcttccagaaggtgggaaactgttgtaaagtttcaggcagggcagtgatgccatctggtttacgttttaaaatagagacatgaagttaaatgacagcctgaagctggaagacaagagttctgccagggcagcatgcaattaagttcatgggcctgagccatctgtaccacaggggcagttccagcatgctggggcaagcctgggaggcttcrtggaggagtgggcctggagtaggtattggcaggcagagagggttgggatattcctgggcagggcagggcagaggaggagacacccatagtaatgacaacagcgtccttaaatggagtctgaggcagagtgtagatgggatacgtgggtaatctctttggatttccacaaccaccttgagagtgacaggaattccacccatttttcagatgaagaaactgaggccctgtgatgtgaagtgacttgccccccagccacacagctggtaagtggcaggggtgggatttgaacccaggccacgaagcctcttatggccgtggcaggcagattcattactcactcactttcctcactgctgttaatgcctcctcacgggtggggacacggaagctggcatgaaccagggcagtggggtgggcagagagagagagtaaggaggctgggaattggtggtcaggatgtagggatcttgggaaaaggaggaagcttgaatcttggtacagatggcagtagcaaggccgggtgcagtggctcacgcctataatcccagcactttgggaggccgaggcaggtggatcacgaggtcaggggatcgagaccatcctggctaacatgatgaaacagcgtctctactaaaaatacaaacaattagctgggcatggtggcgggcacctgtagtcccagctactcgggaggctgaggcaggagaatggcgtgaacccgggaagcagagcttgcagtgagctgagatcgtgccactgcactccagcctgggcaacagagcgagactccgtctcaaaaaaaaaaacaaaagatggcagtagcagtaattgtcaccaatatttatgcaacccttattgtgtgccaggactgttccaagcacatgcatgatttccttggagctcagagaggttaagacccttgcccaaagtcacacagctattaagagatgaagccaggttccagattcatgtttttagtttcctgcctcccagtgcgtagagctggcggaattggagggatgatgaggggtcttttcttttttcttttttttgagatggagcctcactctgtcacccaggctggagtgcagtggcacgatcttggctcactgcaaactccacctcccgggttcatgccattctcctgcctcagccttccgagtagctgggactgcaggcgcccgccaccacgcctggctaattttgaaaatatatggctgggcgtggtggctcatgcccacctcggcctcccggagtgttaggattacaggcgagagccaccacacccggccgacactgatttttctttccagcgaggtcagagcccggggaggggtcagagcagagacaaatgcgacatgacttatgttttacaggaccattctggctgctgtctggacaagaagtcgtagggggtgagggtggaagctgggaaacccacaggaggcaaccacactagtttaggtaagtgatcatggagatggaccaggtgagatgagagggtgtgttaggggacagacgaatggatgcatgaacaaatggatacatgagactaggtgcaggctgggtgcagtggctcacacctctaatcccagcactctgggaggccaaggcgggcgaatcacctgaggtcaggagttccagaccagcctggtcaacatggagaaaccccatctctactaaaaatacaaaaattagccaggtgtggtggcacgcacctgtaatcccagctactcaggaggctgaggcaggagaatcgcttgaacctgggaggtggaggttgcagtgagccgagatcgcgccattgcactccagcctgggtgaaagagtgagagttcatctcaaaaaaaaaaaagattggatgcggccaagctgaatccagcatggccccctggaagagaccattggataggaggcaccaggaagtcccttttacataagaaaatataggctgagcgcagtggctcacaccagccttctttggctcacaccatgttggccaggctggtctcaaactcctgacctcaggtgatccacccgcctcggcctcccaaagtgttgggattacaggcgggagccaccgcccctgcacccggcctaactaatgtattttctttctttctttctttcttttttttttttttttttgagatggagtctcgctctgtcacccaggctagagtgcagtggcatgatctcggctcactgcaagctccgcctcccgagttcacgccattctcctgcctcagcctcccgagtagctgggactacaggtgtgtgccaccacgcccggctaattttttttgtatttttagtagagacggggtttcactgtgttagccaggatggtctcgatctcctgacctcgtgatccacccgccttggactcccaaagtgctgggattacaggcgtgagccaccacacctggccttttttttctttttgagacagaatttcgctcttattgcccaggctggaatgcaatggcactgtctcagctcacctcaacctctgcctcccaggttcaagcgattctcctgcctcagcctccctagtagctgggattacaggcatgtgccactacacccagctaattttgtatttttagtagagatggggtttctccatgttggtcaggccagtctcgaactctcgacctcagatgatccgcctgcctctgcctcccaaagtgctgggattacaggcgtgaaccaccgttcctggcctaactaatgtattttcttttttttctttttgagactgagtctctctctgttgcccaggctggagtgcaatggcacggtcttgactcaccgcaacctccacctcccaggttcaagcaattctcctgcctcagcctccccagtagctgggattacaggtgcccaccaccgtgcctggcctaattttttgtaattttagtagagacggggtttcaccatgttggccaggctggtctcgaactgctgacctcgtgatccgcccgcctcggcctcccaaagtgcagggattacaggtgtgagccactgcacctggccaactactgtaagttctggagaactaatccgggctcttgagagcaagcactcattgcttccagagctacttcaagccattcaggagagatctggccccataacacagacacctcccactaggccccacctcccaacaccgcaccaccactttggggatcaaattttagcatgagtttctttttttttttttttctccttgccatgtttcacatttaataagattctgtcactttaatacataaaaccctttgaaatcaatgtcaaccaggaaaattcatgttagaaaaaattggaatgagagctaatattgtatattcagaacatctgaaaaarcatttttgactattacaaaagtttatttaacaaaaagtctaatatgaaaatgtacatgacctaatttttacatcatagtaaaacaggccctatggagagaggacatgggtttctctgctgaacagccattatttatactcattccaaggcttctaacatgatgatactatttcctcgtatttccaccattccaatatttttctgttgtccactagtcgccatctccacacattcatctatcacaaggttcataaaggratcaaatcccygcaatattccttggacatgtctgccaccatttaatttcaatgaaaacttcttgtccgtaaattttttcaactcaggagggtgagctttgctcatggkgtatactccatgggctcacagatgccttggaacagaacgcacggcttccctcacgctaccgcggtaggcccagcatcttgtgcctggcgtcatcgacctcgttagccaatcgattgttcgagcatgagtttcaatggggcaaaccttatccaaaccatagcaggctgggtgtggtagctcatgcctataatcccagcactttggaaggccaaggcgggaggattgcttgagcccaggagttcrggaccartctgggcarcgtagtgagacccgtctctacaaaaaataaaaattrgctgggcrtggctgtgaacacctgtagtctcagctattcrggaggttgagacaggaggattgcttgagcccrggaatttgaggctgtagtgagctgtgatcacatcactccactgcagcctggacgacagagtgagaccccattaaaaaaaaaaaatcaggaaaacatagcaacctgttacctccctgccctcatgttctcactatccccccttcactcactgttccaaccccccaggcctcctcactgttcctcaaacatgccaattgcatgcccagttcagggcttggcttttctttcttttttttttttttgtttagaccgagtctcgctctgtcgcccaggctggagtgcaatggcgtgatctcagctcactgcaacctcagcctcaggagtagctgggattacaagcatgcaccactacgcccagctaatttttgtgtttttagtagagatgaggtttgcatgcaccaccatacctggctaatttttgtatttttagtagagacggggtttcaccatgttggtcaggctggcctcaaactcctgacctcatgatccgcctgccttggccttccaaagtgctgggattacaggcatgagccaccgcgcctggctagggcttttctttgtttttttgagatggagtctcggtttgtcacccaggctggagtgcagtggtrtgatctcggctcactgcaacctccgcctcctgcattcaagtgattctcccacctcagcttcccgagtagctgggatcacaggtgtgcaccaccacgcccacctgtgtattgtatttttagtagagatggggttttgccatgtaggccaggctggtctcaaactgctgacctcatgtgatccgtcaacctcaacctcccaaagtgctgggattacaggcttgagccaccatgcccagccccagctcagggcctttctactggctgttctctctacttgggacgttcttgccccaaatcattgcatgaatgcttcctcctgtggttcaggtctcaagttcagcttcacgtgctcagagacgccctcactgatcttgtctatagaacttgtcttgctttgtctccatatcactattaaaaattatatgaggctgggcacagtggctcatgcctataatcccagctcgttaggagtccatggcaggaggattacttgagcccaggagtttgagaccagccgggacaacatagcaagaccctgtctctaaaaaataaaaataaaaaaattagcagggcatggtggcaagcacctgtggtcccagctactcaagaggctggggcgggaggatcacttgagcccaggagggcaagggtgcagtgagctctgattgcaccactgcacctcagccttggcaacacagcaagactctgtcaaaaaaaaaaaggaaaataaaggaaaaaatttatattagacatttacacatttccctgctccctgtgcatttcctcttccggactgtccacttctggaggtcatgtgcagagccccagctagcctatatagcatctgtgagtgaattagaaagacatctcttcggccgggtgcagtgactcatgcctgtaatcccagcactttgggaggctgaggcgagcgaatcacgaggtcaggagttcgagaccagcctggccaacgtagtgaaactccgtctctactaaaaacacaaaaaaaattagccgggcatggtggcgtgcacctgtagtcccagctacctgggaggctgaggcaggagaattgctggaacctgggaggcggagcttgcagtgarccaagattgcaccactgcactccagcctgggcaacacagaacagactctgtctcaaaaaaaaaaaaagaaagaaagaaaaaaaagaaaaaaagaaaggcatctcttcctcctggcagacaccacaccaagaaatatagcttggcaggcagtgcacagaccgaatttcagtcctacttgccaccttggtctagtaattttgcacagtacacaacttgtgtaactgaacatggtggccctagtcagggatcttgctttttttattgaagacagtatctaaaatggtgcacagaatacagtaagtactaaaaagaaaaaaaaaattgtttgaagggaggggagaatggagaaagagagaaataaagaagcgggccgggcgcggtggctcatgcctgtaatcccagcacttcaagaggytgaggcgggtggatcacttgaggtcaggagtcttctgtagtcacagctacttgggaggttgaggcaggtgaatcgcttgaacccaggaggcggaggttgcagtgagctgagatcgcaccactgcactgctgcttgggtgacagagcaagactctgtctcaaaaaaaaaaaaaaaaagaaagaaagaaagcaagaaagaaacagaaaaaaaatgtatgtggtgtagaaaacaaccccaaaagtcttagtggctgaattcagcaaagatttgctttttcttcctgctacacttccattgcggctcagcagggggcaccattcaccgtagtcattcagggcccggcctcatagagtcgccaccatatcaaatgtggctcatcaccctgcctgggaaagatagatctctggaggctccagcacttaaatgcctcagcccagaaatgtcatgtgccacttcctctcacaacctatttgccagaaataatcatttatctgcccagtcacaaggaggccaggaagtgccatccacctgtttggtccaaagggggagagtcagaaattttttgcacacagtgttagtgactgtggctgagaggaaaatagaagygtagtcgctttcagcctccattttctcatctgttcaatgggcataattgtagcataacgtgatccctgtgttacagtgtggtgtgagggttaaggaaggtcacaggccgggcacggtggcccatacctgtcatgccagagctttgggaggccaaaagctccttgaagccaggagttccagaccagcctgggcaacagagaaagatcacctccttgccaggcgcagtggctcacgcctgtaatcccagcactttgggaggccgaggcaggcggatcatgaagtcaggagatcgagaccatccttgctaacgtggtgaaacctcgtctctactaaaaatacaaaaaattagctgggcatggtggcgggcacttgtagtcccagctactccggagcctgagacaggagaatggcgtgaaccctggaggtggagcttgcagtgagccgagatcgcgccactgtactccagcctgggtgacatagtgagactctgtctcaaaaaaagaaaaaaaagaactcctttctctctctctccctctctctgtctctctctctctctctctctctctctctctctctctctatatatatatttatatttgtttatttatttatttatttattttttgagacggagtctatctctgtcacccaggctggagtgagtgcattggcacgatctctgctcactgccaaccttcgtctcctgggttcaagcaattctcctgcctcagcctacccagtagctggtactacaggcgtctgccaccatgcccagctaagttttgtacttttagtagagatgtggtttcaccatgttggccaggctggtctcgaactcctgacctcaagtgttctgctcacagcctcccaaagtgctgggattacagatgtgagccatcgcaccaggcctacaataaaattwaaaaaaaaaaatagtcgggtgtgatggtacatgcctgtagttctagccacttgggaggctgagaatggaggatggcttgagcccaggaggttaaagctgcagtgagccattatcgtgatcaccccactgcactccagcctggggacagagcaataagagaccctgactcttttatttatttatttttattatttttttttgagactgagtcttgctctgttgcccaggctggagtgcagtggtgcaatctcagctcactgcaatctctgcctcccaggttcaagcgattctctcgtctcaacctctcgagtagctgggattacagacgcccgccaccacggccagctaatttttgtatttttagtagagacggggtctcaccatgttggccaggctgatctccaactcgtgacctcaggtgatctgcccacctcagcctcccaaagtgctgggattacaggcgggcactatggctcattcctgtactcccagcacttttgagaggccgaggcaggaggattgcttgagtctaggagtttgagatcactctgggcaacatattgagacccctcatctctgcaaaaagtgttttttgttttttgttttttgttttctgtttttgagatggagtgtcattctgtcacccaggcaatggcacggtctcagctcactgcaacctccgcctcccaggtttcaggcaattctcctgcctcagcctcctgagtagctaagactacaggcacatgccmccacacccggctaatttttgtgtttttttgktagagacagggtttcactatgttggccaggctggtcttgaattcctgacctcgtgatccaccygcctcagcctcccaaagtgctgggattacaggcatgagccaccgcacccggcctgcaaaaagttttaaaacgtcagctgagcattaggcacagtggttcacgcttttaatcccagcgctttgggaggctgaggtgggcggatcacttgaggtcaggagttcaagaccagcctggccaacttggtgaaaccccatctctaccaaaaatgtagaaattaccccggtgtggtggcacagacatgtaatcccagcttcttgggaggctgagacaagagaatcgcttgtacccgggaggcaagagattgcagtgagtgagctgagattgcaccactgcactccagcctgggcaacggagtgagactcagtctcaaaaaaaaaaaaaaaaaagagtcagggtctcttcttcaagaatcacttgaacctgagaggcagaggttgcagtgagtcaagatcacaccgttgcaatccagcctaggggacagagtgagactccatctcaaaaaaataaaataaaggttagctgagcttcatggcatgtgcctatgggcccagctatttgagagactgaggtgtgaggatcccttgagcctgggagatcaaggctgcagtgagctttaattataccactgcactccagtctaagtgacagagcaagaccctgtcacaacaacaaatgaaacacacaaggaaggtcacaaagcaataatcctagctggtattattattattattattattattattattattattattattgagacagagtcttgctcttttgcccagggtggagtgcagtggtgtgatcttggctcactgcaacctctgcctcctgggttcaagcaattcttatgcctcaccctcttgaatcactgagattacagacatgcgccaccatgcctggctaatttttttgtgtttttggtagggatgggatttcgacatgttggtcaggcatctcgaactcctgacctcaagtgatcctcccgtctcagcctcccacagtgctgggattacaggtgtgagctttttattttattttattttatttatagacggagccttagtctgtcacccaggctagagtgcagtggtgcgatcttgggtcaccgcaacctccacctccccagttcaagctattcttgtgcctcagcctcccaagtagctgggattacaggtgcgcaccaccacacccggctaatttttatatttttagtagaggtggggtttcaccatgttggccaggctggtttcaaagttttgacctcaagtgatccgcccacctcagccttccatagtggtgggattacaggcgtgagccaccgcacccagccctattattacttttatataagtgtcctgtcactatacaagagatgaggatttcaaccgaggccaatttgttctctgagtatttccttgggcctgtatggttcgagtagtgtgggaggggcacccaaggcctctgcccaggccctgagccccacttcctgtcctgcagatcttctggtgaccccacttctcgctgctcatgccgctgggactggggcggcggaaaaaggcgccccctctagtggaaaatgaggaggctgagccaggccgtggagggctgggcgtgggggagccagggcctctgggcggaggtgggtcggggggcccccaaatgggcttgcccccccctcccccagccctgcggccccgcctcgtgttccacacccagctggcccatggcagtcccactggccgcatcgagggsttcaccaacgtcaaggagctgtatggcaagatygccgaggccttccgcctgccaactgccgaggtatccactggggagccgggcaccagggtccctgatggtggaccagaggtctgggcctgcatcctgttcatgagctggggctcagatgctgaagctgcagatgctgagcctgggccccactcagtggtgggggccaatggcctgggctggatgctgagtycccatgaggcactgggaggcttgtgcccctgtgaattgtggggaactggaggccagggctggatgctgagttcccatcaggcactgggagacctgtgccccagtggattgtgggagctgatggccagggctgcatgctgacatcccatcaggcattaggaggggtgtacccccagtagattgtgcaagacyaggggtggatgctgagttcccaacaggcactgagagacctgagctccaatggactgtgggaggccagggctggatggattgattggatggatggattgagaggcctgcatcccagtcgattgtgcaaaactgacgaccagggctggacgctgagttcccatcaggcgttgggaggcctgcaccccagtagattgtggggagctgatggccacagttaaatgctgagttcccatcagacactgagaggcctgcacctctacagactgtgggagctgatggccagggctggatgctgagttcctgtcaggcattgggaggccagtgccccatgagatggtggaggctagaggccagatacgagatgcacttctccgtgatgccttggagaaactcaaygctgtgggaggcaggcttgcctggtgccaagcactgtggggatagatgggagggggtcaaggagggcaatagtgggtttgagcaagaagtagacgcaggggtctccctaagtgggatgagtttctgtgtcctccacaagcatttcctgagcactcactgtgtgccaggctccgttccctgaaagcagcaatgaattttttttttttttttttgagatggagtcttgctctgtcaccaggctggagtgcagtggcacgatcttggctcactgcaacctccacctcctgggttcaaaccattttcctgcctcagcctcccgagtagctgggattacaggcgcccgccaccagacccagctaatttttgtatttttagtagagacaggatttcaccatgttggccaggttggtctcgatctcctgacctcgtgttctgcccacctcggcctcccaaagtgctgggattacaggcgtgagccaccgcacctggcacagcaatgaatttttgctaggaccgaaatcctagctgggtacagtggtgcacacctatagtcccagctacttgggaggttgagatggggggatcactggagctcaggagttccaggccagcctgggcaacataatgaggctcccatctctaaaaaaaattattttaactatgtgggtgtggtggcacgtgtctgtggtcccagctactcgggagactgagacaggaggatcacttgagcccaggagttggagaccagcttgtgcaacatagtgagaccccatatctccacaaaaaatacaaaaattagccaggcatggtggcgagcacctgtagttccagctacttgggaggctgaggtgggaggattgccggwatctgggaggttgtggctgcagtgactatgatggcaccactgcactccagcctgggtgacagagcaagaccctgtctcaaaaagagaaaggaaaactaaatcctagtcctagcagagctgacacgctaatgtgggccctgcygtggccctggctcaggctcagtgggtgatgagttactgggatggaatccccctagtcctctcccagctctctcccttcgccctccagtggtgattagaaaagggggagggagggggaagaggtttcagcgtctcccacccctgcaggtgatgttctgcaccctgaacacccacaaagtggacatggacaagctcctggggggccaratcgggctggaggacttcatcttcgcccacgtgaaggggcagcgcaaggmggtggaggtgttcaagtcggaggatgcactcgggctcaccatcacggacaacggggctggctacgccttcatcaaggtgcctggggagacggggcaccccggaggcctgggagtgagggtgggccatgggaccccggaaaccagggcagagccccaagggctgatgactccccgcccccgcagcgcatcaaggagggcagcgtgatcgaccacatccacctcatcagcgtgggcgacatgatcgaggccattaacgggcagagcctgctgggctgccggcactacgaggtggcccggctgctcaaggagctgccccgaggccgtaccttcacgctgaagctcacggagcctcgcaaggccttcggtgaggagccgccccctggacctccccagtggcgctgctcgcatgggcgcaggcggtggtgccgggagcggccagcaggtggcgcccaagcctggcctgccgaaagggaaggggttgcagaaagggaaggggttgcagctcctcccgaccccagacggggtgctggcccttggcccagcctgggagaagggcgggggygaggaggaagttgccctcacacctagcttccaggggccattagcccagccaagcgccctcagccctggccagccccctatccccaacaggccaggcttgactgctcagtgccagcycccccacttttccatctggcttcactaactctcaggaatgggccccaggcccctgaggtgggggtgggggactaaatcacttccctgggcaggtagggctggtctgtggcccagcagccatacccccttggccaagaggagacggactcaggcagctggagactcaggctggggtacacctgcttcctgtyccccagcccctgggagcagaagtggcccctccagtctcccctccagcatttcctattcctggcccccagctgttccccctgctctgccccacatccatgccaggcctgagtcaggattcctgccctcctgggatcaccccggccccagcccccagaaacttgcagaagcctggagaagyttggggtggtggtgaaagccaggaaggacaagttcctgcccagaacgtgctaaaaccaagcttcccccacactcactcctctcctgcctcccacagacatgatcagccagcgttcagcgggtggccgccctggctctggcccacaactgggcastggccgagggaccctgcggctccgatcccggggccccgccacrgtggaggatctggtgagtgctccagccggaccctatctccggcatcccttccctttcttttttttttttttgagacagagtctcactcttgtcacccaggctggagtgcagtggygcaatctcggctcactgcaacctctgcctcccaggttcaagcgatactcctgcctcagcctcccaagtagctgggattacaggtgcccaccaccatgcccagctgatttttgtatttttagtagagatggggtttcaccatgttggccaggccaggagttggtctcgaactcctgacatcaggtgatccagcctccttggcctcccaaagtgctgggattataggcatgagccaccgcgcccagccctcccttccttttcataaccggcagcattacctgttagctgaggggactctgggcagacagcctggattctagtccacttctgccacttcccagctcccagggaccttccttgggcacatgggccgcagtttgcccatcagtaaaatggggatgagctgaacaccgataccaccttctcagggttgtcctgaggtctaaatacgaatatatgtaaagtggtgacaatggcagtccgtccaattactatgtatattcacattgttatgatgtcgctgtcacccctccctggcccccagccctctgcctttgaagagaaggccattgagaaggtggatgacctgctggagagttacatgggtatcagggacacggagctgggtgagtgagggctgcctgggggagggggcatctaggtctgctgggggccgaatccaccctgagccccttggtccctggwgtcatttgtgcctccgttctgacccctcccccaatagcrgccaccatggtggagctgggaaaggacaaaaggaacccggatgagctggccgaggccctggacgaacggctgggtgactttgccttccctgacgagttcgtctttgacgtctggggcgccattggggacgccaaggtcggcygctactaggactgcccccggaccctgcgatgatgacccgggcgcaacctggtgggggcccccagcagggacactgwcgtcaggacccgagcctccagcctgagcctagctcagcagcccaaggacgatggtgaggggaggtggggccaggccccctgccccgctccaatcggtaccatcccctccctggttcccagtctggccggggtccccggcccccctgtgccctgttccccacctacctcagctgggtcaggcacagggaggggagggatcagccaaattgggcrgccacccccgcctccaccactttccaccatcagctgccaaactggtccctctgtctccctggggccttgggttctgtttgggggtcatgaccttcctagtttcctgacgcagggaatacaggggagagggttgtccttccccccagcaaatgcaataatgccctcacccctcctgagaggagccccctccctgtggagcctgttacctccgcatttgacacgagtctgctgtgaaccccgcaacctcctccccacctcccatctctccttccaggcccatccctggcccagagcaggagggagggagggacgatggcggtgggtttttgtatctgaatttgctgtcttgaacataaagaatctatctgctgttggacctgtgtggcttcggggtgggagagggggaagattggggctgagaaagaattcagcagctgaaatccatcttccgcaggctccaaattgaattasgagctggcaccaagccacctgccccctcccactgttccttctggctgcaggccaccaggcttccaggcagggccagagcttcctggactactgagggttcaaatcctgccccctctcccacaaggcctcctaccccctggagcttcacaaggctgctgtctgcagctggtgacaacccccggaccgtggggagcaccagggcattgaaacctggcttggaaatagaaagatggaacctcaggcctgccagagccccacccctacaccgggaggttgggggcaggcgtgaggcagcccccaccccacccggcccaatgctggacacgcaggcgtccatggggcaccctgctttgtcctagacataaacccagcatacttgttttgacaacccactcatcttcgaggattgagggtgatcagggaaaggcggggtgggaccctggccagacctggagggaagggaagggattgaagcaaggggcgctgggccagarggccccacaggaatgcttgggggtgagccgagaggctgtggggaagtccgaggccagcttgcaatcctcgttccaaaaggcgggcgggcactgggccaccaggaagaggggaagggggaaaaggggaagaccctgggggctgggtgttggtggacagacccgggtggagtcggggagccgcagtcctggtgactcagggcatccccgggcacctgtgggctcctcgggtgtctgtgctgggagccgcttgcggtggtgaaggggtgtggctatgtgtgtctcgggtgttgggtagcactgtgagtctatcaagagtgttgatggctcgtgacgcaatgagggagggctgtgtcgtgggtaagggatgtgataaccggctctgtgttccagggcaattgcaggtgtaactggcagtgtctggtggtggggagtgcaacggagtgactgtgtcttggggtgtcccggggtgtgggggtgtgtgtcttagggtgctgtttctggggcaaggaggggtgcttggctaggccttggggtgttcaggggtgtcagggtatgtctcggggtgttgctgtttcctgggtgggggtgctggctaggtctaggggtgtctaggggtgcaggtgtgtgtgtctcagggcgttgctgtttctgggtgagggtgggggtggccagctaggtctctggtgtccagcrgcggggggtgtcacttcttgtgccttgggtgtacggagtttgctggtggggcctgtctgggattgttggggggtcattgaaagtcaaacagagtgtggtcaggggcagttttggcaataaggagtgtgtgtgcgtgtgtgtatctctcggggtgccaagtgagaccctatttcccagcactaaggagggtggttcgggtgatcatctcagagggctgcattttggggtgttgggaggggctggaattgaggcagtaactctgggtgcgtcccggcgctgggggtaagaccctgagttcagggatgtggcggcagcaacctggctgtgctgagatggggacaggatgaaactgagtggtaagtgacaggattgtatgtcttagggtgtgaggctgtgmcagtgtgaccctacttctcagggcaggaggcgagtctttgtgtcttaggacgtgtgtcacaggtgtcactcagcccatcttaaaggagccagtcactggggagagtccccaggtcgccaggcctcctggttcccctgccccctttcagcctcctcccaggatatgactcgctgtggccctagccggggcttaagcccctgtataaataggcggatcccctggccaggctgggcctgacccaagctggtctacccgaggccctgcccaccagcacccaccccgacatccacgaaggctttggcagggcagggggggcattgctggccccacagaattggagttagcctctctagctccaaagccccagggaggggggcagtggcaccccctgcagctgccccagcccgccccagacgacgctcacattttccagtgtttagattttatccgctttattaatgaggcaagaggcccgatcctgggggggaagggggctgctcccgccctgctgggaggagggggtcacatggggccagaccaactccagggagcctcactcctcgtggagggagccgctggggcccagagtggcccccgcccattgccaggagcagagaggggggtctctgccactccaggcccccagygggcgtgcgcggggtggagcggcccctggaggccagcaagggcggcgggaggagctgaggagccgccccaggaagagggagggaggaagcggcttgccggagagccagggcgcagtgggcggcagggctgagcggccggtgatggggaccccacatcccaggcagtgccgggtaagcgggttgcacatgagggtccctgattggggaggaggagggcatgaaggggtggrgccatggccacctgctgtccgtcctgtgtccccgggctcttctccctgatctgtgcgtccctgtcttaccgtctgtccatcctcccttcccatctggcctggtgggcagttccgccctttcagccctcaccaccaggatatcaaagagtggatggtcgtggggccgcctccaggcctctggggcagggatatggagtggaaccgtgggcacccagggtgaggcagaggtgatcggggtagggcctggcgagagaccgcagtggagcagaggcaggtccatggggcaggggcagagatgggtccatggcacagatgtggctgtgccatgtggggtcagagatgggtccatgggggacagggacatggccgtggggagagatgtgcccgtggtggtagagatggggctggggcatcgaggatgggactggagtaaagctgacatggggaaagtcaggtagggccacagtggcagaaatgggtgagagctatcagatggagccacaggccccaggaatttgctgggtgtaaaaatggaaggtgggggtcggaggcactggcagagatgcctgagggcggggctggggggaatcttgcaggaaaccatgaagggcagagaaagggccagtggggttagagggaggccctggagcaggagatggggtggtgagaggcaaaagagagggagaagggtttccaaatggagtggccaggtcatttggagttgcccatggcaactgccatgggcagaggggccgcctgagaacgccatggagtcaaacaggccctgatgttctgagatggcaccgtgggctggtccccgcccgggcccagccagcctcactctgccctcctctcctctatccagcacccctggcgcctgacatgagcccttgcgggcccctcaacctgagcctggcgggcgaggcgaccacatgcgcggcgccctgggtccccaacacgtcggccgtgccgccgtcgggcgcttcgcccgcgctgcccatcttctccatgacgctgggcgccgtgtccaacctgctggcgctggcgctgctggcgcaggccgcgggccgcctgcgacgccgccgctcggccrccaccttcctgctgttcgtggccagcctgctggccaccgacctggcgggccacgtgatcccgggcgcgctggtgctgcgtctgtacactgcggggcgcgctccggccggcggggcctgccacttcctgggcggctgcatggtcttcttcggcctgtgcccgctgctgctgggctgtggcatggccgtggagcgctgcgtgggcgtcacgcggccgctgctccacgccgcgcgggtctcggtcgcccgcgcgcgcctggcgctggccgcggtggccgcggtggccttggccgtggcgctgctgccgctggcgcgcgtgggccgctatgagctgcagtacccgggcacgtggtgcttcatcggcctgggtcccccgggcggctggcgccaggcactgcttgctggcctcttcgccagcctcggcctggtcgcgctcctcgccgcgctggtgtgcaacacgctcagcggcctggccctgctacgcgcccgctggcgacgccgctcccgacggcctcccccggcctcaggccccgacagccggcgtcgctggggggcgcacggaccccgctcggcctccgcctcgtccgcctcgtccatcgcttcggcctccaccttctttggcggctctcggagcagcggctcggcacgcagagctcgcgcccacgacgtggagatggtgggccagcttgtcggtatcatggtggtgtcgtgcatctgctggagcccaatgctggtgaggggcgcaccggcccctcgagccacgctccttcccsctccctctcggcaccctcccgccctttgtcgtcccaggacacctggggcctccatcctggactcaaccaaggccccggcccctagaggccccacctgccccgaaagccagcatcgccttctccatctgacctcccatccttcctcctagcccccctctcctcttcctttttggggtctttgtagcgcaccccgacccacacaagcctcctctcctgccccaccgttataagtcsccgcgcttcattccctagtcctttcacccaacccccttgcttttcctctttccgggacacctgagactcctctacggccggacccccacccactgaaggtgtttgtttctttgccccccttttttttccgcatccgtttctcatctggatccccatttaccctccctgcgacggctcgcccctcctcccaggcttttaccttccagccacgcccccaccatccctgcgcccccctgcgcccgcgcctgctctatagctcacaccggcttcccccgcaggtgttggtggcgctggccgtcggcggctggagctctacctccctgcagcggccactrttcctggccgtgcgccttgcctcctggaaccagatcctggacccttgggtgtacatcctactgcgccaggccgtgctgcgccaactgcttcgcctcttgcccccgagggccggagccaagggcggccccgcggggctgggcctaacaccgagcgcctgggaggccagctcgctgcgcagctcccggcacagcggcctcagccacttctaagcacaaccagaggcccaacgactaagccagcccaccctgggctgggcccaggtgcgcggcgcagagcctttgggaataaaaagccattctgcgagcccaggcaggaccgtgtgtcccgtcggggcttcggcatccactggggccgcgcggggggctgcagggacgccgcgtgcgcctccagggtggatgcagttccggggcctaccagaagagggcgcggagacamgggggcgcggttctaggaggtttgagggtgccgggcccgtgggcgccagagccgcaggagcaagcgcaccgtgcgggcggcgggggctggggctccgctgggagcagagacagagggtgtgtggggcgtttcctgaccttgccgctgccctaacggacttccgaaaccattctgctcactgcggctttgagctcttccaatacagccccaaaaccctatccccaaaccattttgacccacgcccctgggcgccccccaacacaatcccgacgccccctcccatctcggctcacccacgctccccaccataagaacagccccgagtccacgccgccccttgatcctcttcagatgacacccccatcagtcgagactcccacgaccacccagccacctgccccgcaaacgtccacacctccaagcacgcccccacccccaatgactgcacacaagaagacacggaggatgcaaggatccggcaaatcccaaaggcctttttaaaaactaagagctctcgggcaggggcaggggcaggggcaggggagggggctagcagcccccggccacgaag

SEQ ID NO: 95345 - DNA, 19397 bp, Homo sapiens
ccaggctggagtgcagtggtgccatctcggctcactgcaacctctgcctcccagattcaagtgattgttctgcctcgttctcctgagtagctgagattacaggcgcacgccaccatgcctggcctattttttgtatttttagtagagatggagtttcaccatgttggtcaggctggtctcgaactcctgacctcaggtgatccacctgccttggcctcccaaagtgctggcattacaagtgtgagccactgcgcccagactaattttgtatttttatttatttatttattttgaggtggagtctccctgttgcccaggttggagtgcagcggcacaatctcagctcactgcaacctctgcctctggggttcaagcgattctcctgcctcagcctccagagtagctgggattacaggcatgcgccaccacaccaggctaattttgtacttttagtagagatggggtttcaccatgttaaccaggctggtctcaaattcctgacctcaggtgatccgcccatctcagcctctgaaagtgctgggattacaggcatgagccaccttgcccagcctaaatcgaggttctccaagaaaaactaaaacaggctgggtgtggtagctcacgcctgtaagcccagcactttgggaggccgaggtgggcggatcacttgatgtcaggagtttgagacctgcctggccaacagagcaaaacccatctctactaaaaatacaaaaaaaattagccaggcgtggtggctcatacctgtagtcctagctacttgggaggctgaggcaggagattcgcttaagcccagaaggtggaggttgcagtgagctgagatcacgccattgcactccagcctgggtgactgagagagactctgtctcgcaaaaaaaaaaaaaaaaagaaaaaaaaagaaaaactaaaacaacacaaaggatgaagatgggtcaaatggtcatgttggccagctgaggtggctcacgcctataatcctagcactttgggaggccaaggcagacggatcacctgaggtcaggagtgtgagaccagcctggccaacacggtgaaaccctgtccctactaaaaattcaaaaaattagctgggcatrgtggcacgtgcctgtaatcccagctacttgggaggctgaagcaggagaattgcttgaacctggtaggcagaggttgcagtgagctgagattgtgccactacactccagcctggcgacagagcgagactccatctcaaaaaaaaaaaaaaaagtcacgttgtcaattaaaatgaatcaatggaaataaagataagggtgtggacttctaactggtcagaatccctgctctctcttctcctattcagaaagctctactcaacatttatcgcagacagagggggtcagatttgtgactgtctgcctcccaatcagaccgtgagagcctgaggcatttatctttctggccaattgcatataggagagtaccataatgcctgttgaattaatggacaactgataagaatagcaaacatttattctgtgcgtaccaagtgccagctgctgggctgggcactttatgaagatgatctcattcagttccttttacaacagcatgtctgggagcaatctctagccccattttacacataagaaactgaggcccagaaaggtcacttcatttacctgagatcatataataggaagagtggagatgagggctcagcactgttgggtgtcagaggtgaggtgagtaaaaggcatgcagagaaggggctgcttcgctcacctctgccctgatagaatgggcccttgtagggaggtatggtttgtgagtttcattccatttcaaccagcccaagggccactcatggtatgatttgtttggtgttggctgtgccaaaaaatgctttactgaagtgtgctcaaaaggagcaggtcatccgatgacatctggaattgcttgggctggagtgcagtggcgtgatctcggctcactgcaccttcaacctctgggctcaggtgatcctcctgcctcagcctcccaagtagtcgggaccacaggcacacaccaccaagcctgactaatttttgatttttttttttttttttgagacggagtctcagtctgttgtccaggctggaatgcagtggtgtgatctcggctcaccgcaacctccgccccctgggttcaagcgattctcctgcctcagtctcctgagtagctgggattacaggcttgtaccaccacaccgggctaatttttctattttttagtaaagatggggtttcactatgttggccgggctggtcttgaactcctgacctcaagtgatccacccgcctcggcctcccaaagtgctgggattacatgcatgagccaccgtgcccggctaatttttgatttttttggagagatgaggtctccctttgttgcccaggctggtcttgaactcctggtctcaagcgatttgcccacctcagcctcccagtgttgggattacaggcgtgagccaccacacctgggccccattcttttcttaacagctttattgagatataatacataccatataattcacccatttaaaacataaaattcaacagtttaggatattcacaggcatgtgcaaccatcaccacagtccattttagaacattttccttaccacagagaaacctgccatcctttggctctgaccctgctattccctcaggcctaagcaaccgctaattaactttccatctgtagagatttgccgattctggatatacaacaggtggtcttgtgtgactggcttccttcactcaccataatattttcaaagttcattctttttttttttttttttgagacggagttttgcgctgtcacctgggctggagtgcagtggcacgatctctgctcactgcaagctccgcctcccaggttcacgccattctcctgcctcagcctcccgagtagctgggactacaggtgcccgccaccacgcccagctaatttttttcttgaaggctccatccatgttgttacacgtatcagtacttcatttctttttatggattaatatttctattgtatagatacatcacttgtttttttttcccgagaccaagtctcactatgtcacctaggctggagtgcagtgacgagatctcggttcactgcaaactccaccccccgggttcaagtgattcttgtgtctcagcctcccgagtaagctggcattacacatgtgcgccaccatgcctggctaatttttgtgttttcagtagagatggggtttcaccatgttggccaggctggtctggtcttgaactcctgctctcaagtgatccgcctacctcggtctcccaaagtctgggatcacaggcatgaaccaccacatctgacatttgagcatcttttcatgtgcttattggccatttgtatttatattatttggaaaaatgtctcttgaaatcttttgctttttttttttcttctttgacacagggtctctcaccttctgagtagctgggaccacaggtgtgtgccacccaacctggctaatttttttttttttttttgtagcagtgaggtcttcccacgttgcccaagttggtctcaaactccaagcccctgagatatacatgatttgcaagtactttcttccattctgtgagttgtcttttcactttcttgacaatgttcttgtcaggcctctgagcccaagctaagccatcatagcccccgtgacctgcacgtatacatccagatggcctgaagcaactgaatatccacaaaagaagtgaaaatagccttaactgatgacattccaccactgtgatttgttcctgccccaacctaactgatcaatgtactttgtaatctcccccacccttaagaaggttctttgtaattctccccacccttgagaatgtactttgtgagatccatccctgcccgcaaaacattgctcctaactccaccacctatcccaaaacctataagaactaatgataatcccaccaccctttgcttactcttttcagactcagcccgcctgcacccaggtgaaataaacagccttgttgctcacacaaagcctgtttggtggtctgttcacacggacacgcgtgacagttctttgttgcagaaaaatatttcactttgatgaagtacagtttatttttctgttgtcacttgtgcttttgatgtcatatctaaaaaaccattgcctggccgcattggctcacacctgtatcccagcactttgggaggctgaggcaggcaaatcacttgaggtcaggagttcaagagcagcctggccaacatggtgaaaccctgcttttacaaaaattatccaggcatggtggagggtgcctgtaatcccagttactggggaggctgaggcaggagaatcgcttgaacctgggaggcggaggttgcagtgagccaagatcgcgccactgcactccagcctgggtaacagagcaagatctgtctaaaataaataaatacgtaaataaataaaaataaaaaaacatgactgggtgtggtggctaacgcctgtaatcccagcactttgggaggccaaggtgggtggatcacctgaggtcaggagtttgagaccagcctggctaacctggtgaaaccccagtctccactaaaaatacaaaaaattagccgggcatggtggcacgtgcctgtaatcccagctactcgggaggctgaggcaggagaatcgcttgaacccgggaggcagaggttgcagtaagctgagatcacgccattgcactccagcttggacaacgagagcgaaactccgtctcaaaaacagaaaccaaataaacatttcctaaccaatgtcacaaaactgtacccctatgttttcttctaagagttttcagaattgcccttggaatgcagttccccactctttgggcacacccctgagcaggccccaagctaaatccctggccataactccccacactactcccaccctaaccccaagcaagctgcttacatttcagtctttcagtttcaaggttccatgtagggtgggcagctgtggacaggtatcaaggcagcagttggggccggccagcaggtttaggatgcaggatagcaagagaagagtgcctgactgggaacaaggccacgcctctgagacaagggcttctgggctgaagtagtgcctgctggggccaacagcacaacctacctggacagctgtggcaggtccttaagggaggggctgggcccactgctggccaccgccaccctagtccaattctccattgctaggagctgttgcgtattacctagaaaaggagcttgtaaaattgactctctggtcaccaccaaacttgtcttttttttttttgagacagagttttgctcttgttgcccaggctggagtgcaatggtgtgatctcagctcaccgaaacctccgcctcccaggttcaagtgattctcctgcctcagcctcccgagtagctgggattacaggcatgagccaccatgcccagctaattttgtattttttagtagagatggggtttctccatgttggtcaggctggtctccaactcccgacctcaggtgatctgcacacctcggcctcccaaagtgctgggattacaggcgtgagccactgcgcccggcccaaacttgtctgtctttatctctacttacagtgagtgtcaggtcaccctcttggagaccggtgatcagaggctgatgacctctcacagctgctggccctggggacctaggggatccctttgggaatcccaggtcaaccgggtgccagctccattgctctggctgtgtgggtggtggtgggtggtgaggcacatagaaagtcaccagcgccagggaagggcagctcagaaatcctggtcatgccaagtgccactcagggctattctcactctagtgagtgctcattggttcttcccgaagtccagagggaaggacaccatcgggggcgctgtatcccacccggcaccattagcccctgccacccaccacccagcagctggattcccacgggagttgcgggtgggggcggaaccggctgaggtctgggggcggggcgtccgggcgcggggcggggctggcgggaatgtgcgcacccccgcgcggggccccgcccgagcatcccgcgccgacggggctgtgccggagcagctgtgcagagctgcaggcgcgcgtcatkgctgctttgagacagccccaggtcgcggagctgctggccgaggcccggcgagccttccgggaggagttcggggccgagmccgagctggccrtgtcagcgccgsgccgcgtcaacctcatcggggaacacacggactacaaccagggcctggtgctgcctatggtgaggggctgcacggggagcccctagcccgccgccgcctgtcccggccgccgaggagggcgggcctcggggacgctgggggcgagttcttcccgcgggagatgtggggcgggcagctgcgcctggagcaccggtgcacggaagagtccccgggacaggctgttccccacgttggaagggaggaagcgaggaagtggccgggagagggtgcgcggccgcctcttggctcaagcccgccctctgggggctggggctcctcgccttcaacctgggagcatgttccccttaaactgtgaggccctgtgtgccacgcagaaggggacactccgcgcctccggccaccgtggggccccaaccgcagacctgggcgaacgtagccttctggcccagcccgttcaatttacagaggaggaaactgaggcctagagaggcccagtgaactgctggaggtcacacagcaggttcttggcggggctgcgacttgggagtgaggactcccagctttcagcggggggcgctttccgccccatctgcagcttggggagtgcacaggtacaggatgtccagagccaccccaaaatgtaaaggctttggagctccagtgatctgttttccctttgggctagctctcccccttgccccacagctcagggcagagtccaggtctgtgctccagctgcagccgccccgcccctgaagacctaagggggcagggctcaagcccccaaggtcagctggccctcaggatcttccctgcgacgctgaacctggaggttcagaacctgatgactgtggaggcatcagaacctcggctggaggcagtgtcattggagaggcttactccagctggcggaagcctcacgtactgcttgtctctcctgccaggctctggagctcatgacggtgctrgtgggcagccccygcaaggatgggctggtgtctctcctcaccacctctkagggtgccgatgagccccagcggctgcagtttccactgcccacagcccagcgctcgctggagcctgggactcctcggtgggccaactatgtcaagggagtgattcagtactacccaggtatggggcccaggcctgagccaagtcctcactgatactaggagtgccacctcacagccacagagcccattcatttgtctgatacactgtggggaaggcttgtagagtggagcatcccattgtacagatgaggaaactgatgcccccagaaggtcgggaacttgccctgggtttcccgtgacctgattggaggagccaggatttgaaccccagccttttttccctccagagccctaaaccaggaggacaattagaagtgtcccagcaacctcagagggtgggaaaatggagggcagtgggtcccttggcccagcaggttggtggcttctgacaattgagacacacaccctagaaacagctgctaggccgttgctgcccttcccgccaggacacctgcccttcctgtgccatcctcccaggcagccyctcttaccatcacctgttctttcccctgcagctgcccccctccctggcttcagtgcagtggtggtcagctcagtgcccctggggggtggcctgtccagctcagcatccttggaagtggccacgtacaccttcctccagcagctctgtccaggtaccagctaggccccagccctgacccagccctccttccctgaggtctccaggtggtcccagcttctactatgccttatggagggggtggcagggamtctccctggagtgtcattgaagccactgctgcttccaccagccctagcctccccacctcaccctgtactgcagactcgggcacaatagctgcccgcgcccaggtgtgtcagcaggccgagcacagcttcgcagggatgccctgtggcatcatggaccagttcatctcacttatgggacagaaaggccacgygctgctcattgactgcaggttgggctcgctcccctcgtcccctcccgccctrcactcagcagctcctgggtggagtgtgcccactgcctggcgcagcaagcacacgcttggcctcgtcatctcccccattgtaactccaccccaggtccttggagaccagcctggtgccactctcggaccccaagctggccgtgctcatcaccaactctaatgtccgccactccctggcctccagcgagtaccctgtgcggcggcgccaatgtgaagaagtggcccgggcgctgggcaaggaaagcctccgggaggtacaactggaagagctagagggtgagaactgccagggtgctctatcctggaggcggctgtgctccctgctggcgcctcagtgtggccttgaccctgcctgggaccccgatctccagggccttctgccatgctctccccagtcccttcaaacactgcgcacccagggttccaatctcagcagggctgcttgaaatcctaaaatggtcttatctaatcagaaaaatcatgtttccattgtggaaaatgtagaaaagtacaaagtagaaaataataagctataaggccactacccagagatagccactgctgacattttcacgtttcctttcagtatttttccacatctgtcttcaaagctgagtatatgtaatatatcatcactttccccccccacccccttttttttaagaggcagggtctcattctgttgcccaagctggagtgtagtggtgtgatcatagcttactgcaaacttgaactcttgagctcaagggatcctcccagctcagccttccaagtagctgagattacaggtgtgccaccatgcccggctaatttttatctttgtaaagacggtcttgcagtgttgcccaggctgatcctgaactctggcctcaagtggtcctcctgccttggcctcccaaagtgttgggattataggcatgagccactgcgcccagcccatttgccgtgttttttttttggacacagagtttcggtcttgtcacccatgctggagtgcaatggtgcgatctcagctcactgtaacctctgcctcccgggttcaagtgattctcctgcctcagcctcccgagtagctgggactacaggcgcccgccactacgcctggcacattttttatagttctagtagagactggggtttcaccatgttggccaggctggtctcaaacgcctgacctcaggtgatcctcccgcctcagccttccaaagtgctgggattacaggcgtgagccatagtgccggtctcttttttttttttttttaaactaaacataatctcagaacccagaaccctatcttatcttatgccatgaaaggcatatctcggtgtggctctttttttttttttttcttttttttttggtgaggtggaggcttgccctgttgcccaggctggagtgcagtggcgcaatctcggctcactgcatcctccacctcctgggttcaaatgattctcctgccttagcttcctgagtagctgggattactggcacccaccaccacgcccagccaatttttatatttttagtagagacggggtttcatgttggccaggctggtctcgaactcctgatctcgtgatctgcccgcctcagcctcccaatgtgctaggattacatgtgtgagccactgcacctggcctccgtgtggctctttaaagctccacaatattttagcattcaggtgctctgtcatttacttaactattttctgatacacctcacactgtgattaactttttttatttatcttttttattatttatttatttatttatttgagacagagtcttgctctgtcacccaggctgsagtgcagtggcacgatctcggctcactgcaacctctgcctcccaggttcaagtgattctcctgcctcagcctcctgagtagctaggattagaggcatgtgccaccacacctggctaatttttgtatttttagtagagatgaggttttaccatgttggtcgggctggtcgtgaactcctgacctggtgatctgcccacctcagcctcccaaagtactgggatgacaggcatgaaccactgtgcctggccatcttttttattttttaaagagatgggttctgctaagttgcccaggctggacctgaactcttgggctcaagtaatcttctcacctagtctcctgggtagctgcaaccaaaggcacccggtttatctgcattctcttttttttctttgagactgagtcttgctctgtagcccaggctggagcgcagtggcgtgatctcggctcactgcaacctccgtcttcagggttcaagcaattctcctgcctcagcctctggagtggctgggactacaggcgtgtgccaccagagcgagttaatttttttttttttttgtatttttagtggacactgggtttcactatattggccaggctggtcttggactcctgacctcaagtgatccgcctgccttggcctcccaaagtgctgggattacaggcacaggcgtgagccactacacctggcctatctgcattctcttaatagtttcttagaaatggattcttaggagtaggattacagagtcaagagacacaagtattgtaggctgggtgcggtggctcacgtctgtgcctgtaatcccagcactttaggaggccaaggtgggcagattcattgagctcaggaattcgagaccagcctgggcaacatggcaaaaccccatctctaaagaaatacaaaaattagccaggtgtggtggtgtgtgcctgtagtcctagctacttaggaggctggggtgggaggatcaattgagcccaggaggttgagactgcagtgagctgtgattgcaccatggcactccagcctgggcctcaaagtgagatcctgtctccaaaacaaaaaagatacaagtatccttaaggctcctgctacacatggccaggaaggtagtctattggacagttttaaggtcattatcaatattagctcatttaattccctccaaaactctgtaaagcacattctgctaccatagttgtcatatttttgatgggggaatctacagtgagaggcagtgctgggatctgaaccccatctggacagattagctccagggcccatgctcttgactggctggccgtgctgcccacactgagttgttccttcctggcagtgtaggtgtgcctatctcagggacactagacagctccgagggacctccctgtccttttcctttgtgaactgtgtcacgttctccagagcagtgctcagacctgccctgcctgctctgtgcagatgcccttggccaaggttttcacactggaacaagttggtccctcctccccaccccagcctgtccttgcccctcctccaggtctccttctgcataggagcagctcaccctgcctcctccagagtcctgccctagaagcgcaatccctctccttccatcccctgcctggctgcctggctccttccctcagcctccaagacatgctcagttttcttccctcctaaaacaccacccactgtctcatttccaytcatttctttctttctttctttctttttttttttgagagggagcctcactctgtcacccaggctgaagtgcagtggcatgatctccactcactgcaacctccgcctcccaggttcaagcaattctcctgcctcagcctcctgagtagctgsgattacaggcgcctgccacgatgcccggctaacttttgtatttttagtagagacggggtttcgccatgttggccaggctggtctcgagctcctgacctcaggcaatctgcctgcctcagcttcccaaagtgctgggattacaggtgtgagccaccgcgcccacccattcatttctcagtcctttgaatctacttgcccctccatcccgccatgccacctaccctaacaaccttcccccttaaacctgcgggtttggccgggcgcagtacactgagtcagtactggtactgacccaggtacccctccagcctcagctccagtcagatgggacagcctgctggtccctggctgcttctgccccctcttctggagccccagccctggaggctccatgtggctcagcagaacttcttctcctcctgctctgtggtggcctcttgagggcagcactcaccttggaaagcatggagtgtttcaaccctcactgctccctgaaggaccaaggtgtcccattttacagtcgggggaggaggcactgtgataaaggggctcttcagacccacgtctgagagagccaggctgcccygcccccgcggccttccacccttcaccgtccagccagggccactgccatcaccgcctgctggtcctcacaggcgtcggggccccaggcagtgagaaggcggctgctgactcctctttcctccccagctgccagggacctggtgagcaaagagggcttccggcgggcccggcacgtggtgggggagattcggcgcayggcccaggcagcggccgccctgagacgtggcgactacagagcctttggccgcctcatggtggagagccaccgctcactcaggtgaggccctctgggcgccccgctcctgccgggcacaggccggcccaggcccaccccttcaatatcctctctgcagagacgactatgaggtgagctgcccagagctggaccagctggtggaggctgcgcttgctgtgcctggggtttatggcasccgcatgaygggcrgtggcttcrgtggctgcacggtgacactgctggaggcctccgctgctccccacgccatgcggcacatccaggtgggcgggcaccagggcctgggcgggcaggagcggcagcttyccggggccctgccactcacccccagcccgcctcttacaggagcactacggcgggactgccaccttctacctctctcaagcasccgatggagccaaggtgctgtgcttgtgaggcacccccaggacagcacacggtgagggtgcggggcytgcaggccagtcccacggctctgtgcccggtgccatcttccatatccgggtgctcaataaacttgtgcctccaatgtggtacctgcctcctctagaggtgggtgtatgcttgggtgtcagagaatgggggatgtcagaaccgctcccctaccctaggggagcacctctcaggccccagaagaatgggcaaggcagggcctagcagtagcaaaaccatttattaagtgcagaacaaaggctgggtccttgtgctgctcccagctctttggttacaaataggtttgggcccacagaggacggaccttgcccccttcatgcctcccaggagacacctagcccctgctctgtgcatgcgggtgggctgggcccccaggggtgcaaggatggagtagctgaggaggctccgggagaggagtcgggaggacgcctagtgggacrtggcgggggtggggcagggtgcggtcaagtttggaagaactgttggtccatgtgggtgctaagggttccgctggtggtcagtgtccggctcacaaactcctgggtcacatgccgggtgagggagccgcctgcctccaggtgctgggcccccagggtcrgcccatctgtggaggaggaggcattagatgacctggcttggggtctgcccttctccctctgctagctccctgtcccaggagagccgggatcccctagccctcagtgctcacccactaggaagggctcggtggcgctggtgtgggtggtggwgatgctgctgtactcgctttgyagcgggtgctggaagagcccggcacgrctgcccagctgcgggaagggtcctggggtgggcagataggccagtcagagggtggtgccagaaggaggcacggcccgaggaggggtgggggtgaaggaaaggacaggtgcctacctccatcctgggactctatggtgatgatgccctcgcgctctggcccgaagccctcagtggtcctggcctgcaccttgaacttgtagggcacgttctcgctgaggcccggcacggtcagccggctctcggggctgtctccatccacccggaatgcggtggctggccctgagcagggaagaygccttcagcctctgcggccccctctttacccctcccctggccactcctgcccccggggtgggcagcacctcctccttgggccatctcacaggtcaccaggtagccgacgatatccccattgggcctccgtggccgctcccagctcagctgcagcgagtctgggctcagggcagtgaacaccagcgggcctggggcactgggagtgctcaaagtgaaggcsgagcctgggggcagtagaggaagagcatcagcctgtgggtgggtggtgggcatgatgggggcagctctggggctgggggaggcaactcacctggcaggggacacagtgggctctgcgggtgcacctgggattcaatggtgatgacaccctcacgctctcggccccagccttcctggctctgggcccgcacgcggaacacgtaggagtggttgggcaggaggtcttccaccaccaccgaggtctgggcagggttggggatgttgagccgatgcagctcacctggggggatcaggtgggggcacacagtagtgcagtgttactcccacccctggcctgatcctcctcgtccctaagctgccatcgagacctagttatcacccacccaggactagctgtggtttgggtacaggttgggtacagtatggtatggctggttgttcagattgtgtactatacaagagtggagcctgtaatcccactcatgtttaggcaacatcctgcatcctggtcatgctgctttgaatgtgcctgcccagggaagtgccacttccttgttcccccaaaggcatctcaggccagcagaggccctaggatcccagcccaaaggggccttgttaggcaaaacctagcagagaatgaccaggagagaggcccagggaggtgggtgagacctcagaagaggggaggcaaagaagtggggtggagaatggggtgggagaccctctcaggctggatgggggctttagcgctcaagggacttgggtgggttcctgacacagctgaggtaccctatgtgtctcactggggccaggccttgcagggctgcaccccrcagcctggcagccaccatgcctcaccgccgttcagcagctggtactccacactgtagccctgcagcggccgctcgcaccgcggctcctgcyagctcactctgagagatgtgggccccagggcagagaacaccaggcgggtgggcgtgtcgggcacaccagcagtcaggcgagagtctggggacaggaggccgcagtcagccagagatgcaggggctagggtctcagtgggagtcacagtgctgccccctgacctccctccctcagctggcatgtctacactgaccgctggctggacaactcactcaccctgcaacaccctgtccaggctgcccagcacctaccgcacatcctccagcagggtgcaggccctgcttgtgccaaaagagagtgagccccgtgagtctgccagccccaccccctcaactgctcagctggcctggcccctctcctgccccagccccagccccgccccctgggagggcagaggcagagttaggcatcagcactgatggtagggcaggtggttagcgcctgtgggcaggcgggggtcctgtggatggaatggaggggaagcagtgggcacagctggcggctgctatggtggctggatgacagatggagcaggacagctgtggagacaggatggccacccctgtactacctgggccccaggagggcgctgctggcctcccagccaggattatagagtctcgtgggcccctggaaggggggaaccctttcatctgagcccgactccgggaccccagggcccaggacagcggaagcctgctcctcccgtgttcccagatgggagggaggcctagggcaggacaaaacaagagtgagaggagcagggagtgtgcatgcatgtgtgtacgtgtgcgcatgcatgtctgtgtacatgtgtgcatgcatgtgtgtgcacgtgtgtgcgtgcatgtgtgcatgcgtgtgtgtatgttggagaatgggcggtggggacagcagacagaagcccgaggctccaggagctggaagagaggaagggttagtgggagaggcagggttggctgaggtcactcaccgtgggaggagacggaggtgagggtggagtagtccctsggcagtgtggtygagtgtgagtgttctgagcgggtcagtgagttgtagtcccgtgtgagggtggaggatgtgcttagcacgcrgtggggcacgtgtgggctcaggtgggtgccataggcagcagcactggtcgtggtcatcctgtgcagggagttggtgctgcccgggaaggcaaagtccatccggccattcaccaggtgctctgcagggggagagcagggtcccttggtcaggcctgccccagacccgggccccgtggggcaggctgggccctgcacattcctggtcacccaccctctgggtggcttttgcttaaatacaaccagtttccctcaaaccactagggacagaggccctctgtccctgcaggagcccaagggccacccaggcttccacagcccatatcctctggccggccactctatcggtgtgagcactgctgaccctggcagtggcgggggtttgctgcgtctgcagtcagctctgccctggggagatccccaagcctcttctgaatttgcaccccctggccaggcaggcaccataagggcccaagcgcctgcctcacgcgtcccctggcactgggccctgcctctgagcagctgtgctcccagccgccaaggcccgggcctggctgaaactggggcccccgaggcagcgcagacgcccaccccaggccctcaggcgcgagtgaggctgggtgggcgcggatcggggggcggcgggtgagcctgtcacctccggggggcccgggtgtcgcactgcggggcaggctgccgcccttcccgcccgcgccgccgtcgtccgggggcccgtggggcgcctcggcgtcggaggagcgcccgctgctggccgacaggcgcgggatgagctccgggggcagccgccacgtgacgcgccgcaggtccagctcctcccccagcaggggctcgaacttccagccgcagccttgggaacaacgaagggccgcgttggcaccgccggggggcgccgggccgagcagggccaggcgggggaaggccgtaggctctgcgaggggagcccgtctccagctcccgggatcccggggtgtgtgttgggggcgggggtagatgcgcacggccggagcgggaaggccgcggcaggtgaaacccttgcgcggctgaagcctttccagatgagcgagtgcagcctcggcacagctggggaggagagacccccggacccgccagagacctgggggaagtctgggctctgtcaccagctgtgaggtctcccttgctttacttaacctctccgagactcagtttcccgtttgtacaatggagagaggaatcttgcccctgcccgcctcccagggaccgttccgcaagccaccgagcgcttcgcaggtagtgttagaagcagctgagctggggttccagagtcacaccagctgcgctccacctgaacccctcaaaatggctccttaagcccaagctgagccccgtgggggccagtatgtgttcaccgggggcagcttgaggcatcggcagggacagaagaaaatacaaaagatatacgtgccccagaggtttttccactcatggtactgtgtgattggtatcccattatacagagcagaaaagtgaggcatggaaaggatgagtgattcatctgatgtcccacaggtggagccacagctgacactgagcactcaggaggcccagctaagggctccgcagcactttgtgctgggaatcaaggaggaaggacagagctgttgggggtgttcttgtctccttggctcccctacccctgccaggtggccgcctggtggctgcccagggctcctgggccaggcctgcccctggggggtggcctgagtgtcctgtgtgcatggcacagctggtgaaccttcaacttgtgaagctgtgtttcttcgtggtcccgtgggcatgaactcatgtgcgcttgcacaaggctgtgtgtgtctgtcccccaggcactggttcctgtgccccatgcacagatgtgcactccattgcatttgtccaaggctgccttaacctccatgtcctctagttgctggcccctttgccctctctggacccagtggactcactctgtacccaagacccccactgtcctcttgtgggtcccaggtctccactcaccagtgtcatcggagacgctgggcctctggctgcccgatggagagcgtagaacgtmatcgctgtacataaggaagctgtcgtagtcctccccgctctgggcrtccacgatagggatgtcagggatgatggggactgcagggcaggggagtgagccagggccctggctgctgccccctgcccccctgcccggtctgcccctcacctccctgcccaccactcactggacatgggcctcttgggctgggtggccaggttgatgatggcctcccgctcaggcccccagccggccccgttgcgcgccttcaccgtgtagcggtagggctgggactcccgaaggttctcaataagcagcatccrgttcttagggttgtcaaccagcactttcttcatgggcccaataggtcctggggcagagagagtgcttcagagggtcacccaggtcccagcctggtcccaacaccacccctgacacagcaggacggccgtgcatcccctggatggcacccaggggctggggaagcaaggcaaagccagccactgctgaattgccacctgcggagccctgagcgtcagcatgactggcgtggacatatgtcaccagtcctccaagggactctgctgagtaagtggcagagccagggctggactcaagttggcctcgatgtcacctctacccatatatccacggtgcctccacacaa

SEQ ID NO: 95346 - DNA, 42889 bp, Homo sapiens
tgcctccttttctcccacattacacactgccctcctcctcagcttacccagccttcagaatccacttgaacttgagccccttccggaatcgctcctctttccttgcctagagctcatcccttgcttgctgctctgaacaaaaggtctgacctgttgagccagcactggccttgggctggcttcggactcctcttacatcaatattctcatctaagggtgatgtcttwtctccctagacaggttgaaagctctttcaggggataggcctggtatgatgctgcacacatgtcacaagcctccaatcaatagttcaggaataaataaatgtttgtgtgtctgtgtttgtccccccagctctggaaagcgtgggagccaatgaccaagagggcagcctctcacttatcaaagagccacattcctcccgagttaacgagcatatttgtgtgaataatgttttttttgttatacacagtttacatacatatatgtgttgtgtatgtgttatatgtgttataacttttttttttttttgagatggagtttcgctctgtccccatgctggagtgcagtggcacgatcttggctcactgcaacctctgcctcctgggttcaagtgattctcctgcctcagcctcctgaatagctgggactacaggtgtccgccaccacgcccggctaatttttgtaattttagtagagacggggtttcacaatgttggccaggatggtctccatctcttgtcctcatgatccacctgcctcggcctcccaaagtgctgggattacaagcgtgagccacctcgcccgggcttatatgtgttacaactttctatgataaaagtggagatgattcacatggggtgaacctgttttcattctaagattgaaaaacaaaaatcaaaaaactcagaatgaagtttgtttttcaatcacctattaaatggaaaatggtaattttctgaaaaagcatctcattatgggggacttgggggaatggagagatgtagggcaaaggacccaaagccgcagatatgtggggtgagaagtctagagatccgaggcccagcatgagccctatagtggcaacattgtattagatccaggaaatgtgcacagagtagattttccatgctcctatcacacaggccctctccccgccaccccacacacagagggtaactgtgggaggggatggatatgagaatttgcttgataatcataactatctcactgtgcataagtatatcaaaatatcatgttgtacactttaaatataataaaaagcatcttattacacaacataagtcacagggaatgaaaactgtgggaacctaaagtaccccagccattgtgacatttcgggggagctgtacccacagaaggagaaggtgtgcctgtctgagcccctcacaggcccgcacctgcttctggaaacgccactgctgattcccatcagtcatggtgtttacagctccaggcaggatcatcactggagctgacttgctaatttctgaaaagccagtatttcttttctggaggatgttcatatgccaatctcaggatttcctgtgcatgaagaaatgaggacacagtgtggaagcgtgcttgcctgaagctttgttttgttttttcatcctggctccaaccccaggcggccctcctctcgtcgggagaggaacactggccgagtcacagccagtcgtgctgactggatacaggtgcgtagggagggctccaggtggggactgtcccatgtgtaggagaggaatccagggacagggagaggccgagtgggcagcagagggacaggccagtcggacgcaaagcaggaagtggagcttcctcttcccattgtcatctggatcctcccgctccgtgtggggatcctcacagtcacacctctttgagccagctggtggccagcctgcgcacaggagggacctcctggggtccccaagggaagccacacacacaaggccccaactcagctgctctcccagactctctccccactttcttggcgggtgcaaagggatggaaaaaaatctgaataactaatcctaagtagtacaagttatgccatttcccccagagaaacctctttcctctaaactctgaaggcacttagagcccataccagttagtgctaaattattttcccttttggcccgtttactattggttcttcactaatttggtctctccaactcaagtccaacttcctagagggcagaggatggcatgattttagtaccatatctccccaccacccctatatctagtacagcttaaatacatgaagtatataatttaattaaaacaggctgaaaatacatatatcatgacatcctatcccaaatatataatgttcgtcaatatgagcaggtataatagagaaccttggcgtggataggcttgttttgaaaagcagcaaaacctcaagcagaagctgctactagcacatgtgggctgaggaagtctcccggctgcagcctggcctctatggccaaccctctaggagccatttgcactgggtgggatcagggtacattgctcagaacattgtgggtgatggccctgggaccgaacgtgtctcaggagaaatccaattcctgattctacaggtaagtgcctccagatgcctgcatcacagttacccagggcctacccacctcaaggcagagtcgggtatccagatgactagaggcagcaaaggacacgattctggagttagggttggggaatggccccattttccttctttggtagaagtcaacactccaggacacctgaatggcaccagaggctgccacaagggccatagcagtgacagctgagactagtccctggcagaagccaagaactctgcaggatcagagaggtgccagagaacctgaccatggaaatgtttttgtcctgcttgtagtaataaaccgtcttccacccttgataccaaaaggaataagcagcaatcttgggctcaatggctcacacctgtaatcccagtatttctggggcagaggtgagcggatcgcttgagcccaggagttggaggcccgcctgggcaacatggtgaaatcccttctgtaccaaaaaaaaccacaaaaattagctgtgcctgtagtcccagctactcaggaggctgaggtgggagaatggcttgagcccaggaggcggaagttgcagtgagctgtaatcacactgcactccatcctgggcaacagagcaagaccgtcttaagaaaaaaaaaaaagcggcaatcttctccaaggatcaagggagggtgccatcagttagtactttctaaagctgtgtcaccatctctttttagcccacttcccctccccgctccccatccctcagtcaagtccctaggatctgagtttgcttttggagcttgaactggccttgagctcagagacatctctctgcggaccctgcttctctattctacatctgtcccaatagttggagcaggggctggaacagcttaaggtgagcagcagccacctgttcccaaaaaacccttagcttggattatcagcagacagtggaacatcagtttcgtacacattttgtatttctcaccccatctgcaaacctttcctttgaagagtattccaagaatggaacccagagctccccagaagcacactgttgcttgggtttggactagaatttaatgttccctccaactctagagaatccatgatgtgtatctttacaccagatgccactaggagtcttcctgtcccttatcattttagttaagaagtgactcattgctgtcatccttgcttcacagagggaggaacccaggcttcagattctgcccttttggaacggaagaaggagggagagcggggaaagacctatgtgtgcagcactatggagacagttcactatgtcgggtacaacacattcccttagtctcatttgaaagccatgatgaacagagaggtgtggaaaatctaagatcacaaatatgccatgagaaagtatctttgtctctactgctactttacaaaaccacgtctctaactgctaacacttcaaattccctcaaaataagcttcttttcccaattgtccctcaccaccaactatagtcatgctctgaaattattatggaaatttagcatctgaaaggaacaggaagttataattaattcctaattagaattgggcacaagcttttttttcttattttttttttaatttttttattgtgacagagtctcgctctgtcgcccaggctggagtgcagtggcgcgatctccactcactgaaagctccaccgtctcccgggttcatgccattctcctgcctcagcctcccgagcagctgggactacaggcgcccaccaccatgcccggctaattgttttgtatttttagtagagatggggtttcaccgtgttagccaggatggtctcgatctcctgacttcgtgatccgcccgcctcggcctcccaaagcgttgggattacaggcgtgagccaccgcgcccggccgggcacaagcttattgtttttcttctaccttttctaaatgtacccaatgctcttcatgttttctgccagatgttctagtcactgcatgatgggattgttacttttgctgcttctctggactcctcactcttagtcattttaaatatggtcaaaatgacaatctttcttaccatatttgatatataactttcaaaaagaataaaacttagcaccctcctattagtccttatctaaatggaaacttattagcagagcatcaagggcccaataaagtgccccctcttttgaaacttatctctactccctttcatatatttcaatcatgtcaatttcttattgttcttctaaataggtgctgattactaaactctattcgtgggttttattttttatgttcctctccattaattaatattcttcactgactttaagacttcacgattcattcttttaaaagaacgtgtttgatttcctccactgttaactgctaaatatctctctgatatattgttttcaggctatctttctcatctggagtaattatgtttcaagtgtcagggggaaaataccttttctatcctgtgcaaaaactcatgctgggcactaagagcatggagcatgtcccagttatctattgctgcataacaaaccaacccaaacttagcagtataaaacaaccactgctttagtatgcacatcaactttcagggtcagaaattcttttctccttcatgtatagagtctcagctgggagtgacataaataggtggagacagacctctccagcccagtccagccaacagcctccgctcctgcgcacccgcagcctggggccccaggttcctgtggtctcaccgaccctaatcctctcatctctcctccccattccctctccaaattgtttcagaattccaaattcttatctggatccggcaaattaattcagctactcttcagagtctctcagttattcccaaattctctcggaagcttgaatttacctatctaaatccattctcaaaaacacattggccttttctagccgggacatctccaacagtagttgctgttagaaactgcaatttccccttctctgcatacacatttttataaattgatttattggtaggcaaattacatttttaaaaaaaggcatgtgtgggttttcagggaagcctggacaggacgtgggcgtgccgggagctcgccggagcagctggtccggctctgggcgcccagcggaaccagggctgtactcacctggatgccggacccgccccctagagaccccgccccctggcgttcggctactaaagggaaggggattcccagggggtcctcaatcctggactctcccgacccctagctgtcggtccccctccctgcgcgcgcgccggcgggtttcctaccctccgaggcgtccgctggcctgcgccctggcggggacgtgggcggggcgrgcggcatttaaggctggtgccacctccccggtgcagcggctggcgatcggccgcggaggtgcgtgcagggcccgcgccgccgccggtatctccaccgccaacacctcagccactgccactgccacagccacacgaggccccccaccgtgcgctccgccgctgcggtcccggatccgcgctccacgcccgcagcccgcggcgccaccagcccagcatgcaccaggtgcgtgcagcccccgcgccggccgaggatgcgagacgctgggccaaggccccggggaccggagcaggctgacgggaagcgaggaaaaggcgaagaggagaaacgccccgtcccggggcaaggggaggccgcctttcctctgagcgccccccggcctgggcaccgcttctctgactccccgccacggctccgtgcggccgccggggctggctggggaaagaagccagtccagaggagcgagaaggggccaaggggtcctaggccagctccatggcacctgcgggctccgactcggaggatggggtgacatggattcgttgcggtctgaaaagacttccggttagggccccctgatcaggactgagggtcgtaagcttagtgggtgcctcctccccaagaaacaggacgcacagctgttgtgtcccctgggaaggacacctcagaggaaacctcgaggtgcctaaggaacctcgaggttctaaggaaacctcacagctccttggaggcatcagtcaggagttgggggggtaacttcccacctgctccacccagagaagggtcaccctgaggagctgctggctggcctgtgcccaccccgcctcccctctacacggacggagaggaagccaaggtcggcgggaggtgggggagagactccactgtccgactccctccggcctccccrgaggagggaaggaaagggagaaggggctcctgactcctgcaggtcctgaccccgcagaggggcgctcagcacctcttcggaaaccccatttggggccaatattgcacctgggcttctctttcagaaaacmccagaaatttactccgtggagctcagcggaactaaggacatcgtgaaaacagacaagggggatggcaaggagaagtataggggtctgaagaacaactgcctggaactcaaaaagaaaaatcacaaagaggagtttcagaaagaactccatctggtcagtagccttaagccacggggtcctgccggctatggcccttccccgcaagagcttgcccctagaacccacctcttaccacagacattcagtctgagggatttgaaatccccttgagattgtgtgtggtgtgtggtgtctgcgtggtgtgtctgtgtggtgtgtgtgtgtggtgtatgtgtggtgtgtgtgtatgtgtggtgtgtctgtgtagtgtgtggtgtgtgtgtgtatgtgtggtgtgtggtgtatggtgtgtggtgtgtgtgtatggtgtgtggtgtgtgtatatggtgtgtgtagtgtgtggtgtgtgtatgtgtgtggtgtgtgtgtatggtgtgtgtgtatggtgtgtgtatgtgtggtgtgtgtgatgtgtgtgtgatgtgtgtgtggtgtgtgtgtgtggtgtgtatatgtgtgtggtgtgtgtgtggtgtgtgtatgtgtgtggtgtgtgtatgtgtgtggtatatatgtgtgtggtgtgtgtggtgtgtgtatgtgcatggtatgtgtggtgtgtgtgtagcgtgtggtgtgtgtgtagtgtgtggtgtgtatgtgtggtgtgtgtatgtgcatggtatgtgtggtgtgtgtgtagcgtgtggtgtgtgtgtagtgtgtggtgtatatgtgtggtgtgtggtgtgtgtgtggtgtgtggtgtgtgtatgtgtgtgtgtgtgttttgaatggtgtgatagtatccacccagaggtcagggcctctgcaggattcctgcattctggttggaggcagtccctgtagaactcagaaggaagagcctctgattccaggccccacaggcatggccagacctctctccccgcagctgcttcagtgagagttaagtaaccacttgccagttttcaattgattagtaaaactatttgagctggaacttctgaggaggaaaaccaaagcccctaggccatgctagattgcaggtgtgaaacctcatggaaaagcagtttcagtggtaaaaatgtggagcttggattgggaggacctcgggccccatcagagtcccacttctccactgagctgaaactggcaacaaatgactgaccctcactgaaggtccatttcctttatgtaaaatgggaaataaataatttgctggggtctatgaggggaaaaaatgagatgaggattttgtaattcacgtgctttaggggagtacaatattattattattaaggaagagctctggagttattaaaactagccttttttttttttttgagacagagtttcgctcttgttgcccaggctggagtgcaatggcgctatctaggctcactgcaacctccacctcctgggttcaagcgattctcttgcctcggcctcccgagtcactgggattacaggcgcccgccatcacacccagctaatttttgttgtttttagtagagacggggtttccccatgttggccaggctgctctcgaactcctgacctcagatgatccacccgcctcagcttcccaaagtgctgggattacaggcgtgagccactgtgtccagcccaaactggccactttaataataaaactgccttgggtctgaaatgtgacagattttatcttgggaacaccgaaggggaaacttctacacggagcttgagatgggctggattgtccccaccgtccttggcagatcttaaagctctgtgactcctgaggggagtctcttttgtgctagagagccatttgttaagtattcagaaacttggcaggctgactgacatcctgttagcagcttcaaacttggttctagtgagaaatcagcaaactctacaaatccgagctttgtattgatcgttcctggagagtttgttaaacatttaacagtataccactgggcatttgtccgtatctatcatgagagacatttaagaacgcttccctgaaactggactgacctcaattcaaatcccagtgtaactgaagttcagtttcctattttgaaaaacataagatttttttttctacctcttaagggttactaggaagattaaatgagataaaacagggaaaagacagcacagcaccagacgatagatcgttcttattatttcccattatctctagcatttaagattgaagacatatctgtttttcccttgacattacaagggtcctgtaattttcagcagcatattgaatgcttttgcctcccaacmtttcttggcaaattagtgcctaatgacaactgaagtatcccggcctttgaatgaaagggccaggcagtgacccgaggggtgggtggggtgctgccctgtgctagtccagtgctggccagcagagggcaccccagataaccaccaccacctcgtcccacccctcccccatgctctcatcccccagcccaggaagtctgaggtccatgcatgcaaacaatggctcggatcatccactacttgtatctgcccaaaacttagtgggttgtgctgtgctctgtgcagaacacagccttaatcttctgaatccccagcaatatcacactcaatcagtattagtagaagggatgaaggagcaaaacagaatctggctgagaagagggctagaagcaagataataatgataataatgaattctgctttattggaaggcctagtctcttactgcaacatggaactattttttgcatatacttaagaaaagagatgatgtgagcaccagtcaacagtatcaatctttgtttcagacaatcagggtttaaaaaatcctgagtgctggactttctagggggagtgaggaagacttaccctaggttttctgctacaggaagagacttcttgtcctttagcccagtggttctcaaagggagaggagaagaggattcccccacccctctcccaggggaaaaatggaaacatttttggttaccacaactgaggggaggatgttagtgggtggagcccacaacaaagaattattckcccaraatggcagcagggccacgggtgagaaamcctgctgtagtctaatgattctgtagcagaattcacaagtggcagccacaatgctgtgggtttattcagcagaacttttccctgcagggtttctctgcccagtgagctccctgagcgtcacagcttgagtgagggaagctgcttttccctgccagagcccacacagcgaaggaggaggagttgtgccagcccaggaagcggttctagtgtggttttgccatcagccccagccaatcccagggttcaggcctgagggaagcctccagctcactggcacctggaagatgagggtgccagaacctgtatgccctggagttcagattgaagcgaggtgcatggctttgttcagaaaagctgcaggcagcttctgggtagtaayagcaagtgcaggattgtgccgactcagggacagtcactcctgaggcagtgccatccttcgctgggcagctgcctggcacaggggttctttctctcctgtcccccacactcctcgatcccctcccatcctcagggctgctactcccagcttccatggctggtcaaagcttggggcttgagtcttttggaattatctaattcactctgttcttcctttcatggacttcaggatgaccacaaactcagcaatagggaattggaagagaaatatggcacagacatcattatggtgagtcgtgggaaccagggatttggaagagaagcctcccaactctacagagggaaggctgtgtgtggyggggggctgtgtggaagagtagcggcacctttaggaggaggggcccctgcagcgcctttgagactgcagttatttgcatctggacacagttcaagtcaacagaaaaacctactgtggggctcacactggcctggcagtgagagggaccragagggacagatgacccctggcctcaaggagaaagtggccgggtaggggaggcaaatgtgtatggaagtgtccygagattcactctatccccctgggatggctacaagaagtagaaacgctatgctgggacaaaggtggattctgatggaaggggccagagccagctctcgggctgctgccatgtttgcgctgggactcaaaatgcttcggatttaagctggtgggggaccccagggccagtaagcacagagcctgcttggagagaatctgggcttgccggaagctagtatgtgtggagaggggacaggtgcagcaggaatgaagccaggaaggtcatctgggtgaagctgtcaaagtattcacattaaactaatgagtaggagctgtcttagaggcagaagggacatggtttccacacatggaggtgctttcattggttttcaaaaggcagttctcatagaagattctttttttaaagtgagaaatggaagggtctagaagaatggaacaacagcccaggactgtgaaatgaggatctgaaataatgtcgaaagacattacaggggccagacgtggtggctcaggcctgtaatcccagcactttgggagactgaggtgggcagatcacctgaggtcgggagtttgagaccagcctgaccaacatagtgaaaccccgtttctactaaaaatacaaacaattggcagggcgtggtggcacatgcctgtaatctcagctactcaggaggctgaggcaggagaatctctgaaacccaggaggcagaggttgcggtgagccaagatcatgccattgcactccagcctgggcaacaagagcaaaactccatctcaaaaaaaaaaaaaaaaagggccgggcgtggtggctcacgcctgtaatcccagcactttrggaggccaagacgggcggatcacgaggtcaggagatcgagaccatcctggctaacacggtgaaaccccgtctctactaaaaatacaaaaattagtcgggcacggtggcgggcgcctgtagtcccagctactcgggaggctgaggcaggagaawggsgtgaacctgggaggcggagcttgcagtgagcggagatcgcgccactgccctccagcctgggcgacagagcgagactctgtcgaaagaaaagaaggaaagaaagaaagaaggaaggaaggaaggaaagaaagaaagaaattgcagagagacamaaccagcaggacttgmggggatttttattgagcccctcatctcgctagtcatgtcacagcagcaggaggaggagagccggtcgggtgatgggctggggtgggggcagggaggtgagagcagggaaggcaggagggtggaggcgatgatgaacttattgtgagttataccaggagaagtctctccggaacacccctgaggaaatgttccacagttattcagaaagatgagtctggggttctggaaaaggaattggagtggagggagatgggatcgaggtggtgagcctgaatctagccattcaacagatatttgaatcactaccacagaaaaagcatgagacccgggagagaacacaaaaatgaccaagactggcctgtcatggtggcttaggtctgtaatcatagcactttgggaggccaaggtgggcagatcacttgaggtcaggagttcgaaaccagcctggccaacgtggtgaaaccctgtctctactaaaaatattttaaaaattagccaagtgtggtggccgctgcctgtaatcccagctatttgggaggctgaggcaggagaatcgcttgaacccaggaggaggaggttgcagtgagacgagatcgcaccagtgcactccagcttgggcaacagagcgagactctgtctcaaaaaaaaaagaccaagacagagtcctgccctttaagtagcttacaacataattagggagaagaggtatctacagacttgtccaccaaagatcgtctgtgggggaaattcctgtgaacatgtagggtttcaaaggtgagggtgcctcacggatggcaggccccccagggcaggggctgctcacatgggctcagggcttgggtaggatttatgcctgtcaagatgaaygagaacttaggctggatgtgtagaaaggtggaaaaggagcaggcgtaaggatggaaactaaagccacatgctctctgtgcaggattccagaagcttccctatttcctggggagttactgcattgcccttagccctggtgagcagcttcytcattccaagtcctccttcatcaaattagtcctctcrccggataaacctctaagaaactaaaaccccttagcagagcagagtgcagtggctctggacccagtcaccacgttgaacctggtcgctaccattgacaggccaggtcccttcgacaggttacgtaatttctctgtgcctcaaattccacctctgcraatgacgagagggaggaataatggcccctgcctcaagggttattttaaagactaaatgagtgaatatacagagcacagtgcctggctggtattaagcattacatagtctttcaaaaaagctgggcagctggagaagtgaggcacggtctgcttttctcgggaccttctttggscacgttaatgcctcaccccaagctgcaaaaatrtgcagcccaacccctgagggaggaggaatgtctaattcgtatttgttttggttgtgcatgtgctttgtttggctttcccagggtctctccagcaccagagctgccgagctcctggcccgggatgggcccaactccctcacccctcccaagcagacgcctgagatcgtcaagttcctcaagcagatggtgggggggttctctatcctcctgtgggtgggcgcctttctctgttggattgcatatgggattcagtactccagcgacaagtctgcatccctgaacaacgtaaggctctggggtgtcccctcctggttttgctggcagagccatccagtgaggccttgggggcacagctgggggctgaatgccactgcctaggtgtgggaaagtcaggcattttcccagctgtaaaacagaaattctatctggctttctgatcttctagaggcagtgtgggcatgaagagggatacacaaaacaccttgaatttttaagggggagaaaatctgcatccatgtgaagtagtttggggttctgtctcccccaagctaacctcttcctttaacrcggagagcagctgtgcctgccgagacatgagtaccaaatccacaaaactgaattggccaacgtgatgccaagagacagaagccagaggcaacaagctacatgtcataggattggattgacatgaaatgtgcagaacaggcacatccttggaagcaggaaccagatcggtgatgccagggcaygggacaggagcagggagtgacggcagaggggccggagggatctccaggcaggatggagatgctctgaggctgcggtggagggtggtgtcatggctctgtaaacttaaaaaaaaaaatcaataagttgcgcacttaacatgggcgaattccatggcctgtaaattataccagggcrtaactgccagcattgcatcctcccgtggagagctctagccccagggcccggctgcttcccactgctggtttctctgactgacgccctccttctcacccaggtgtacttgggctgtgtgcttggtctggtggtcattttaacggggatctttgcttattaccaagaggcaaaaagcaccaacatcatgtccagcttcaataagatgatccctcaggtgagtggcagccacctatcctctgkcctctggtgactcccaggtgaggaagcctcagctgggaggggcacagggccctgagggctacgggtttccacttccttccctgtcggagcaatcgtgggcgaattaacccatctgtcagaaccccagttcctcacaggattttgatggtcaaatgaggcaccacccagggcagtgctggttagcscaaggcatcttctgttcctgctcctcagtgtttgtggatagtccttctgggttctggaagggacctgtggaaggtcagggagtgttctttcactggcagccaaggagaccagcctgcaattgtttatmtgtgaccatttttgctcctgagccccagaatgcatttggyggggaagcccagtgctcccttcttccccaaaaacccstgtcaggtgtccacactgtctctggcccagagaactgtgggctggagagattctgggtggaaaagacgcctcctgccaagcttgaagcaggagatcacctcgttaaartttccctgacactcrcaagattatcagcctccccagccccaccttcagtgttctgcccagacgcccagccaggattgctcacccttagtggtctccttttctaggaggcccagggctctggcttggccagatctggccaacagcgactcttctgttccaagaactctccataagctcaagaaaaagtagttcttagagtcttcaggcctcgggtgaagcagtcttctgtttcattcttgctgttctgacagcctcaygctccagcagcaatgctgtgtccacagggccaggtgcaggctgcataacagcatggactcaacagtgagagtgaycaggaagttccaaggcctctgtcctggggttyggtgcggcacagacttgggggagggccggtgtccttccagggtctgaggcatctgtcatggtttttttctgcagcaagctctcgtcatccgagattccgagaagaagaccatcccttcagagcagctggtggtgggggacattgtggaggtcaaaggaggagaccagatccctgcagacatcagggtgctgtcttctcaggggtgtcgggtaagcggcaaggggtatmcaccccaaggaccawgttccaaacctgctggctctgkggtctttcccagcatcagtataagaggcagggaatgaggtacccagctrtgaaccaycttcaacatttcttctaggtggataactcatctctcacgggggagtctgagccccagccccgctcctctgagtttacccatgaaaaccccctggaaacaaagaacatctgcttctattccacaacgtgtctggaaggtaaaaggcctctggctctcagcccacatgtccacctgtgtcctttctccctcctgggctctcaggtctgtcctttgccacaccccgttacaaagctcatcccagaggaagcatggaactgaagggcctagaggacgatgcttggcctygggaatgtggtgtgcctatcgattgtgccagcccccagagagggctgcaagctggctgcacacccctcctggctgaggacccctggaataaarcrtctacttcccctgtaggcactgtcaccggcatggtyatcaacacgggtgaccgcaccatcattggccatattgcctcattggcctcaggagttggaaatgagaagacrcccattgccattgagatcgagcactttgttcacattgtggcaggagtggctgtctccatyggcatccttttcttcatcatcgctgtgtccctgaagtatcaagtcctggactccatcatcttcctcattggcatcattgtggccaatgtgcccgagggcctcctggccactgtcactgtgagtccatgctgttagacagcctgcacctggccctgtggacacagcactggtgctggggaggcrcccacacaaactgcaatctcccccaagtccagagcaccacaccctccccgccagcgacaaccctggaacattctgcatagactgttccttacagagacaaaaaatttgtcatattttcaatatttgactgcgttttccttgaaaacgttatgctttcaatctgcaattcacacagcttactctgccccataagatctagataagacagactccaccattcacaggttttctagaagcttgatgccttccgcacatttctttggcagtttctacaacttaggcatttaggcacattgccacactccacttacctctcttacgaaaaaaaaaaaattcctcccatttttcctgcygaggactccagccctttcctggccaaccccagacccagctgtttgtatgggcccatgtcattcagtccctagagaagagccccctcctcctcagtctstcctgtgggggtctcaaggggtaggagaggagggggtttatgtttccagttttgtgactacatgatcattggcctgctattgtcctgaccaaagaaaagagaagaagtttttgaagtccaggtctcctctgactccaggagatagtaatttggggaaattggagccaaaagaaccctttgagatctaggggtttaaaagaatctttaaaatatggagcttttaaaatgaaacaacataaaggctgctgaattccccaaagcarcaagtgtgtcctttgggacaactctttggcatgcactggtcagtctctcttacacactcctgcttagggatcacaggaggcgtcgtgattgtacgtgaacacragccacagcagcgtgtccgtgtttgctgcccgtgggtcccttgttttcttcaagtcatgaaggaacaagaaaagcrtctcatatttaatctttaaaaaaggattgtggcatagagggytcttggcrgcgtataagccaccaggtcagcttagctgcgctgacaaccacacctctcccctaaaactagtccagctctctcctaaaattcaatcacagctcacattggctatttctgtattattggacctgagttcaaatgaggatttttcccaaagcgtccttccctctcctgctaggtgaccctgtcgctgacagcaaaacggatggccaagaagaactgcctggtgaagaacctggaggctgtggagaccctcggctccacctccatcatctgctcggacaagactgggacactgacccagaacaggatgacagtggcccatctgtggttcgacaatcagatctttgtggctgacaccagtgaggaccattcaagtaagtcttatggagagctcggtctggccaaagctgtggactccatcctggggctgagctgagcacacagcagggtctgcagccagaggattgctggacagtgactcatggacggccagcycaacccacagcagccactgttctttctctgtcttccagaccaagtmtttgaccaaagctctaggacttgggcctccttatccaagataataacattgtgtaaccgagcagagttcaagccaggacaggaamatgtccccatcatgaaggtaatgcttctgcagcacttggtcttaaatcacagccagtttgtagtcacttgytgaggtctgattgggtgcttgatttcatctctccagttgcttaaagtttgttcagtgcttgcaagagcaagtcagactcacaagacatccagaaatttttctttatgcacactagctttgagaatacaaagatgcttaaaaggtttcagaatattgctttagcgtcttcagaaaattctggaaatgaatgcacttctaagttactttcctgacttttctgccagctaagtggatataatcaaagttccttttaatatacacaccattcatggaaatttaaagtgtgattgaataaaaataaaaggactcctgttaactagaatatggctgcagacaaagctctaaggggtcctggaatatcggaacatacaataaactctccccctccctccctctcctccttcccttcctcccttttcctctccatctcaatgagtcactgaatccctgttctcctggcttttctatttgccatctgtttccttccctgactctttttctttcttatttttttgtttgtttgtttgcttttctctccgtcagacagctcatgaatgctctttttggccaattgcttctttgtcgatatcttccaaatctttatgtccagctctaatttcttacctcaactccaacccgaatctctggctggctgtgtgcttccgctaggaagttgcacaaatcatgcttgttaacttccacccgtacccagcctggctgcacatcagtgccttgccgcaattttctaattgtctatgatataaccattctatttgtcattggaacagaatatttggaagtcatctttgactttatcctttccttatatccagtaagccaccaagttctatcattcttgcttcaaaatatacataactttagtatttgtcagcagtaccttgcatctaaatagccgattaccggctgattggaattaaacctctttgattccggtttatccctcctggggtctttctcgaatgccactaatttcccttaatggtgcttttatagtcacttaactttgctcaaaatctytccgtacttccctgttttctgcttctcaagtctagacctcaggctacctttcagggccctccaggtcttgccacaccctccacatccgcttgtaccttgaacactcacggacgagcctgcccctcatgcccctgcacccgcatcctggtttctggaaggctttcttctctgtgtatcggtaacccacctatctatcaagatctagttcgtagctgcttttttccacgaaatcttcagtcctcgcagaggtccagcttctccaaacatccctaatgccagtaggtggcactgttgtttacacgcttaccacggtcttgcggccctccctgatcacgtgataatgtctctccagctaggtggtaatgggatcaggagggtgtgttttgggtcctatgctgagggcatgttggttcattaaatatgtgctgcaaatatttttcttctttgattcccagaaagctgtgattggagatgcctcagaaactgctcttttaaaattctcagaggtcattttgggtgatgtgatggaaattagaaaaagaaaccgcaaagtagctgaaatcccttttaactctactaataaatttcaggtgagtttttcctcacaacyggtaatctctgtcatyggcagcatgaccttyctacttgcrtgcatcctttgcttacctcatattttgaaggatacctggcttcaaagacagtygtcagggatacagcacccrggcatctggtcccytaggtcaagctcccttgctggcctccttcctaaccctgaagcagggcagagaaagaaagaaaggcaaggacytcatcagggcctggctgctcctatgaatgagccatctctgtcacaggcacacactctctctctcacacacacacacacacacactcacaccaccactatcaggtaccttctgccgtgaggagcagcagccatactccaaagyataaatgccaggtgggcagcagggaggccgaacacctgctcctctcacctctagtgcatcaggccctcgacctacrtggcctcgttccatgttcgcatccsgcctgtgaggtaggactgacgaatcctgactcagaggaggaagcaggcccttagaaagtgttgagagaccagagtcacacagcacccagtgttcccaagcctgacaccaggtccacgattcttccaccatcacacagagggagtacggcacagttcaggccatgggagcaagccctgccctttggggagaccggtgagcagcccctggggtgacagccccgtcgttttctggggccagcccctgtgctgtgggtgggggtctcctttccatcccctgctcaggtagaagacggccytccttgcctggttatctcagcaagcagggctggccgacagtcagccatcacagcctccccatgttaagacaaatgacagttgggagccccaggtccccatgcagatgggattttccacagagcccacactggatctggacttgggctttgcacaacagtaaagtatagaaatggaataaccacaactgtacgtgtggagatttctggtgattatccacctgtcttagttcggatggaatttagggttagggaagaactcttttttttttttttttttttttttttgagaaggagtttcactcttgtcacccaggctggaatgcagtggcacgatctcggctcactgcaacctccgcctcccaggtataagcaattctattgcctcagcctcctgagtagctgggactacaggaatgcaccccctgcccagctaatttttttgtatttttagtagagacagggtttcaccttgttggctgggctggcctcgaactcctgacctccggtgatctatccgccttggcctcccaaagtgctgggattacaggcgtgagccaccaagcccagcctagagaagaactcttgtgttgcaaatgtcttctttgtggatagtgagccaacagagaatcacagttagctaaatagacaactaaccagaaacatatgatgtaaaatactcaagccaagaaaccacatctcttacgtaaaaccaaagtgaaaatagagtgcgcaacagtcctaaaagactrttttaggatgagtattattatactaataatactagtgataataggagctattctgtgctaatttccacaagtattaaattattcattcgcacgacaacactgtggggtggctagaggatgaggaggttgaggtgcygcgcatcagtgcacagtgtgaagatggggttagatgatgcctccatcagcagcaggacttggagccctgctgaagctccatctcccatggtaaaggcatgcccagttgcaaaagggagaaaaagcaggttccatgaggcytcatgtacaagttggaggagaaagtggctacacagagtgggactagaaaggggagaggggcctgtgtgagttcctgctgaagaggtcggaggtgctgtctggatgctgttagggtcattttatatctacacatgagcggtgctcagcctcaccagggctttagatgtcatggccttggaaggagacgtctctgcgggaaggaaataaaatggaaagcctgtgtcttattgattagaatggtgatgccccaaacacactggtctgttaagacatttgaaacagtttacggcaaattggaaaatgttttataaagttttatataaagatgaatgtatttaatttaaaagattatcctttgtagccaccatgattaagggcagggactctggagcctgctagcctgggctcaaatcccagctcagccaccagatagccacctattgctcagtgaccctgagtgaagcattgaacctctgtgcctcagtttcctcctttgtaaaagggaataataatagtacccatggccttaaagttgttttgagaataaataagtcgatgtggacagcacttagaacagtgcctggcacgtggtacayaccataaaagtgtttcatattatccctatgttttaaatgtaaaaagccttatcttggccaggtacagtggctcacacctgtaatcacagcactttgggagatcgaagaaggcagattgcttgagcccaggagttcaagaccagcctgggcaatataccaagaccttatctctacaaaaaaaacaaaaaacgaaattagctgggcatggtggcacatacctgtagtcccagctacttgggaggctgaggtgggaggattgcttgagcctgggaggtcgaggctgcagtgagctgtgatcgtgccactgcactccagcctggggcacagagtgggaccccgtctcaaaaaaaaaaaaaaaaaatttaagagagaaagagagaaagaaaaagaaaaggcctatattttagaaagtgatagtgataattagctgggaggttttytgtttggtttggtttttgttggttggttggttttctcaatgtctttacttgatcattaaaaaaagcagcagcagcagctggtaaccctatttgccctatacttctttttgtactcatctttgatacccagaagtctaagaaatactgatttgtaaagaactgttttacccaaaattgtagcacttttctttgcaacttattttctcccaaacactccagcttcctgagattcctcttgagtgcttagaagagtacctggcttatcagaagggctagataagagttagtccttttattcttgtatatcgattttttttgcatatcttattaggatggatctagaagtagaattgctgggtcaagagcattcctattaaaatggagactbctgtgactcggctgtcttcctgaaacattatacgtggaagtgtccacttcctcacaccccgccattttctatgacatccaagcaggaaaactgggtggacaatgaggtgaggaggtgcagaaattcctgtcgcctcctcccctcctgagctcagaatagtttgggtctgaaagayggctgctccccacagggaggtagaggaggtgagatgcagaggctcgcagccccctaactctcacgggcaccctgggagatcttgttcaaggcacaagatttcacacgctgacggccacaactagcctgcctaaagcagccagttttgcttgaaagatgagctccacttatccagagtsggtgccccactctgggctggggccaagtctagagctcttcgtcttacttggccacagaaagaaaaagggcggaacatgctgaggatgccattgtgcctcttcctcctttacatttaatggaccagtagagaagaaggaatgcgtttcacctttctgtaagtaacacgctcagttcattccttcccagctctccatccacgagatggatgacccccacrgcaagcrcttcctcatggtgatgaagggggcccctgagcgcatyctagagaaatgcagcaccatcatgatcaacggcgaggagcacccactggacaagagcactgccaagaccttccacacagcctacatggagctgggcgggttgggcgagcgtgtgctgggtgagtgcggcggcagggccctgcccatcacctggtgggcacagagatgaggcaggcgccttgaggacctgtgacctagcccagtggccatggcatccaygtgaagcatgtaaaggagaacatgataagcaggatgggaacaaggagaggaygctgtgtgacagcaccragcagggtgggatggcctccagagaggcaagctcagggaagactttatggaaggagttaaatttcaaactgggccttaagtgactgcatttgaggggagataggggaaagtatccagggcccagggaacagcacaggccaatcacagaggcagaacggcgtggggcacattgggtgctgccagcaggtgagatggcactgtcacagaaacagggttcaagggctggactggaggtcatgagatggaggtcttgaacatctgggtgaggagccaggtttcatcctgcagtcagyagagagcactgagggctgtgccactagagtgagctgggcagtcgcagggctggggaagactttatggaaggagttaaatttctttaacttctttaaatgtctttggcggcagcagggagaggagagatgcacatctccataggaagcagctgcccttgctcaggcaaaagggatgggaattttttcagggtgatgggaatgggaaggagagatcagggcaagagacttcatagagrtagagtttggtaagatttagaacctatcagagaaggataatgtttaaaaatgattaagcttcccatttaacgactaggaagagagtgatgccagtgatgcagacaaagtgtcaggaaggaaggaaccttagaaatgcaacaggaggaggacccaatgggggtgcctgcggtgttgtcaaaggggacagtgtgtcctgttgtcagcaccagggctggcggaatggtgccccatcaggaccacagaatgacaaattcaaggaaacagaagtgtatggttgacgatccggctcattaaacaccatggaagtcctcaccaatacagatgcagtctrtggaatgtgtgtttctaaaggctattggagttggcaaatcagataaagcatataaatgagatggtgatgctttaggcatccaataacccacagtaccgggtattctacacgggatcgatgcccacttgcgtttgatttctcaaagcctgctccaytgacatttgcaaagcagtgggccaggctgaaaataaattggatgtgaaagctgatcacacaatcttggaggtcccaccagacacaagagtcccttccacctcagcctatgagaggctgatgccttctgagaaaaggatggctcggccccattcctgctggcctttctcttgggcttatcttgatctagcactgaactttgtgcccctccgctgaacccccttgttccttcacatgctgttttctctgctgaaaatggccttcccacctccaccctcccttttttccctagaaatcatctttgcccctctcaagcttcacctcacatgtgacctccttggggaagtctctcctratcctccaggcagctgaaatgtgtctctgccctgagatgtaccctatgcttgatccctttaactctgtgccccgctaaacttcagaagtcgagactgtgtattgccctagaacttggcaatatagcaagatatatttctagaacacagascctaatgagctcacagtgaattatatttggatgaaatatgtctttcctaaaaaaatgcattatggagttgaagaaattaaacaattctggcttattctaatgtattggtaaaacagcagaggaccaaggtgtatgagcatgttctcctcttattttttttcgtttcctattctagtttcactgactcactaattcatctgtattacaggtttctgtcatctctacctgccagcagaygagtttccagaaacctactcatttgacatagacgctatgaactttccgacctccaacctctgttttgtgggactcttgtcaatgatcgatccccctcggtccaccgtgccagatgcagtcaccaaatgccggagtgcagggatcaaggtgggagttattttcctgactcaagaagttctttctttatgtcgtgttcctttctaataatggttttcatagcagatggtcagtatttaggtgtcttcaagtaaatatcataattcctattttatttctagtttcactgtgctaaggttactgaaactgtcccacaaaaagaaaatgattgtgtctatgtggaatgaaccacataamcagtaaatgcaatgagaagaatctcctagtgccttgaagtgaccatatctcgccctagtccatggtagatactaaaaggctttattggctgggcgcagtggctcatgcctgaaatcccagcactttgggaagctgaggcaggcggatcatctgaggtcaggagttccagaccagccatggccamcatggtgaaaccccgtttytactaaaaatacaaaaaaattagccagatgtggtggcacacacctgtaatcccagctactcgggaggctgaggcaggagaatctcttgaatccaggaggcagaggttgcagtgagccgagatcacaccattgcactccagcttgggcaacaagastgaaactctgtctcaaaaaaaaaaaaaagaaagaaagaaagaaaagaaaagaaaaaaagaaagaaaaaaggctttattactcagtcttgaggctcagcccccataatccatgttcatcattactaggttaatattaagactgttgaagtaacatggggctacccccaagtagacactcacyagccctttcacaaataaagtggcatcaaaggggaagggcttcctttcatgtcagaggaggaagcgtatgaagcttaggagcaagggtagacccaatgggattagtgtttcctccaaagacagttgtctcgtagatccagagctgccactgtaatcaccaaccacgttctcycagggcactacagagtaggtattactgaaccatccccactttggccaaccgagttcttcattacccgtgggccttctcgttgtctttgctctaggttattatggttactggtgatcatcccatcacagccaaagctattgccaagagtgtggggatcatttcagccaacagtgaaacagtggaagacattgcacatcgcctcaacattgctgtggagcaagttaacaaacggtaagcacaggagcagcatagtaaaaattccagtttatacccatggggccccactggctctaaagagctgcactacttggaacaaatcagctttttgctctcagagttatgctaggcttgtttgagctattatttgcatatccatgtattcactctaatttcactgagcagctaatatgtgccaggcacagtattgataccatgaaatgaccctttatgtgttccttgtttgaaatttcaaaatccagtgtgccctgggcacaaaacctatgtgcccaatttagaataagaaaaactgaaacaaagggtttatgtgaaattacttgccatagatgcagttgcataatttggaatcgtaagaaccctgtgggttgtttcatgcaccctccttggtaagcatcttgggtatttatccacccggtttcataacgtgtagctatgtaaacacacccttcttttttatttggtaatagatagaatggaagcttcctaaggaaagtttttttccttgtttctcctaattcttttaatcatgtttatccttattcttttaatcatgttcatccaactgtacattcactcatgtatttgttctttcaacaagtatttactgcgtgccaactatataccaggcaagacctggaactacagtagcaaactgaacaatactatccacaccgttggggaatctttccatcgagccaaggagacacaaacaaagctaacaatgatgtggccagtgtaatgagggagccacacaaggctagggagctgggcatgcaggagagtggcctggactgtgcctggtctccatgagtcaaagactccgaattctcaggttgagaagtaatgttcattagctgggttatgttttcacgcatgcgggagatgagggaaagaccaatgcacctcttcagtttccccaagcacttaggtcttttagggacacacagctgtcaggtcataacaaattaccacgttagacaaccaaccagggttcccgcctctgggcacagcagcagtacctgaagtctaagagtcttgcagtgccctttagtatacataacatccctctatgaaaacaactttggggcttgtttatttgtttggttttgtaagataatcggattatactttttttcactttagaattttaaacaaattttgtttgtttgtttgtttgtttatttagacagagtctctctctgtcacccacgctggaatgcagtggtgtgatctcagctcactgcaatctccacctcctgggttcaagcgattctcctgcctcagcctcctgaatagctgggattacaggcgcccgccaccatgcctggctaattttgtatttttagtagagacggggctttgccatgttggccaggctggtctcaaactcctgacctcaagtgatccacccaccttagcctcccaaagtgctgggcttacaggcgtgagccaccacacctggactaaaagaaatttttttaagagtagtcaagtgcagtagtgagaagaggggaaagagtagaagtttgatctgtaactgactgtgaacaatcagttgagctaattcactactaccttcrgaccagccgagtcttctttttttagatacaaggtgtcctgtcagatcacccaggctggagtgcaatggtgtgatcatagctcactgcagcctcgacctcctgggttcaagggatcctcccctctcagcctcccaagtagctgggactacaggcttgtgtcactgcacccagcttcattttagcagatttttttttttttgagatggagtctttctctgttgcctaggctggagtgtggagtgcagtggtgaaatctcattgcagcctccacctcctgggttcaagggatcctcccctctcagcctcccaagtagctgggactttaatttaaaattttagcagatttttttttttttgagatggagtctttctctgttgcctaggctggagtgtggagtgcagtggtgaaatctcattgcagcctccacctcctgggttcaagcaattctcctgcctcagcctcctgagtagctggggttacaggcatgtgccaccacacccggctagtttttgtacttttagtagagacggggtttcacgatgttggccaggctggtctttaactcctgactgcaagggttctgctcgccttggcttcccagagtgtagagattacaggcgtaagccactgcgcctggcccattttagcaatttttaatgaaagttgtatataagataccttattcctgcatcttctcaattgcttcttttttatatttgcccttccttccctacttaggaagatttgtttggccttccattcaaggatcttttgtggtctttgtctagttttagcctggtgatggccatgtgctggtgacgtgcacacgacggtcctgcccttagcctcctcctgtgctcctgttcagtataggtggcacatttcttcctataaacctggactgctttgccaatttgctggcccgtatagtgtctttgtgcaacctcaacttcctcatcctttcagatgggcatggatggaactgtgcttgtagcagactccagaatgtgcttctgtctcagctctttggaacgagagaaagacataatcttcctacgaatgtgggaaggtgcattgaaatgacttttatgattcttgcctcagtcaaaagtcacaaagggactgcacttcctcttggtcactgccactctgctcatggccacaaaagggaagagtggattacacatttgtatacaaatcrccacactgagtgaagtggatgcttttgtgaatgttttcagttattcacttcatcagctctagtttcatgaccatataaaaattgcatcttagcaggtgtaaggggaaaggaaacaccccttctttcttctcttactttcttttgttttgttttgttttgtttttttgccagcggttaaggagacctgtagtttgagtcaagtgctagaattccagtatttagcaccaagaggtaaaacagacctagaaagctcaaaacttgcaaattgtaaagaaaaagacctgcagcagtttgtacctacattgtttaagctgagatttgaaggctgaaatgtagtgttagccacgagaagctgaggtgagagatgcccattcctggtcagggagcgagacccgtgaaggccttagggtacaggggatggaggatgtcagaactgagagcatccagcgggcaggagggagagcccaaggtgaggcgaagcttgacaacgcaggccccacctgggctcgctggctaaagttagggattccggggtctgctccaagcacggtggaaagcccctgaagagttttagcaggggactggctcaggcagctctgcataatcaataggccctagaaccttacttttatagtcagcaggcaatagcgctgctcaaagacttcagtaaacttctgcctacgtagcacattgcacaaagatgacactctgtaaatctgaaatacccaacggcaagtaattattaccccttgtttggccataaaagaattctaggacccaaaacatatgaacaggcagtttgggggttttatttttatttttgtttttgagacagggtctcactttgtcacccaggcttgagtgtagtggcatgatcatggctcactgcagcctcaaccccccaggctcaagcaatcctcctgcctcagcctgctgagtagctgggaccacaggcacatgccaccatacctggctaattttttaaaattttttgtagagacaggggctctcactatgttgcccaggctggtcttgaactcttggcctcaagtgatcctcctactcagcctcccacagtgctgggattacaggcatgagccactgcgtttggccatgaatgggcagttttttaacttccttttacttctgaagtaaagcgttgctctaggaagtaccactctcacctgttctagtagggataaggctacctggttttttattcctattgttatatggtaccaagaaatggtgttatattttagcctcagtttgccctcttgaaatggagactaaagtgttcccaggactcctgttacctcactagagcattaggtatcaaggacactgggttccaggtcaagtcagagaggcttcagccagcatcctgcctggaacagtgtttcaacctaagatctgcccttgggcctcacccagtttcttctggcccttctagggatgccaaggccgctgtggtgactggcatggagctgaaggacatgagctcagaacagctggatgagatcttagccaactaccaggagattgtctttgcccggacatcccccmagcagaagctgatcattgtggagggctgtcagaggcaggtgggtggacagcagtgtccagaggactgacaggcccatcactgtccatgggcaagtgcagaggtctggatctcacatcaggctgtggtgcctttgaaacttcaagagagagttcttggctcatccccatcacctgacctctccaacctctyaggtgggcyggcccctgtcctcctttgagacccccaccacatgttccccgaaaggctcaccccagctctctgcattttgtcatgagagcccrgtgaagcatttgccactgtggtagttgtgagtaaagagagatttaaaatgcaaagatttaaaacaaaaaatgtgaagacataagatacaagacacctgcgcattaggttttcctcatttgcacgtatcttgtttggagacccttgttcctgcttctaagatttctcatctttatcttttcccctaaatgggcctttccgttcagctataatcatcctcgcaacctcaagagaaagggaagtcttgttgctcttgccaggcctgcaacccaytgggcctgctcactcccactttctccctgggtcccccgccataggatgctgttgttgctgtgacyggggatggagttaatgactctccggctctaaagaaggcagacattgggattgccatggggatagcaggttctgatgcagccaaaaatgcagccgacatggtcttgctggacgacaacttcgcatccatcgtcacaggggtggaggaaggtgagtgagtctcagggggtcttcccaagggccagggtggtctggggractagaagtaagttctgaaggagaaacctctctgcctaggtcgcctgatctttgacaacctcaagaagactattgcttattccctgaccaagaacattgccgagctgtgcccctttctgatctacatcattgtcgggctccccctgcccattggcaccatcaccattctgttcattgacttggggacagacattgtaagtgacactgaagggaacaggctgtgatgcctgccccaggggaggtcaagttcagggtcgctaccttcaagggccggggatggactaactcaaggcttctcagcttccatgtgatggggcctgtagctctgcatttctcacaggttctcaggtggtgcccattctaccagtccacatgccacacctcaaagcaagggaccagaggcatctgccaaatgtttggaaattaaaaacactctatagtgagcttttttttcttgagacagagtttcactcycatcacctaggctagagtgcagtggtgctatcttgcctcactgcaacctccgcctcccaggctcaagtgattcttccacctcagcctcccaagtagttgggactacaggcttgtgccaccacacctggctaatttttgtatttttagtagagatggggtttcctggcctcaagtgatccacctgcctcggcctcccaaagtgctgggattacaggcatgagtcactgcacctgagctatagcaagcttttcaagacatgagtcttcatcctcaaaaaaaaaaaagaaatgccattggtcagtttcagcctatgggcttcccttttcttttgggaagatgaagctgtcactcagattaatcacccaaataaccactgggggcccagtgactaaagtgataatctcacagccacctcttgttaagtaagagagtctgacatggaagacctttacctaaacacagtaagaagtagcagttatgaagactttataaagccttgccctacagtaatgtcacctaaaccttccccttttccagtatccatttaaagaaagccccgtctaagctgcccatgtggctgtggcttacgtgggcaagcagggaaagcaacagacagcaagctgaattcttagcaggaaactggcccttcgaagtgcccccttccccttcaaattgcccccttcccctctcttgttttctacaacacccaggtaatccctaattcctagagagactggagatgtctttccctttgaggggtattgaggtccccaaagttgatggatcattttccaagcccttcacatttgcctgctttgctctgctgcagtgcttctccaggcctggtgcgggcatcacctgggaacttgttagacatgcacactctgggcactggtggacacctgtagcctagctactcaggaggccaatgcaggaggattacttcagctcaggagtttgagtccagcctggtcaacacagagagacctagtctcttaaaaaataaaaattaagaacaaataaaataaaaatcttattccagataactgggctaggaatggaaataggttgtacacccattgtcttttaaaaaagagaaagaaagaaagagaaagagagaaagaaagagagaaagagagagagggaaagagagaaagagaaagagagagaaagagaaagaaagaaaggaaagaaagaaagaaagaaagaaagaaagaaagaaagraagraagraagaaaraaaraaagaaggaaagagaaagagaaatgaatgcaaattctctggccccagcccagtcctcctgaattgggaagtctggaggtggggcgcaatgatctgtctcttagcaggtcctcccacctggagggagaggacggcacaagaaattctccctgtaggggaagagtgttttataaccagcatccttcagaactgccagcacagggtgataaaaagcagctgatttctaaaggcactattcttaaatttccatacagacaacacgccctctactgcctatagcctggatgggccagctccatgccccccaccccatccagccagtgccccacccaccccagcccccctcccctactgtgggtagagcagaacatcctggggttagacctcaccagcctcttcycctctagatcccctccattgccttggcgtacgagaaagctgaaagtgacatcatgaacaggaagcctcgccacaagaataaggacaggctggtgaaccagcygctcgctgtgtactcatacctgcacattggtacgatgagggcgcgtcttccccatcacacsagggcctgccccgagaattcactggagtggggggcacagccagaaagtgtggttttcctgtggggcctgggttggggagggaggggraaccgagagtagacaggatgaggcagtttcctgaggccatcatagaacctgtgtcctatctctcttgttctttcaggcctcatgcaagccctgggagctttccttgtgtatttcaccgtctatgcacaagagggctttctgccccgcactctcattaacctgcgggtagaatgggagaaggactacgtgaatgacttgaaagacagctatgggcaggaatgggtgagtggcgggagccctgctgcagagtccacctgattctctccatgctcattgccctgcgcagaattacatagaacctccatgtccctgaacagcctgggaaagcttcaattaatagggctcagggcccccttgctgacacgtgtttggcctttgccaggtctcatggcacagcctcctgtcttgggctagatgacaagaggtccctttttttaccttagctttgccattggtatagaagagtgaccagcccagccacacccacagtgcggccaaataaatttacatctttcaggccgggtgcagtggctaatgcctrtaatcccagcactttgggaggctgaggagggagaatcacttgagcccaggrgtttgagaccagcctggccaacacagtgagaccctgcctgtgttagaaataatagtaatgataattttttwaaaaattaacatttttctctactcagctggttcaagaaagaaaaatgtttctttccaaacactagaaggtggtccattctcagtccgggtgaggtgtggaaagaacatgaagctttagagaactgcattggaatttcctagaagttttcctttaggcctcaaggtctcttccttctctgcccattaacagacaaggtaccagagggaatacctagaatggacgggctacacggctttctttgttggcatcctagtccagcaaatagcagatctgatcatcaggaaaacccggaggaattccatcttccagcagggtctcttcaggtactgcctgtkcccggcctcctggggcagccctgggcctgccgtgcaaggatgatgatgatttgtttttcacaagacagagttctggccacacttgtaaccccagaggcattgatttttctggtggcatggtctgctgggtgtatgatcatgaagccacaagaatcccaagtctgtctgcttttgtgtgtcttgcagaaataaagtcatctgggtggggatcacctcacagatcatcattggtctgatcctctcctatggcctcggaagtgtcacagccttgagtttcaccatgcttaggtgagttcaccctcaacagcatggaggaaagagccagcctctgctttgagctgtcgcagcctaaataaacctgaggattcccagggttcttccccaagtctttcaaaagacgtcaaactgatcccatgctctgtgagcccaaagctttgatctgcattttccagaagtggaaatgggttttctagacctcaccaaccggccttcatcctcatccaacaggttgcttcaaaggcagacattgcttctagcagtcacagtgcaggttaaacaaggagctttccacctttattttgtgggacctcgtggatttgtcgttctttgcagtaaagmaagacaaatgaacragaagccccattcccattgggyagggttgggctatccctgtggatgagtcagggttcactttccatccctttgcttccagggctcagtactggtttgtggctgtgccgcacgccatcctgatctgggtgtatgatgaggtgcggaagctcttcatcaggctctaccctggaagtgagtagcctatgattttagaggmtctgtttacccacttcaacagactctccatttctgatgtacttttttctacctctacaggctggtgggataagaacatgtattattaagaccacctcccttcctatgtctctcagcagcaygttggggcacacttgttcatcttctgaccgtttgctgggctattcccctgcagtgcagacatcgtcaaaattcakacaagaggaaattttcatgcagaaagctgtatgcaggatgctcactgatgttttgcactttaaaactgaaattcaactctttatataggattttcttttctatctccatctcctcattaaaaaatacgtacatttcgaggtaatggtatagggaagaatgtgtttatgtgtatttgaaactccttgatgttaatagtcttgtgtaacccaggcatctactggggcctgccttaagctctagctaggattgctcagaactcctttccacaccctattaaaggccccatgacctccctaagatttctgcagatcccctgagaaggtatgttttcatggtctccttgctcgaaaaaggccaactcacccgagggtctgcaggagatggaagtggcggcaggtttacatcacagcagcacgcatgacctcagctttgactcgtttaactctgagacgtccttcttgaaggcccttgccacagtttccctggccacgccaccccatcccacctctggtcatctccccagccctttatgccccgtcgccctccacccctacatcagctcctccaaaactgagctcccagttcattttgcatatcctaactcaaaatgctcagctaatccaaggggactttctttaccaggattcaaccctagtagagagctgttatggtttcaatagtcatatttatttcttgtaaaacagttgccaggtgctctccagcaataacgttttgtcagtcatgtttcatgttttaacttaggtgtattcatgtgtgacacttccatgttgacargcccggaaaggcctcatttttaactaaaagatgttttataaacccaggtttaattgtggtgttctaattggttcacatttttctagaatgaagagcatgggacaaaaaaataagatatgatttcctattttcttttcgttgctccttctggtcattttacttatctgtggaagatctggaaatgtaggatttttctttcaaactcttcctcatgaccccagggctccagccagggcctctgatgtgccctcgattcttggtcggacgcctgtgggagggcccgtctttctgcagcagcactcgagagaagggttctacagcctttccatcaactgcacacctcgcactaactcatttgacagaacgtgagaattatgtttggttaagctttcctcatctagtggcctgccccgtcacctctctccattacagtctcactcgggggcatctggggctgatggctctaggttggcatctcctggacaggaaaaggcagccttagagtcaccatgctcttggggtcacatgtaggagcaggaaagagggaaggagactatccttgtaactttatgtatatagattccagtgcatattgtgtgcagccatgtaagctaaaataatgttgctgtcctcaggagatttgtaatctgtgttcagccacaattatcattggactaatctatcagtagttccagtgaactgcaaacacttcccagagtggtttgggcagtgtggtcatggctttctcgttccagtctcgacaaggcagctaatgctttctagacttcagctaagaataacttgaccttacttaatctttcttgacaggctgcctgagtgctcatggctgcaatgcttggcagctcttggtcctgccaatgccagcaggacaaggccatcaatttagcacaaagctgcaaggtttaacttggggttggattagggttgaaaggagttaacttggaattagaagcctcttcatagcaggaactatgtatgaaataacgttcctatttgtgcttatttactcttgcaaaaagttgacactcaaatatttataaaattaacaaataactaacttaagaaatcccagaaaagacactagcattattgagtagctttattaagttgtagacagaaaaaggcaataaaatccatttcagagggtgtttttggagggactatttaattgaccctctgaagcctagatgtcttttattataggaaaaaaaaatgtcaatttaaatctaattgatgtggtagagtatctcagagacataaacatgaggctgaattcctagagtctttgctttttaaaacaatctaatttattctgattataaaattgcagctctaaatgagctattttcttaaatagaaaatttagaataaatgagattaaaaagtaaattaaaatcaccctgaatctcactatgtagtcatatacctaaatgaaagagtaatcatttctttggagtttttccacacatatatttatttttaggtaaaattaaataaagttttcaattctgccttttttatttaacatcaaaaacatggtgttaatgactgcacagtattgtagattgagagtgctttcgctaactatatctgcacggtgagatagctcattaatttcctactaggcatctttctcaaaaaggctgcatcttatcctcaatattgtaccacacatctccattttatagaagattcctcaaattggaatcaaggcattcagagcattcctaaggctctggccacacattgcctaatttatctttagataagctgtatcagtttacacccccaccagcaatagaaaaagaatatttatcttgcctatcattaagatgtgaatgctcagtcaaccaaagagctttccataattcgacaaagatgtaggaagtgctcctgcatggcttgagaacacagcccagaacaagatagagcatggagccagtacaccagtagaggggtgaaaggaaaatacaaattgtgataaggtcttgaaaaggcataatggggcttagataatcaggtggcaggattgagggcagtcagctaagtccttttaaatagggtagtcagaaaagtcctttttgttgttgttgttgagacgaagtctcacactctcgcccaggctggagtgcagtggcacaatctcagctcactgcaacctccgcctcctggattcaagtgattctccagcctcggcctccccagtagctgggactacaggcacccaccaccacgctgggctaatttttgtatttttagtagagatggggtttcaccatgttagccaggctgctcttgaactcctgacctcaggtgatccatctacctcggcctctcaaagtgctgagattataggcgtgagccaccatgcccggcctagcaaagtcctttttgaggagatgaatgcaaagaagcagacagaatgacaggaagagggaacagcatgagcaaaagctctgagaggtcagaggggcctagcaggaacacacagccagggaagaccttggaacggggaactggagggacaggcaagaatctcaccctagaggggttcagagaccaaatgaaggaggttgcatttaatttcaaaacaagctattaggcccagtgcagtggctcacacctttaatctcagcactttgggaggctgaggcaggagaatcacttgagaccaggagtttgagaccagcctgggcaacgtagggagaccccatctctacaaaaacgaataaacaagctattgaagacaattaataaaagaggtgacctgatccagttgacatgttcagatcactttggcttctgtgtagaggatgggaggcagaccaggctgtggtaactggtgtgtgtaccttcaatggaatacacagactcaatggaggagtttcttaaggggggttgcctctaggtgactcgagacataaatgttcaactcaggctcctagaaaggctcacaaccaccctgactgcccacatcacaatcaagatagagacaggagatgctcaagcaggtgtcatctcgccaggagtctagaacaagatatatgtctcaatgtacacggctgcactccttaagagcctggacaggtgcatctgactctacaaagatcatgagttctccacatttgttcattctgctatcatcattccactggtggcatctaatgtctcttaaaaagacagtggctggctgggcgtggtgactcacgcctgtaatcccaacactgggaggccgaggcggtcggatcacaaggtcaggagatcgagaccatcccagctaacacaatgataccctgtaactactaaaaatacaaaaaattagccgggcgcggtggcggacacctgtagtcccagctactcaggaggctgaggcaggagaatggcatgaacccaggaggcggaggttgcagtgagccgagatcacgccactgcactccagcctgggtgaaagagcaagactccatctcaaaaaaaaaaaaaaaaaaaaaaaagacagcggcaatcactgatatttgttaagtatctattatgttctgggttcctaacagcatgatcttattaacgctcacaacggccccgtcagctgtggcatcagccgtgctttacactcaggaagttaagcctagaggcccagtgacttcctggcactgtgacctctcctgaccactaagaggctccactgtagaatctggcaagtggtttagggagagtttgcccttcgatggaatatagatgcctctagagcatagcctgcaggtgttgagttctgtcttacagctctgcaggttactgataactgagagcaacagaaagtatttctatagatatgcaaatgaatcctacccagtgggtgaagatctttcctccttggaaaagccagttttgctccctttgcacaatcagccaacattcctgattccagataaaagcgtgcctctttgctcctctcagtagattttaacaactgcctagtttcctatttaagtggtgagctttaaaaaaaaatctttaatatgtgttcactgttatatctgtatgaaaaaattatccttacaccatgaacagaggaagaagaacacaattccctcctcatttagggtccttctcagcccctccgtggagcyaggcacccagcccgtccgagatcctgaacccccgcacgctccagggccattctgctattgggcagggatgccgtttttttctgcttcagaccagttctctcagcaagctccttcttccccgtccccattcctactttcccaccctcccctctgacataccagaaccaagcttgggggattttatcttcttggtccagaggttctaagataaagttaactggaaatttaaggtaaaagcctgattaattttaaagggatagaagctgccctcctcagacttgctgtgcaggtagatagagattcggtggagtgaagcacttcaatgcaagagtttatttgtagtttgggggatttctttttttctaattttttttttttttttacattttctatttacacaaagggatttcttccactccacccgcacccgccgcctctgctttcaatcttttttcttttcttttcttttcttttttttttttttgagacagggtctcactcagtcatccaggctggggtgctagagtgagtgcaatggtgtgatctcagctgcaacctctgcctcccgggctcaagcctcagcctcttgagtagctgggactacaggtgcactccatcacgcccagctaatttttgtattttttgtaaaaaagggggtttggctatactgcccaggctggtcttgaacccctgggctcaagtgatccacccaccttggcctcccaaagtgctgggactacaggtgtgaaccaccacacccaaccactttcgttgtttcaaatttagcacctgctaggtacacagcacagtgcagaacaatgctgtgctggtctgagaggacaaaatgacgcaatagggaagaccaggcatgtttgcaaataaactgtcaatcggggcaggatttggccgaggccttgagaggtatacagtgctgtgggtttccagggagaccatctttggtgggcaacagtggagggtgccaggaggcaaggcatccaactcagccttgaggagtagggttccaattgcagaggtgaagcagaggaaagggcaggggccaaagatgtgcccaggttggtcacagccatgtccctgtgagccagctccctccaggacaaagtcaatgtggtgcagagaccccatgacctgggtctagcattccacttggtattcctaggggggctgcagtatccattgaccaaatcccta

SEQ ID NO: 95347 - DNA, 45595 bp, Homo sapiens
  misc_feature (1)...(45595): n = A,T,C or G
ggatagaatgtctttttgggctgtcgcacaagaagcccccaaaaaagatgggtggctgaattgtttcttcttccttggaagcccattcatctttggtcagcttttctaagctggaatgcagtggagttcatgtagtacattcggtggtgaggtcatcgagagagtggaatgtttggccccaaccagcagttctcattttgtcagcatttgttcagctctctgacaatgtacaatgtactcctggggagtttgttacagtactgcttgccttggtggataagggcaagtgatatcagtcagagacctctcaagaaacagacaaaacatgcaaaggaacataactaaacagaattcagtggggacaatactaagagagttatgaaccagataagggaaccaatgcgggacagtgaggtgcccagggattagtaatggggtgggggagggaagccgttaccaaccctgaaaaagcaagaggcacagttctagcagctggagggagggaacagtatcatcagagctgagtgagctggaggtaggaaagagggcgctgacaggagctgtctccaccgaggaacacagccccaaccaaaatcccaggaggtggagatgtataaatacctgaatgtcacttttctctgccattgttctctctttgttatctggctttctcttccagaagccagataacaaagaagcccaggtgaaggagtacctaaagatcagcctcctagggcatggagaagggtagaaaaggtataaagagtattttttctttttttttttaagcattagctggatgtggtggcacaagcctgtagttctagctactcagaaggctggggtgtgaggatcgcttgagtccaggagatagagaccagcctagacaactgagccagaccttgtctttaaaaacaaaaacaaaacaaaacaaaaaacaaaccccagcattaatctatccaagcctgcatgccaagtaccactaatggcacaattctagttcagccactcatgatatcagacactataagaatagtggccactgacatgtttaagcctcaacagggtacagtaaggttccatataccagtggcttccccagccctatggggctacggaactggtggatagtgttgttcagcactctggcctctattacgtctcggataagaatactgcattttctctccacctggtaggaagcattgtttcaatgatgcaatcttggcaggcttcaggattacaggccattcttggtcacatccttagccccatattagaagccaccaacaggggacactttaaatgtatcttatcagaagatccactcatcatgcacccagaaggttcctatcaattatacaggctgcaaaaaagcaagagacatgtcacagacaaaaacaaagaaaccagacattggttgggcaaattcagaaatatttaaagtatcccttaaggaaggagcagggaaccaagtcctagaacttagtgtgtatagctgctggaactgtgcctataaatctcttatatctggtccaggcttcccgttagccgtgagtttgtctgtggttttgctgcataagagcagctaaatccattccagatttttgtgtcaccccatcagcctggctgcttttctgagtgagtagcagtagcagcccctaatctccactcatccctgcaattttatccttctccctgttttcagccataaagcgtaattctcctgaatattcctgggctccacaggggcgggtctcctttttaccaatcactggcagtcttgcggcccagggttttccttgggtgtcacacttgtttgggggaattagtgcccagcagtcccaccatgatcctcccacccttttatcttctgggttcccaaatgcgagggctgcctcagcacaaccaggattgctgacactggggcttgggtgacagggccccctgggagagaatgcttttgtccctgggaaggcccagttggacaatgggcagttccaaaaacacttagcaccgaggcaaagtggagtttaaccttcatgcgtgcgactgcctttcaggggccacagacacacactaccaatgccatgtggtataaatacaacttgggtgggggagggggatacaagcagagaaggaggagcatgtaagcaaccccatttccccatcccaccatccatcccagcccccagcttccctgtcccgctgagaaatgtgcctaggctgggttcatctcgcagagttcaatacagaaggatcttaaactctgttttacaaatgctgaggtggaagccggggattcggggcacctctaggctgccatttagtaggaacttctagagcatcctgttttgcctccaagctaactcagatctgctgaggcagcgagttgctaaaccatgaaaacaggtgagaaaatgagtctccagggccatttgaatttgcctctccccaaccaaaccgttagggagtgtctgtcactttctcaagggcaggtatggcactgtgttcagcttgatctctcacagtcctgagcccggatgcttgtacttgataggagttaatgtctgaaggatttacctaaacagccagtgggaacctcaaagccgatgaaactacgattgattaccaagaggtagggtgttgttgctaggagctactcatcataaataagatgccactggggttctaaaggaaacacgtaagactgtgtatttctcaagcattgtccctctctactcctgagaaaaggagaaaccttttttttaaaaaaaaaattctacatctgaacccttctgttagaaccttctgatttctttttaaaaaacatttatttatttatttagagacagggtctcattatgtcgcccaggctggagttcagtggcacgatcacggttcactgcggccttgacctcctaggctcaagctatcctcccacctcagcctcctgagtagctgggactataggcatgcaccaccatgcctggctttttttttttttttttttttttgcagacacagggtctctccagtgtggtctggaactcctggactcaagcaatctgcctaccttggcctcccaaggtgttgggattacaggcgtgagctatcacgcctggccttaaaaccttctgctttctgatctaccatagaaattaaaatgataagcaaatactattttagtgaaactctttagaaaccagcttccaaaacaatgagcaaacttggagggactgtttcttccacccaagcttagccctggggatgtgaatagccaaattctggactctctcttcctacctaccccttttccagccagtattgggggcagggtggcagggggtgggggaagggcaataggaagccccggcccaggaaagggctctcctgggtcctgcctacctgcattgctcccccaacctctaccacatgcctcataccatgctggggagaaaagtggagcctgagccaaagccacctctccagaggggcctgggctagtgcagcaggggatggcaacctgatggcactttgcaaggtaggaagtggcagggcttagcagcctggaaaagaggtgctgagagcgcatggcagaagctgtaagcccagccacatgggagaagcaagtcttccacctggccagacgcggtggctcatgcctataatcccagcactttgggaggctgaggcaggtgggtcacttgaggtcaggagttcaagaccagcctgaccaacatggtgaaaccctgtctctactaaaaatacaaaaattagctgggtgttgtggtgtagctatagtctcagctactcaggaggctgaggtaggaaattggcttgagcccaggaggcagaagttgtagtgagccgaaagcatgtcactgcactccagcctgggcaacagcagagaaaccccgtttcaaaaaacaaactaacaaaaccataaaaagcatgtatttagtgctgcgcattgttttttctttttgcatcaagctctaatatggcttacatggcactgtgggatcctgtttttgtttaagagtttggtattttgttcactgtgaattttttttgcattaatttttatttttaaaaatattgcattaaaatgttatttatttgattattcagttttttggcacctcttcttaaatttgtgccccaagcaagtagctttcttgcctcaccttagttctggccctgacagtttggtagcttcatactttgtcttctgcattaggtcatagctgcaccaagtccaagtgcaataggacagcagaagcaaatgcagtgtacctgaaactcctaccagcttttggatttaaaacaggtggcccatctgaagtagaaaatggagacaaacataaatcaggatcaaatacctttacaagcatttgtctatgtaaaaaggtatggttcccttgtaaacagaaatgattattctgtcttcattcatccattcaacctgaatttaaactttctagttgttgaataacttgctaagccctgaaattagaaagatgagtcagactgagagtttacagtttgacgagagagacacagaacaagtacttgaaatccaattcaataaatgttcttctaagcatatgcataaacaatttggaagcacagagatgtaggcagagttttttgttgctgttgttctgttttgttggctgggtggcaggggttataactattaagcaaaaccataaatagaaggcattaatggtatgaagaatggaggaaatggatttttttggggcggggcatatcacttccactcttccaaataattgagagaaactttctccaggatatggaaatgtttggagaacttagtgactgatgcatgtataagcttggaaaattaacatttattgagtatctggccaggcactttacataaagtgttatcgccatccttagttcaccagaggaggggtggttttagagatgagggacagtctcagagaacttaggcgtaactacgccagcatttcactagtagtgaaataaatgacgggcgtgtgaagtccaggtctgtctggattccccaaagccccttacaccatactacctttggaaaagcaatggaaaagaagaaatcaggcaagtgatgtatggacccattatacttcccccactctcattttaatatcaccttggcaaagctgaagagcagacatcttcgtgcctccatcagttatgccctctgggagtctcagttcatcccttcacacgcgggatacttaactctgcgggatctaaaccctggccaaaataaattttaaagctggaaaaaatccacactgtaccctttgcattgccctaataggctgaaaatagccatgataaccaaattaagggacagcggctgagactcagactcactccttgtacacattttacttaggaaggcggggagrggcgtgaagttaagccctcaacaattatttccttaatttgggagaagggccttcagctggcgtccctggctgattctcagctctgctcttgctgagtggacaagtctcggagcggccctgctgtgtgcgggggacaagcggggtggggaaggctgagcggggaaaacgaggggttctcgggttggaaaacaaagagaaggaatggatttggggaccaagggcgtggaggagtgtcagattttgagcgaggcttcctgcatactgagtgtaaaatttcgcaggaggagttgggcagaccgaggcagatttggcaacaaaagggtcccgggctgggcaagtttacgaaccgggatgcgagaacagagctggagagatttgacgcggagcgcgaagaaagcgggctgaactcgcactgcgccgctggctcccggctagcgggcggggtctccagggagccgcacctcagcccaccctgagggcggggctggcccggcggttacataacaaacctgtgagagcggctgggggcggttcgggcgctggtgggggcggggcaggggcggggccagggcggggccagacctgcaccgggccaggcaagatggcggccatggagaccgagacggcgccgctgaccctagagtcgctgcccaccgatcccctgctcctcatcttatcctttttggactatcgggatctaatcaagtaatgggacgacacgcatggcaggggtgggggcatggggagaggaggcggtgaggcagggggaaagggggtcggggccgctgacaggacccgagcttccgcgacaccagaaggtgacgccagggccgccctcatcctgcggagccaccggggaccgkggcgagacgggggcggaaagggcctcgccctgagtcttcctcctgtcctgggcccaggtatgagaagcgacgagatatctctctcccaggcctcggtgaggcccacttgcaagagaaggaggtagtggccctcgtgccgcaccgccgcgctccgcggacccccgctggccccgcaggtgcccgcccggttggggtcagtccctgctgctgtgtaaaagcccctgtcccggccaggcgctcttctctgctgggtccggggcctgcggagtctggcgccggggtgggcagrtgggtgagcgagaggagaagataggcaaccccttactcccctggcgcgacttccccagcgccagaatcgctgtccgggctcactttcggacttcagtgcgtgagaattgttttgctgtcagcattgctccttacggttcgatgttggattttatgttttggtactgacttccggtgatgccataccggtgactatcttttctcctggacaccttgggtttcccacattactagcatctgttccagaaataaacaccggttgctgataagggtggttcaatgcccagtttcttcagaacttgggactgtctggggtggtggaagaaatggcgctgccagcccgccccccagctgtcaggattgtttacacccttgacagggggtggcatggctgtgagtttcctgtgctaccgtatatatttgcagaggatgcaaagtcgccctcttaggataggtgggcgagatttgttttgtgtttggattaaccattagattctagccatttgatgrttgtgccytgtgttattagaggtctttttataaatacagatttcttggagctacagatagttgttggcctagctaagtggtgatagagagatacctcaagtttttggtcactacctgtactggtcgctacctgtacctgctagcaattttatttttctagaaaatacttacaatttaactaacagtctccaacttttgattgctgccagagtaatctttccaagacacatctggttgtcattctccttaaaacctgtgacacccctatgtttatagactataacctaaacttctggggcattgaaagctcttatcatctggcttgtatatctaaggtcctccaggacttatttctccaccactatcacatttgcaccatccattctaaccaaatcagacctctgccagcatacaacacacttgcactttctttttttttttttttcctgtggctcaagctctcgaccttgcctggaatgccttgcctacctcttctcaacttggcaaggtggagaagatgccctctctaccttcttcctgcagaattgatttgccatgtcaggtagatggcgtgcttcttgattgtaagggctgccttgcttatcttcctattcaaagattttttttyccccgagggcttgctatgtgccagtctgttaagtgttgagggtacagtagtgaacaacgcagataaggcaactcttatggagcttacagtccagtgggcaagcgcataattgcaagaggtactaagtgctgtgaaggaaatagattgctctgttaaggaataggaagtgagaagtgatcaaatcggaaggagctgccatatatgaagcagggcatatgcagttctggcagagggaaaagtatgttcagagattgacgggactgctgaacggtactgttcaacagcatggcctggtggaagatacagaaggctggcgttgctggaggtagggagtgactcacagacagtgatgagatgagggtggtgagatcatgcaggaccttgggaaccaaggtgaggaagtargagtttactttaaatgctttaggtagtaatcacaattttaaacagaagtgacatgatccctctgtaaatgtctgtggaaataaattgagttgaataccatttgaattttatctacagaaaagtatccagtgtattgcagcttttttcctgcaccatacagcccaattttgtcaagggtctagtctagtgataagctctgaagtttttggtattatttgctgaactggattgggttggattggattagtacactggaatcatgtagcatcagttgcctagtttgaattgagatgatctgataccctctccatttcagagtgatttattctgaaatggagtgaataaatgccacactgtgcgtcagaatgacctgtgcatcagaatggcctgtggcactttttaaacatacagatgcctgaggtacagatctcagtccaaaccgactggatcagaatctctagaacagtagttttcactctcgatgtgcattgaattcatctttcatgcatattccagattcttttatgtcatttagctcctagggcagtggagggacaggaatcaagaagagggtatggaaactgaatgcacaaaactggagggattcctatgtttacaaaagttaatttgggcatctcctgagcttggcagaaaaggatgaggatgatgtttctgtaaaatctgaaaatcaaacaaaggcaattttgtttactatagatggtttttaacacaccttagtcatggccttgacaaacctgatgtgatttaagattctgttgatagctrttgcccaagtgagatctttgaatacctactttcaattaatataacttgtaatttctctctggaaaggatagagtcctaatcttaggttcattctttttacaaattaattatgtagggtagaatttacaggattgcaacactgttgtgttagaaatctttatatagtaagaaagttatttgcttctaayattcgatgttttggggcagctgatarcttgtgtagccatgactattgagtcagaactgttacnattcaggcaccctctataggtggactttccagtagttgctttaatgaaaacgtggtttttgtggcaatacttttttcctttaagtaaaaaattttaaaaaacaaaaataaaaagtctgtgtatttagtagcatacatcttacagatcttgggaaaaaaccccaagtccctttgtttatgactaaataactttcttcctatatgtagaaatgagtattgtcctgataataagcataggacaactccttgacttgagattaactccaatggcatatatggtctgtagatatttttgtgaaaaattacagttgtagatgtttcagggtttatttgtgaactcagtttcactactaacaaggcaattatactacttaacatgttaaacaggttttagaaaatagttttgtaattataagggtaataagtgaaaagtaagagaaacaaaaggcataaaacaamacaatgaatattttaatctttatttttaaattgttttcttacttttttaaatactatcggtgaatctggttactgccagctgttgttatgtcagtcgaagacttagccagctatcaagtcatgatccgctgtggagaagacattgcaaaaaatactggctgatatctgagtgagtattcgaggaatatgtacttctgaaaactggcccttggcttcttccataacactagtttgtcctgattctcctctctaacccttgtctctttatctcctttggtggctcttctcgtgcctgctagtaaatgttggtatttgccaaggttctgtccttagcccactgctgctctcccttgctgaactctactgcatgcattgttgccgtttatagtgactatctgcatgctcctaactcccaaacctgaatctccctccctgacttccccactgaggtctagaattgtttgcacaactgtcygctggacctttctattggctgtcccacacttattaactggattcagtaaatgttaacaaatttgacagaatcaaagtacagatgacagaaagtgggagttgagaaaggtggaagaaatgagtaggaatgctgatatcttttcttagattaagtggagtcaggtagtgactaaagttggtgaagtaagaagcagaggtttaagcatattatttaaagctgcaagctttagacagaagtgaaaattaataacagagctatcaaacattgggaggaaaaagaacagggtaaggggaattttaagtattgctagatcttcccgtgtttccctttggggtatcagtagatacatgtgaagttgataaatcaagaattagaggcataaacatttagaactatagaggtaacttctagaaatacctaagatttcctttgaggagttggacttaaaacaggagaatagtttttcatcgtaagttctttgatactttttagttttaataatctatgtgtatattatttagattaataaaaagatgctccccttccctcttctacccccgcaaaaaaaaaaaaaaaaaaaacccaccctgagttgttcttttccccattcctaaacctgtccttcagcattcccagtcttcatagcagcatcatccactcaggcatccagatcagaattaggagtcatcctaggcgtgtctctctctctctccccacttctctccctccttctatattcatcacaaaggcttaccaagcctttcttactaagctcgttagtatgttaccttaaggccgtctgtggctgccttaccctctatcacttctgattcttaattttatacttcattctttctcactggttagactcttaccttttttgaaggtaaaaaatgtgccttatttttttatatcctcagtggctaagtggacactcaataaatgcttggggaattttaccaaataggaatgttgaatcatgtaattactttcatgttctatgattctcaactaattcagtgtagatatgtgttagattaatattattatatcacaagattctaagtattctctaaaacaatacataatgcctttaaaagtttataattggtatatttttaagaataagttgaaatttatacgttattactattcatattttattaaagattagaaaactgaaaaaaaataagtagaaagaraaggagaaaatgagtgcctagcaattccaccatgccagtagtaacttttgttaaaatttttttatgtatatatcactttttgctatctgatcttcatttgtggctaaaatataatgaaaaggaagggaaaagtacaagtttctatatgttgtaggtatctaaaataaatgctaatattattttaaaagatttaaaatctcatgtttttcatctatttagggaagagaaaacacagaagaatcagtgttggaaatcyctcttcatagatacttactctgatgtaggaagatacattgaccattatgctgctattaaaaaggcctgggatgatctcaagaaatatttggagcccaggtgtcctcggatggttttatctctgaaaggtactgggaattcagggtccctttccccgtttccattactgttagtataaataggttagtttaaacaactttgaatctctgtcatctacgcaactgtgttaacccaactttgtctgtgatttactgttsatatttggccatggaagtaggaccttcactctagtgcttaccctgttttttctcatccttgggacccacatggttatttatcagaagggaaagctgaacttttatccttatatttgttttctattaagaaagtagtaatgctaagattgtgtgagagtaactacggtgatttcttttaaaagatttttttttaattgtgaaattttgcctactgtatcaacactgttgatacagtttcagtacaagttgatactattttcagtacaagtaaatgtctgatagtctaatattcagaaagacccttggtgtttacctgtgtaagagcagcctagtagagtaaggaaaacttttatccttattttgacatttgcaaaatagtagaactaagatttgaactgaggtctgttcaactccagaatatgctctttctattacaccattattgtccaattttggcaagaaatattaagctatttccattaatttgatttaattaatgatcatgaaaatagacagattgtagattgattgctacttacctgctttaccctccaagtttttttcagatttctacactgaaaggcattgtatagatgttcggttttgctaagctaaaattggaatcagttcttctcaaatattttcttccctttagaactaaagactcttttgaaacagtattccttttgcattttgtgtttcctctctaatttcccatgcaaatattactttcatacaaatcacggttgcatgacgaggtgcttgaaactgaattgctaaaaggtagaagaaagaatgatttggcagaaagagtagggctttgaaggaaagtacccttgattaatattctgaatagctccttttcttagaagaaacgaataatactatttacttggtatgtagggtcgaatatttcaagaggaaactaaatctgaaaatagatatttggtgatgataaggtaagggyttacagtagctattattaattaaacacaaagctaggcactggctaagtatttcttgartattactccatttaaytgcaaaagtcctatgggataaataattactattctcattttataggtggattacccaaggcatgaaaaactaagtaagttgtggccaggcgcggtggctcacgcctataatcccagcactttgggaggccgaggcgggtggatcacgaggtcaggagatcgagaccatcctggctaacacagtgaaacctcgtctctactaaaaatacaaaaaattagccaggcgtggtggcatgcgcctgtagtcccagctactcaggaggctgaggcaggagaatggcgtgaacccrgcaagcggagcttgcagtgagccgagatcgcgccactgcactccagcctgggcgacagagcaagactccatctcaaaaaaacaaaacaaaacaaaaaaaaaactaagttgtttaaccatcacaaaggaaaggcaaaaccaggatttggatatagagcagactccagggctatgatcttaacattggctgaagggagacaggacctatcctattatgtttggaatgtcttagaatgtatattggactagaagagctagtttaaatattaggacatttggaatatgatatggtatatggttctgctcttaggctcagagctatcaagaagataaaactaaggatatgtaacatgctgctgctgctgcttgtttttcttttcctttttttttttcttttttttttttggtgcatgaattttggtagttccaggctccctgtactacctagcagttggaagtgaggttgtcagataattccttgacagctcctgttttactccacagtgccagttctctggggctttgccatgagttggaataggataaaggctctttgatgtctgcagtgctgtgggttcttggaaccctaggcttacgaattttaaaaccaagtcaggaacctagctgctcacctcagctgccacagtctctgattcaattgcaaggttatagaggttgcagataaaaaggaaaatcagaaagcagataggcattggacttggagaaatttttatggagcatcttgaaattaagatatattgttgtcacatattttcaaatctcatatttaccttaagttttggcttagaattttagagttggaaggcaacttagagactgtttagacgaggggttggcaaactttttctttaaaggaccagacagtaaaattttaggctttgtgggacacatggtctctgtcacaactcttcaactccgctgttgttgtggaaaagcagccaaagatgatgcataaataaatgagtgttgctgtattccaataaaactttattcattcaaggaggcagcaggccaggatttggagtgtgggctataatatgcccatcctgatttatgctagtaagttgaagaaacatacccggagagtttaagtgactcatgcaaggtatcaaactagtgaccaagatacaactctaatctaggcttcttggctcctcataactttttcactgtttccttctatgagtaggttaaggggaaaagaaagtaaataaatatttactgagtatgagtaaagcactttattaatcctcactgtaattctctaaggtaggtggtattatccccttcttgaggatgaagaaacaggattaaagaggtgaaatagcttgctagaaatcatgcagtcagtgtgtatcagtccattcttgcattgctataaagaaatgtctgactctgggtaatttataagacaagaggtttaattggttcacgattctgcaggctgtacaaaaagcatggtggcatctgcttctggggaggcctcagggagcttttactcatggggaaagcaaagtatgagcaggcgtgtcacatggcaaaagcaagatcaataggaagagggggaggtacggcacacttttaaatagccagatctcatgagaagtcactcactatcttgaggacagcaccaagggaaggatgctaaaccattcatgagaaaaaatccaccccatgatccaatcacctcccaccaggcccccctccaatattggggattacagttcaacattagatttgggaggggacaaatatacaaactatgtcaaagcagtagagcaaagattaactctagtctttctgcctcccaaattctattacagttggatacctctttcaaccttgattttactgtattgtaaacatacatttccttttagttttctttttgccatgtctatttttgtctctctctcttcttcaagaaattcttagtttgttaatgttacatgttaagtgtctaacatgtggcacataccatataaatattcgtttctttcctcatccagtagttcaggttgccattcagcttcgtttcttttatactaaaatttctctttttttaaaatgaactttttattttggagtaatttgagatttacagaaaagttgcaaagagagttcagagagttctatacacccctcaccctttacccttatatatcccactgtgggacatttatgaaaactaaaacatcttcattggcacattactattaactaaactccagacttcacttgaatttcccccgattttccattattgtcctttttctgttccaggatccagtccggaataccacattgcatttagttgtcatgtctccttggtgtactctgatctgtggcagtttctttgtcttttatgaccttgacagttttttttgtttgtttgtttttgcttttgttttgagacggtcactcaggatggagtacagtggcatgatcttggctcactgcaacctctgcctcccaggttcaagcgattctcctgcctccrcctcccaagtagctgggactacagtcacgaaccaccacacctggctaatttttgtayttttagtagagacagggtttcaccrtgttggccaggctggtcttgaactcttgaccacaagtgatctgcccgtgtaggcctcccaaagtgctgagattacagatgggagccaccgcacccagcaccttgacagttttgagagagtacttgtcaggtattttgtattaggttagtgcaaaagtaattgcagttcctcaaatcagcttcgtcttgatattttacggatgattagactggagctggagttatgttttttttttagaaagataactgcagacgtgaagtgcccttctcctcacattatatccagcggtacatgctgtcactaatggttttaagtagcatacagaaataggcacaaattgtaagtgcacaactcattgaattatcacaaggtaaacatgtccattgtaacaccctccagatcaagaagtagaatattatctgtacctagaagccctcctcatagtccttccctctttcacagaggcaaccactattgtgattgttaatgctattgagtagttttcttttttgaactttatgtaagttgtatgattaagtattttgtatggattatttctactttgtgagattcaatctttttgagtgtaacagagtttgttcattttggctgcagtatagtactccattatctgagtagactattccttctactgttaatggatatttgggttatttctatttctggctattacaaataatgctgtaaatttttatatacattgttgatgtctctatgagtatatttctactgggtaaatatctggcattgagtttgctgggttatagagttgcttatgttaaacttcaaaagatggtgtttatttttgaaagtagttctaccaatttacattcttaccagcactttaatgttgtcattctttttattttagcctttttggcaggtgtatagtggtggttttaatttgcatttccctaaggatgtagaataatgacagttgtatttctatctttccaagccttatatatcatgtatttctttttcttgccttactgcactggcgagggccttcagtacagtgttggagaggagtaatgataggatagcgggcatccttatctttctgattgcagagggaaagctttaagcatttcacctttaaataagatgtttgctgtagggttttttttttttttttttttgtagatattctttatcagattgaagatagtccctctgatcctagtttgggaagagggtttttgtttttgttttttaaatggataatttctatcaaatgccttgtctgcattatgattctcatgatttttctccttactctgttaatgcagtgaaatgcattaattgcttttctgaatgctaaaccaactttgtattcctggaataatcctactttgattgtaatatattatcttttttatatgtactggatataatctgctagtattttattggaatttttacatctatgttcatgagagtttggcctgtaattttcctttcttgcaatgttcttgtcaggtgttggtatcaagatgatgctggccttataaaacgagtcgagaagtgttgcctctttttctgttccctggaagagtttatgtaagcttggtcttattttttgcttaaatgattagtagaatgcaccagtgaagccattcaattctggagttttcattgtaggaaagttttaaattatggattcaattcctttattagatataggactattttgattttctatttattcttatgtcaattttgataagttgttttctaggaaattgtccacttcatctattttcaaatctattgacatgaagtttttcataatatcctcttatctttttagtgcttgttggatctgtggtgataccaccttttccatttctaatattaattatttatacttttgctgtttttcttcatcaatcttgctagatggggtgaattaattttattaatcttttcaaagagctggcttttgcctttgccaatcctttactgtatgtttgttttttatttcattaatttctttgatgtcttcgctttgaatttactgtgatttttttttttttttcctgacttgggatcattgcttagatcatagattttcagcctttcttatttttttaaatgaatttagagctctaaatttcccactaagcacattagtttgtcccataagttttaatacattgtattttcattaccatgcagttcaaagtattttctgatttctttgatttcttctttaacccatgaatgatatagaagtgtattacttaatttctaaatattttggacttttaaagtaatcttttaaatataatttatattttaattccactgtgatcacaggatatactttatgtgagttcagtcatttaaaatttgttaggacttattctgtggtccggtatgtgatctattttggtcagtgttttgtgtatacttaaaaacaatgtattttctgcagttacggagttcaatactgtatatataattaggtaaaatttgttaatcttgttcaaatcttctacactcttactgaattgtgtattttgtctgcctgttctgttagttattgagagaagtatgataaaatctattgctgtggtaggcagaattctgagatagtcccaaaattcccacccactggtgtacatgcctggtataatgatctctccttgagtgtaggtggtactgtgaaaataactgattttcttccattagatcatattatatgaaaaaggtgaagggattttgcatatgtaattaaggtcccaaattagttgaatttgagttaattattaatcaaaaagcaaattatcctgactgggccccacttaatcagatgagcctttaaaagggactgggggcccttccagaagtcagattcaatgtgcctctcctgttgactttgaataagcaagctggcatattatggagagggccacatggtagagaatggtgggtggcctccaggagctgagggcctcagtcctaaggaattgaattctgccaacaaccagtgagcttggaagaggatcctaagcatacgatgcataagatgagatagcagccccagttgatgccatactttcagccttttggggcctgagcagaggatccagttgagtcatatctagactcctgacctacagaaactgtgaaataataagtgctttaagctkctaatattacagcaggagaaaactacagccactgtgatcgtagatatcttttccccattttatttgtcatttaaaaatattttttaaagctcttattaggtacataaaattagaattgtaacacctgtgtagtgaatttaacctttttgttattacgaaaagtcctccattagctctaataaagttgtttgccttaaagtctcatttcatgtgattttagtagagctactctagctttgttttctgtatttactttaagatgtgtcttgtatataattttttgttttttatctgatctgtttgtcttttcattagattatttagtctattcatatttaatagatttactaatgtgtttgagttgagctataccatgtttctgtttttctatttgtcccacctgttcactgttccatttctgtaatcttcttaattatgttttattccattctcttctcctttcttyttttagtgattatattagagattaaaacattgcatctttgactttttaaagtctaatgtaaattagtattttttccacttcctggacaatgaaagaactttaraatgctttaactccaatcacctcctacctgccttttgatttattgtttttgtgattttgttttttaacatatttaatttccctgaaaacattcttattttacatattcaatattcttttagacttaccttcatatttatcttttctggttgccctttattccttcctgtgtcttcatgcttccatctgggatcactttccttccacatgaagaattccttttggtatttcttctaactgctgctgctgaatttttctttcatttatctaaaaatgtatttatttcatcttcattgttgaagatatattcactggttatagggttttggtcagcagtgatttttcttcatcagtttgaagatatcattcttctgayttctattgtttcttttctttttaaagacagggtcttgctttgttgcccaggctggagtgcagtggcacaatcatagcccattgcagcctccaactcctgggctcaaacaatccttccagctcagtctcccgagtagctgggactacaggtgcgacaccatccctggctaatttttaaggtttttttttttatagatggggtcttgctatgttgcccaggctggtctcgaactcctggcctcaagccaccctcccacctcagcctcccaaagtgctgggattacatgcatgagccactgagtccagctaacttctattgtttctgyagagaatttagctgtcagtcttattgtttctcttttgaaggtaattataccctcactgcacccaccacactgcttttaaaatttatctttgtctttgattgtagcagttttccaagatgtatctagataacttttctttgtaatttttctccatagggtttatggtgcttctgaatcatcgtttgacattttcatcaattttggaaaattctctgctgttatctccaaatactgcttctacttcattctgcttttcctctccctctgggattctagtgcaygtatcatagacctttctgccatgtcctcccatatgtgtcttaggctctttttgtgtttttccrtccctttttgtcttctgacctggcttccagtttataattccctctttagctttaaaactatgatttgctgttaaaccctttcagtgtattcttattttagtttttgcatttttcagctctaagatttccatttgattcatttttatagtttctagttctctgctgaaatgctccatcttcatttaattcattgaatgtatcagttgtggttatttttaagtccatgtttactaactccaataacgatgtattatggatttggttctattttctattttttcctctttctttagtcagatcttgtcttggtataggcctagttgtttttaatttattgctagacrtaatttgaattttggggtaatgttattttcttctagagattacttttgcttttggctagcagctagtcaatgggcagatcactgtaatgcaatcagggattgacatgattgaaagctgggctttagtctttgtgaggactagtcttattttcagttcatcctttttcctaggatgtcagtcagaatcctagcccaaaaaccttgggttttaccaggtccctctctcctttgtggaccctgaactctgtttgttttgccctctagccctgtggtactgcctaaagctttgctcagcttcttggccactcaacctcatatttgctttcagaattgacagcaattcttgtctaaagacaaggtggcttccgatgcctggcccacstctcagtctctctcttctcctggacccctctcccctaccgttgtgactcttcgaaagtcttcaagccaattttttgttttcactattcagcaagaggtttagtccaacaacctggtgggctgctgctgaatgtcgatctcatctcttggtatttgtcattatttcccacttctcaaagctagaatatgtggcaagtttacaaatatgcaaaatagagttcaagttaatggcctcctcacacatgaaccataccttatgtcctatatttcccattaagagtcaatgttaaaactcttaaataacatcagtttagagaacttccaggggttttgytgtttttttttttattttaaataaagcagtatgaatattttagatttaggaaatttagaggtttgtgttataatgtgaaaacattattgtggatctcattggtgcccactttscatgttttactaagtgccagtgttttccctgttgggaggaaactaagaaatttgctttctcagtgcttcaaattagttttcaattcatttccttctatttcagccatatattttggacagaattcactcattccaagattgtttcattagttagcagatagattgcatttcttcttagatttaaggctgtttcttcacaattcactcttwwttgtgcctttatagagggtgctcgagaggaagacctcgatgctgtggaagcgcagattggctgcaagcttcctgacgattatcgatgttcataccgaattcacaatggacagaagttagtggttcctgggtaagatattcaatgttttggttatttttaatgatgcaagttattttttagaatgaaagtaaataaattgtatttgtagttacccttaacaaattaaagaagcatgggaattccctctttctcctttatagyaatccataagacaaaatctatagcttgaattagattttaccaaaataaatatatctcataaaaacacaatttttatcaatatatttgtatagttaaaatgaagtctggtatgggatgggggatgggacatacagtaaaggtatgtgcgatatattttaaccaaattcttcagaactcttgaaatgtgtatcttattacaggccaggcaaattattttgggagcttgangcaaattctacctactatacatgtaaagagcaatcatttgtccagagctgcatacactacactaaataaaattgttttgtcatattaaacacagtctataattgaatkgcctgtttaaaatttaattytaaagaatgaagtatttattgtggaacttttttttttttttttgagacagggtcttgctcggtccccaagcctggagtatagtagcatgatctcagctcactgcagccttgactcccctggctcaagcamtcctgccacctcagctgtcccagtagctagaagtacaggcgcaccaccatgcccagctacttttttgtattttttgtagagatggggtcttgtcatgttgcccaggctggtcttgaattcctgggctcaaamaattcctgcctcagcctccaaaagtgctgggattacagatgcaaaccacccagactttttttttttttttttttttttttttttaagagatggtgtcttggtgtgttgccaggctagtggtatttaactcctgggctcaagcagtcctcctgcgtctgcctcccaagtagctggggctacaagcatataccactgtgcctggctcagctttttttttttttttttaagatttgttttataaacttttattattttaaatttttattttwttattattattattattattattagagatggggtcttactatattgcccaggctggtcttgaactcctaggctcaagggatcctcctgcctcagccttccagccactatatccactttacattgtggaacttttgggtaaaagtagaccatgcagtagtcatcaaaactcacccacagttttagaaggcatatatgctttgaatgggtctactccttttgtacttttatgaaagtaagctatttcagagacattgtgcttgtgaaatgctaataagaatttaaggagarctttgcactgttcttattggaacctggtgttcctttgtatgtgaagaatcatgtgaggctctgttacaatttcagatgagggttgaatgagtacagggaatcccaaaggtgatcacattgagattataaggtattcagaagtcaaatcttgggggcagggtgtggtcgctcacacctgaaactagctctttgggatgccaacgcaggaggactcctgaagtcaggagttcaagaccaacctgggtagcatagcaagatcctgcctgtctctataaaaaattaagttaaaaacaatttgccagacttggtagcatgcacttatagctccagctactcaggagctgtggatctcttgagcccaggagtctgaggctgcagtaagcactgcactccagcctgggtgacagaacaagatcctgtctcaaaaaaaaagaaagaaatcaaatactaggcatgggtcagacatagaagtcagttaggactagatgaccctaaattattggctattttttcctattgaactgaaacttgacaaagttgaaaaactgtcagattttaagagcaaacaggagagaactttgttagaagagttgcccagaactgacatgaccaataggtcataaattgcaacacagggatttttatctatacatggctcaagcattgagacttaggaatctcatcaaggaataccttgatacctgtattgctatatatatatttaatgagattaatctataccccaggcatccaagtttttgaaactttggacaaggtttaagctgctttacatttatactgtctggttgcatagggtaagctaaaggttgtatcaagataacagcatcagagaatttacttctttaaacattaaattggccacacatacatggctagcaaaacaccagcaaatcaatatatcatggcaggatagattgttgaaaacagtaaaactgtatttctttttaaaacattgccatttagacatttaattaattttcaatttaaatcagaatcttttttccaatcaaaagagtttgaattaaatatttagaaattatagtgctttgggtattcctgatttagaattgtcatgttaattagtacttataaagttgtgagtgggaaattattattcatcagaaagatgaagcacagctctttggcactgccgtgtattacatgtttgagtctgtatgctcctcaggttattgggaagcatggcactgtctaatcactatcgttctgaagatttgttagacgtcgatacagctgccggaggattccagcagagacagggactgaaatactgtctccctttaactttttgcatacatactggtttgagtcagtacatagcagtggaagctgcagagggccgaaacaaaaatgaarttttctaccaatgtccagtaagtagaacgtgtgtttaaatatggcattaagatgtgttctgatggttgtataaatgcatgcattaggtattttcaggattgtagaatgggtatagaatattatgcattttagttayagacctctctaactagagttaatattctgacataatggcatggaacccaagagaaaacttgacagttggacataaaaaactggtgtatatacagaggaaaagctgcaatttgtcttaaggtattttaaggaaaattaatgaggagctttttgttgaagtaattaattgtaatatgtgtttcagactttccaaaaatttagcctttgaacatcctttgattcatgctttgagtgcaatagaaacttttaaaactttgttcagtgggtatttgatgtatcgaaaaatgtagttcttttttaggagacttttattgttttaatgtaaccacagaaaatatggtattggtttcatttaataaaaatgaaaaaataattttcagttatcagtaatttctcagttacacaacctctgccttcatttttgcctagatatgaactttttacttaaaaaaggaatttaaaatagaaaattctaaattttggctgggtgtggtggctcatgcctgtgatctcagtactttgggaggctgaggcgggtggatcaactgagatcaggagtttgagaccagcctggccatcatggcgaaaccccacctctactgaaaaaaaacacacaaaaactagccaggtgtggtggcgcatgccttagtcccagctacttggggaggctgaggcaggagaattgcttgaatccgggaggcggaggtcatagtgagctgagatcgagccactgcactccagcctgggcaacagagcaaggctccctctcaaaaaaaaaaaaaagaaaatgcttttcatagttgagacatgtgactctatataacattttacatatttaaagagcttttatagctttaactttttaaagcattttcatactttttatctcatttttttacttgatgtctctgtaaggttgtaggatggtagcttggtctctccatttactgaaagaaatgagtaacctagaactgttcggatctcttgactctgattcagaaccctttcttctaggataacaagccatatatcttcttatctcaactttatttttatctgttttgcctcgtctccagggaaagatacagataatgaacaatgaaaaattaagtaaaatgtgtttttatcgattgtattctttttctcacctaggaccaaatggctcgaaatccagctgctattgacatgtttattataggtaggaaagaaaaaagtcytttttcccccttcttcttcttcctggatataataaaaaaattaaartggtaaaaactttttcagctactttagcagctggcaatttcatacttggatttctttaaggtttgctggtttataaagtactgcatctaggttttcattagaaccgtttttgtattgaatatttttaattttgaaaaaagcyagtccatatacaatctcatgctctgaggactcttctataaggcaatgaaatatgtagaagtgctgtgaatgtgtatatatttttcttaacatgcacatgtattattcattatattcatgtataattggggatacagatatataaagcaactttaaactttttctcttttggtgctaatgcagtagcattaagatactaagtcacattagagacctccaaagcaagtctttagggactaatataaactctatgcctyataaactccttggtacaactagtttttcttggccttaaaagagtatttcttataggttttgagaacccttcaatttgtaagtaactacagctcacccctttgctatttatcccrtcttggcttgtttggattttgatcatccagagaagattcctccagactgtccattttgctttttaagggtactgactgacatatattaaacatctacatatatgaatagtaaagagtccttgtagactgaggcatttgtattcacttctgtcttctcattggaactttgaacaatgtataagtctctatttgttccatactatggcacattccacgttcatggtgtacttcataatatcaagatctcactcttacctagtaagttataaaaagcttttaaatgtaggtcctaggtttcagctcactctgactcatgtggtctctggtttctaagttaagcactctctggaggtttttcctgtgctcattgccctcgttgttatttttgcatagcacacactttcagagattaccatagtggctgtggtccagcagtgctactcagtttataaatggaaggcagctgagtgctaaggtaagctgctgcccagcctctgtgagttccttactcttagtttggtgctcgtctgacatggtatgtagaacctcaccactccagcagagtactaaggtgtaataatactatgccagtagctgggatttctcttaaaatgggagagcaaagcaaaagattgagagacactgagaagagatgaggtgagaagttaatgcagggaggaaggaygaaaaaggagcttcctttcagctgccttgataaagctcsagaaccatcagagagaccccaacacatgggcttactttaaaaggtaaattaccttagaacatataaattgcatcttgattcaactaagtttgcttagactggtaacacacaaaatggcatatcctggtgttcagtgtactaataatagatatttaagaaacctggaatctgtcagataagtttagtagtgaatgctgcctagtctgtcctcatcttaaagaatacactctggtacgtattgtaataaaataaggtagattaaaatacaccatgccaattttttttatgcaaaccacaaatttgtttttagttatataacttttttccacaaaatatacatatatatgatttttaaaaactctttcagagaaagtactagtgctaaaaacgtaaaattataccttctatgaattttaatgacattatttatataacttcttaatatcttactcaaagtaggtacatgatcagtgraccttgaatacaatagtgtttaataaatattgggtcagaatgggtcattaatagatattgaggaaagagccaactattatagtttgccttctctcagttgatgccttttaaaagtttaaagccttgtacccttagatataagccaaattgtatcttttatcattccctaaatagaataattagtaaacactataaatttagcatctgacattcagtgtgacagagtgtagaaactgggttaattgaaaccagattacaaagaaattcattgttgaacaacattaattaaaggactaatacattccaggcactgagatgtattaacagtaaataatggggrgtctgacagagttatgttaaatattacctagaaggggtaaacattattaattcatgtaaatacttgttataatccaatcattagatcacagatatatggtctggactagactgttccagtaatccttttctgctttgagctggtcactaagaagatggaggaccgctgtgcaattaaatctatagtagtgtgcaactagaccactttgggattggcccgatgcacagaactccacaatgycatgtccctggtagatgtccagactgagcctggcttctgccaaaattttgtgcttgagtcaggatgtacctggaccagggacgtctgagaataggtgctgatatttttcttgtagtttcttcctagtcatagctgtattttctttgttctatatgttcaataaattacagacagaaggcttttcattcttgtaccacaatgaattaaagtttaaaatttgattaattataagtgtaaaaaaatagtctgaaggtcattggaggattctctaacaatagttggggggatgaagarggggagaatcccaaggaaataaggtggatagaattgagaatagaaattgatcttataaataattagtacaattatatctataaatgtttctagttttggtatcacattctaaagcatagaggaattacaattgtttcctgtatagattttacaaaactatttgttcttttctttttttctccctttcctggtttataggtgctacttttactgactggtttacctcttatgtcaaaaatgttgtatcaggtggcttccccatcatcagagaccaaattttcaggtattttattttgggtctttttggattgaaatgattgtaaatcagagaaaaatgataagtcacagatcatgaaatgaagtttcccaagaaggttgataatagaacctctctattgaggttgataatagaagattgtcttcagtctcactattttattctcactttaaagccaaacatctaaatgcttagacaactggtatttttcctatccagaagaatcaagaaaaagctgattttgatttagaaactatgggttaatagtatctatataatttatttttgaaaaamaccaaaaagttatttggcaactgatagatttattatgaatagcaagtcggtaactgttaattcctggcaaatayttattatctctaaatggaacattcaggtattgtagggagtactggaggtaatactggttcataatagcctggttggcagaaatgatagattgattatacattagaggcttctgagaacagcatacttgcacatttttattgtcagagccatcatttagcattggacatcatgcagctgggttttcagatgtcccaaaagtttccttagccctggaaactgaataagctcatttttgtttccaagctaattaccaatccgttatttgaaccactgatcattgaaccttgattgctrtcattactgatccagagtcaccaaggttttgtartttgtttctagtttccttcaaagtttaataggactatacccaaatatkattgaacttttctgggtctgaaatatgatttaaattttttgtcctaaagtataacctattttgcatcgtatcttttaaatcctgtagttgattttaaaatgtttaatttttaaattacctagatatgttcacgatccagaatgtgtagcaacaactggggatattactgtgtcagtttccacatcgtttctgccagaacttagctctgtacatccaccccactatttcttcacataccgaatcaggtgagaattttaaatggggtcacctttcagttaatggtgggatatatccaatggacatgttgctattgtcccatttgacatgatatgtaagacacattttgaaagaacttgctgaagtttggaggaaggtggatacattttctacaagatagtgttcatggaggactttgacttcatattaacctctaagttaagttatttcttgaaaatatactgggtatcaagtattgtgccaggtactgtggaaatggaccactaagttgtagtcgtcattaaagcttcaagttgtaatgcattctagaagctctcaaattgccataataaagtcatgcattttaaatttcatctggcctatttatattcaattaaaaaaatctaataaatgtgtattgagtgcttcatggatgtcagacatagtgttagacattgaattttattaaataagaagcaaatattttaaatttacgttagttagaagtattctgtgctatgacacaaagataactcattgccctaagggattaaggatactgtgctttaaaatatatttttatatattttatgtaatatataagtatattttaaaatacacatacatgcatatatgcatactggaagtatttgagtaaaatataactaccaggaagcatcctaggatttagatactgtatgcaacctttgctatatccaaatacacatgtatagatatttgtcgtttacttgtttgatttagatcctgcctaggattgagatgtgctcaaaataaaaawaccaacacatacttatagggtactcaaagtgaaaataagagacaccagattcctagggaaaggggaaagtgatagcattgggaaacagagtcaaagtgtaaycccaggctggacacggtggcccacgcctataatcgcagccctttgggaggctaaggtgagaggattgcttgagtttgggagttcaagaccagcctggacaacatagtgagaccttgtcctacaaaaatttttaaaaaaattagccaggtgtggtggcacatgcctgtagtccccagctactagaggagctgaggcggaagaatggcttcagcctaggaggtcaaggctgcagtgagcccaagattacaccagtgcactccagcctgggtggcagagtgagaccctgtctcaaaaaaaaaaaaaaaaaaagtgtaatcccagtaactggtgacatcttgtcttaaactgtctagaaactaatggaaaaaagggaaatgggttgtatagtctyatgcagttaaagagagactttcagttctccggaagtttttcatggcactattttctagaaagcatttgccaaattgatctttatttgaacagcgaaagattgttgtcaccattatgttgcacattttatgttgccctttctgttgttgatccacactgacagtcaaatgcataagttgagtgaaagcatttttgtagggggatcaagttaatgaagccagtatctttgagaacttagaaaaatagatggctaacatggactttgggttgggtttcttaattttttggaaatttttcttcatagtattagcctgaatactgtatctcttaaaccaaagaaacaaagaagccagatttttgtctctaccaccccattcccttctctaggattgaaatgtcaaaagatgcacttcctgagaaggcctgtcagttggacagtcgctattggagaataacaaatgctaagggtgacgtggaagaagttcaaggacctggagtagttggtatggaacccaagatttaggtttatacattaattccttagaagaaatgttagactttgcatcctaaatataacatataaatgtataaaggtcgttatcctattaatttaatcccttaagcattaacttttctgaaataatagcaaacttaattattcagggattgatttccctttttgtggattttattttattttttttaactggttcattattcattgtatgttgtgggttagaacacatagggcagaaagggggaaataaattttgtattcgtcatgttttttgaagcttggggggaaatgttaaaattaatggcatgaatttttattgtttgtagatttcagtcactttaattctggttaccattgtcatttggctttcttaaagattatgattatctgaagtctctgagccctcagatgcttcaggtttgaatatatgctccaggaaaataacatatttatgctatgtacttctgttatcagttctaagcatatacagaattcagtttaacgttttctaaattcattgccatggatagatctacatgtttacttaacaaatttttttcctgggcttcagtccaggaattttttctggatctagcgctaagagagaggctttattaaagccacagttctttttctgccatttggtccagtggtataaggactctcccttgtgagtgccattttgtctggtctgaatgcttaggatgcatcttcacaattttatgtttttgtttcttgctactttaaaaatatttagattaccttatctttgtttgaactggtgtctgtgatgctttttattactcatgtcttaaaggttgtgtcttcaatgcctcaaagctttttgaaaaagaaacatgcctgttctgtttttttttttttttttactagatacttcccactttctacattgtagggaatttgaggaatacattaaaaaaatgttgagagggctaagcgcagtggctcacgcctgatatcccagaactttgggaggccaaggtgggcggatcacctgaggtcaggagtttgagaccagcctggccaatgtggcaaaaccctgcctctactaaaaatacaaaaatgakctgggcatcatggcaggtgcttgtaatcccagttactcaggaggctgaggtgggagaatagcttgagcccaggaggtggagtttgcagtgagctgagatcacgccactgcactccagcgtgggcaacagagcaagactctgtctcaaaaaaaaaaaaaaagtcaagaggaataaaatacctactcattgtcctatcactgttaacattttgttacattttcttttggaatttttttttctaactgtgcatttactattatatagtttacataatgccatggagaccataccttatttattgtaataaagaaatgaattttatactttggtttattgttactgttttccctgcaggtgaatttccaatcatcagcccaggtcgggtatatgaatacacaagctgtaccacattctctacaacatcaggatacatggaaggatattataccttccattttctttactttaaagacaagatctttaatgttgccattccccgattccatatggcatgtccaacattcagggtgtctatagcccgattggtaagttaaattttcctctagtgctgatttacatgactttgtagggttaacactgcagataagccaggcaaatagttagtttataaatagtgttccagagaaccctagagattttgagaaagtatcttgggggtcatgtgaatttgttgagagaaatggacaagtaaatgaggctccatagtctctaaccagagaatttctgctgttttaaagattcaacttgtttttcactgttcagtggcctaaatgtagattatgagaaataccacattagaccagtagaatcagctttaagactgggaaaacaacttcttacagtgtttttgctcaaacttccaatttaatgtcaaataaacaaatattccataaagatcattataaagaaaatttaatgtgtggatgtgtacttttggcagtctctctgggatcatttcttaagtcaactaggtatattttttaaaatctcgtttttagggttaccttatgacaagtgtaacagtaactccaaccttagagactataacatgattaaagaaagttatgaagctccagttatacaatggggataaaatatgaattatatacccagaatgcaattgagttgtaggtgttgaatctttggaaaatgccctctagcttctggaatgaccctgatggatgggtttaagtttggaaagatggacatgatattaatctgatccagagctgacacattttcaactccagtttgaaaagagaaggatgataatgagactttgggccattacctgtgtggcatatctagtgaaaagaatctacagtgtgcgtttggaagtgaagatttagatttcttcccagtggaggaatgccagaaactgtatttccagtactgggaatttgctgctttgcataacagaattccttttttgactggcccagtatctgtatgagtttggaataatcttttccctaaatgtttgatatgattcatcactgaagttatctggggctagagttctgtttgtgggaaaattttgaaatttgaatttaatttctttaatattcatattttctatttcttcttgtttcagttttggtaatttgtgcctttcaaggaatttgtccattccatctaaatgttgaatttattggtataaagttattgacagtattcccttgatatccttttaatggctacaaaagccatagtcacttgtcctcttttgttcttaatattgttaatttatatcttctcttttgttcattgctttagttaggggtttgtaatttttattgatcatttaaaggagcaacttttggttttactaattttctctatttgcttattttctatcgcattgatttctgcagttatctttatttctttccttctactttgagtttgcttttcttctagcttttttaaggtagaagtttatattagtaattttagaacttttctctctccaagcactgttttagctgcatttcacaagttttgatgtgttttcatgaacgcgtagttcaaaatagtgtcagatttcccttgtaatttaattttgatctatgacttttctagaaatgtgttaattttcaaacatttgggggagttttcagttatcttttggctatcrattttttaaatttattgtggttagagaatttgctctgtattttcaatcctaaatgttttatggcccaaaattatggtttatcttggtaaatgatccttgtatatttgaaaataatgtacattctgctattttggggaatattactctataaatgataggtcaaatcggttgacagtttttttcaagtcttctgtatacttgctgattttttttttttttggtctttgtcctatcaacaagtgagagatgattgttgaaatctccaaatataattatagttttttgtttctctttttagttctgtcaggtttgcttcatgtattttgaagctgtataattatatgcaaatatgctaaggattattatgtatttttaatgacataattctttcatcattatgaaatctccatctttatcgctgataatattcctygtcctaaagttcaaagagcattgaggtgtgttttggcaggcagttgagttactattgggtcgacttgatcctttggaatcttgtttgtttttaatgtttgttagggtgggtgtaaagttgtctttatttaaggayggtggttgtcaactttcagtctcatgaccccctgaaactctaaaaacttattgaggactccgaagaattcttgcttatgtggattgtattaatgcttaccatatcagaaattaaaactgagaaataagtaaaacaatatttacttattagttccttttcaaatgacaataataaacccatttcatgttcagctctctcttaactatgttctttcttattagttttcgtttccttctaaccacaaataaacatataaaatcttgacctgccttgtggaaaatgttttctctcaaggatgagaaataaaatgagaattctggacttacttcttatcaacattaaaaaagccatgggggttgtatttgttgacctttcctgtttgtatattagttttctgatatggagaattgttctgctttttcgtcctctaccagtctgattaattcgtaggcttaacacttcctttttctttctccttggaatgcctcttgggatatgcattagttggtcttatgtcttttcttggtctaggtggtgtgtgtgtttggcttgtttggggcacttttagaggctccagctgcacatttccactcctctstgtgtgttcctctctgcatctgctgtttgtgtgtgtacactttttttctgagcaatctttctccttagccacattgagttctttaacagtttttctgttttcttcttcattaagataattaataatcatactactcacatatcatgttttagaacttcctaagcctttccctttcccaccttttggacctcctaactgaatttcaaagtcttcrttccttagattaaaaaaataaatccaaagataaaagaatgtaatgtcttataagtcgtatcagtgtatattttctctgttattgttgttagtgttataataaatcctaagtgacacaattcctttctcctacattaattcatttgcttgtacaacaactatttattgagcactgtgattaacaatataatcaaattccctgccttggaatttacattccaattcaaagagacaaactgtaacaataaacactatgtccttatattaagtagtaataagtgctgtggagaaacagcagagtaaaggggataaagaacgtattgttaggttgttctaatataaagatgtgtcaggagaggccttggtgacatttaagctgaaacgtgaaaggagcagagggaattaggtggatatgtgggagacgagwggtcgaagcaaaggagcagcacgtgtggaggttccgaaacagtratgtgcttggtgtgcttgacccaaggaggccagtgtagctggagtgcagtgaacaacagggagaggggctggagattagatcagagtgttaatggggtggtggatcacgtaacaccataaaagccttggtggaaggactctggctgacatcacgccccaagttgccccatactttccagaataccaagtaggtccttgctgttcagaattctgttcaatgtagcagcccctcccattgcgtcttcaaatgtgtgagagagaacattgacagcagagtaagtcatggcttgattacagacattgcatgggcagaattgacatttccaagagatattcagatgcatgttcaacatcactactgtcctaatctgagagcctccaacaaggtaattttaaaatagaggctgtcatttccttccagtgtgggttgatcttagatatatacttataacgaatcggcaaagtgacactgtgatttctgagttagaaaaaggtaatattccttcagcctagggttctgtctttctctcctgggacatgtgtctttgacaccctgagccaccatgtaagaagtccagctaccatgaagccgtcatgcagaagagaccatgtagagacatcacacagagatagagggaggcacccaggagccccagctgtttcagactccagatatttggatcatcctgcgcgggtaccagacatgtgaatgaagaagctcgtgagatgactgcagttccagctaccatcggactgcaacatcacgggacaccccaacccagaaccaccccactgaatacttcccaaacaccaacccacatgaaccatgagagataataatgactgttgctgtttcaagccactaaaaaaataaaaatatttttttaaaaagtagaggctactgatggttgaattgaaatgatgtgtctttatggtaggagctcaataaaaatcttagatctcttgttgacagtgcataaaagttaccagtagaggtcatacttgattaatattttcatatcctcttttctgtaagtatatagcttaataattattattcagtatatgaatataagctcagtaaaaytgtatcttggattgttacaagtggtctgtttgctaccttctgtgaattaccaactactgtgtaaaaaataagtactggcttagtgaaatatttaccattaaaaccatactgagctgggctgggtcgcatgcacctgtagtcccagctactcggraggatgaggtgggagaactgcttgagcccaggagtttgaggctagcctaggcaacacagcaagaactcgtctctaagaaaaaataataatttttttaaaaagaagatcttccattaaacaacaacaaaaaaatcacactgagcattatttaacacaagatatagaatccactccagaatcttgcatcagcatgtgtgttgtgagaatccactgttcaagtctatggaaattcatatttggcgtgtctggttgtttgaattctagataaatgagaatttacatgaaataaytaaaaaastgatagatgctcttcttatcaaaagattgttttctctttcaaggaaatgggtcctgatgaatatgaagagatggaagaagaggaggaggaggaagaggaggaagacgaggatgatgattcagcagatatggatgaatcagatgaagatgatgaagaggagagacggaggagagtctttgatgttcccattcgcagacgccgctgctcacgccttttttagcaagccttctgctgatggaagcactaggatgattctaggctgttaaatagatttctcaataatgtaaataactaaattgttctctgcatatagcaggaaaactagcatgaaatattgtttcaggccctgggttctatgtgacactacattaggaattggattgtttgggtttgctttgtgtttttgaggtagaggaagaaatgggaatcttttttttctcttccaggagtcagtggaagaatagttctctagctaaggaayggacatacctttgttttaaaatattttatacttacaaaaatctagaaatggagagggaactgttttgaataaggatttaaaatacctgcacaaggatagagagaaactatgtgactcattctgtgaaaagacttcttgcagttgtgagttatttagaaatgatcaaaatttgtaattaggctaatccatttagtgattcctaatattttgtactcacagagaactaattgactaaacaacttgaacgctagtggtttgtccttagacaatctgtctttgaatttaaagtctttatcgctaagaccttgactttaaatttttcatcactacaaccttgaatttaatttcaggtcttcaacatgatgaccttggatttaatttaaagtcttcaacactatgcgctttatcatattattcacagatgcatttttgaaatgtagtatgtaaaagtatgtaacgtgctgtttattaacaaaagattgttcacaacatctcatgtagtttaaatttgtaaatactgcttctgttttgtttctcctttatacacttgactgtctttgtgataagtgacatgaattttatgttaggattaagtatgttttcctgaaacttggattttttttgtaattatataattgagagttaagaatgaaatccttcaagtgttaaaaactcacattttaaaagcaaattttggttccaattctgtattttgtataattgcttattttccataaactaatattagtcagcatttgcttttaaggtagaagatgggatggattcttgctgacctgctgcaaaagtagcaggtccactcaaagtcatctcctagctttgactgtactgtcttgtgtgccccaccatccattttcccccaagaacagttattttatagagaaaactgtaagaaaacaagtggcattcaaggctaagcagctgccattagggaacatgaagacaaacttatcctttcattttcacacatgtcaaggtgttctgaaatagactaagtcatttttcatgtttacttttcatttaatagagtataatcaggctatcaaatcctattatggctatccttttttttttttttttttgagacggagtctcactctgtggcccaggctagagtgcggtagtgtgatctcgacttactgcaagctccacctcccgggttcacgccattctcctgccacagcctcccaagtagctgggattacaggtgcccaccatcacggccggctaagtttttgtatttttagtagagacagggtttcaccatgttagccaggatggtctcgatctcctgacctcatgatctgcccaccttggcctcccaaagtgctgggattacaggcgtgagccaccgcccccggcggctatcctttttagaaaaaaagtcaattgtctttatttagtttgttataacaaaataccttagactgagtcatttacaaacaatagagatttattgctcacagttctggagggtgggaagtccaagatcaaggcatcagcaaatttggtgtctggtaagtacccactctctgcttcaaagatggcaccttcttgctgtgttttatgtggtggaaagagcaaacaaacttcctcaggcctcttttataagggcactaatccccttcatgagggcagagcctaaaggccctacctcttaatactattgctttagggattggatttcaacaatttgggggaacaaaaacattcagaccatagcgtcaaaccacttaattttttcaaaaccgaacttttccaataaagcagtaatcaaaaactagtaaatcttggcaattaaggctggccctggaatcccttgccattttttctttctcttttctgatgacctctctctctatttccagagtacttatgatgccccaaatctcccttccaaccctgtctaacctttgctcctcagaatgctttgatttgctttatcctctcatcagaattcacattctcttagtatgttgaatgagtgacctctagttcatactgaggtgtagttttttgtttgttttttcagacagtctcgctgtgtctcccagactggagtgcagtggcatgatctcggctgactccaacctccgcctcccaggttcaagtgattctcatgcctcggcctcgtgggtagctgggatcacaggtgtgcactaccatgcccttttttgcatttttagtagagccagggtttcactatattgaccaggctggtctcaaactcctgtctttaagtgatcctcctgcctctggctcccaaagtgttgggattacaggtgtgagccaccgcgcccggcctaacgtgaagtttgttggtaacaagcttctgtattttctgctattggcaagaatgcttattcacacgtaacaggaatttaacagttggcattaatgttgcccaaaccagactctacttttggtggtgaaaaggccatttctggctctgaggccccttgaaaacacaactgattttttttactaatttctctgaggcttgatatatcactagaataagacaaatacctaaattaacagtagcttaaatagtttgggggtggttattcttgcgaatagtcagaggtagctagttcaaggctgacatgatggcacagtggtgttatcaacagtccagattggctccatctttctgacctgccatccttagcacaagacttttcctctcaaagaagatcatggttgcatactggctgctgcaggcatattgtattcacaaaaggatgatgataacaaggtaaaatgaagtggaaaatgaaaagtgaggcatgaggctggagaggtaaactagccaggtctctagcagccgtgtggagggcaagcagagaaggggcaggggatgcaggaattgacatgggcaacatggggacctggtattaaggaattgtaatggctcaagcaacgcaaactacagatctgaattagcacagtagcaatgtgaaaaaggaatgaaattgagatattgaaatggtaaaataggcaggaatggctgagtagatgtgagggagtggaagaggtcaacgttgattcctaggtttctgtcttcatttatgaaaaaaattcaggaaaagcagtcactctttaaagatgaattcagatttgtgcacattaagttcaagatgtctgtggaacatataagtggagatgtccagcagtcagctggatatgaatatgaagatagggggagtggtcagggatggagacagacttttgaatcatctgcaaacatacatcccaaggtaaaagagtagatacactatagtctcccagggagcacacacagccatggttctcagtctaatcctgggacaccaaattattagtgggtaaaggaaaagaatctcaagaccgaatggtcaagaaaccattctagggaaccaaactaggagagagtggcatctcagaagccaagcgtgtcaaggaaggaatagctaacaggatgtgtgtaaggtatgtacacaaaagagctttggaatccatcttgggaaatatacagtattagctgttttaaggagacatgctttaaatatcaaagcaagtcatcctgatttaaaaaactcccacttgtatagaggaataccaggatttgagcaccaccaaatggaactcattccctgacatcccaaagccatcagaataacagtagaagcgtcaagacagttactatatgattttccctgcaagacattcagtaatctatgattccccctgcttaaattttatctcatgccttcttccctgaccagttcaacacaagcagccctgagatgtaatatcttctcaccctgaccctcaaagtgtgtctcatgctttctaacagaggccatcctcttggaggaagacttgtacttttggcctgtagccccaccctccctcctatggcgttcttacagtcagttctgcagtgagtgggacactttccaaatataatagcaaatggaaacttctaattacatctgcacataaaactaatgttccaaatggtggttgcggttctggtgagtgcttataattttttgttacctcagcatccatttttgaatatgtttaacttttaataacagaagcaagtctcagtcaccattgacagtttccagtactataccccacgcaaatggctctagctggtggccagagataaacatgcagtgatgtgataacagggcactactgcagcttcaaactctggttcaagttcctcccacctctgccttttcacctgcttgcttttaaatccaccagttagagctctccagaggaaacctaactggataaagttgctggcccaaaggtccgttcctcccttccctctccctgttctccctgatctccgtgtgtgtgtgtgtgtgtgtgtgtgtgtgtgtgtgtgtcctctaggcaagctgtgtaccacccagggtccgtaagtactaaaaactcttaaactttcacaccgctgtgttattgaaaccatgcctacaatccagtccctgagggcgaggccaccctgaagggacagactcatgcaggcggattccctggtcttgctcttctgtccctgcctctggtggctgctggggaacagtagctaccagctaagttgatagagacactcgaagaggttcattcaaaacactggtccccgagcagcccagtaagcttttaaacgcataacattttgtttgggtctcaaacaagtcacaaggcacggatacggatgcggctgtggctgatggctatttggatgctgcccaagcctcgcagtaggaagcagcttcagactgcagcagggccgcatagcccgatagccaggccctggggcacccagggcaccagcaagacgcacagaaacgttttgaaaaacattttaatatacttaaaaaaaaagtaaaagggaaaatcagaagtctttggaagtttcctactgtttttatgtcccatagcaaatccgaggaggacgccccaaactttcagttccctggggttttgaaggtgctcattgggtcctggccacccggccttctcagaacctgggccaggaggctgagctccgcgcgggggtggagggagaggaggaggttcctgccgaggtgcggctgcgcggtgcgggagccgggagcctgggagggcaagggcatcctgaggggcggggccggggggcggagccttgcgggctggagcgaaagaatgcgggggctgagcgcagaagcggctcgaggctggaagaggatcttgggcgccgccaggtaagaaggcccgaaggcctgctggggtttgggtgagccgagccgaggtggcggcggcagtctgggcccgggcggagggtctgtgggggctacccccgtcctcgctttccactcgacccctgccgggcgagcctcccgaggcctggcccttccaacccgtcaccgcggcccggtgtcctagccgaacgctggcttcattttatctacgaggaaggagaaacggggagcgcgccctctcccagaagcagccccgttacccccgtcgcgccccccattccctcgggggcagcctcgcacccgggcccctgccatcgctttcgtctcaagggaagctctagcggtccagagaaactgcgccgggggaaaggccagccctccgtggtcacggcagttcctctctcccctcgcggtctaaatgtgtaattttgaaaagcaggtgtcgggcgaaacggacttttttttttttttgagatggagtttcgctgttgcccaggctggagtgcagtggcgcgatctgggttcaccgcaacctccgtgtaccgggttcaagcgattctcctgccacagcctcctgagtagctgggattacaggcatgcgccaccatgcctggctaaattttgtatttttagtagaaacggggttttcccatgttggtcaggctgatcttgaattcctgacctcgtgatccgcccgcctccgcctcccaaagtgttgggattacaggtgtgagccaccgcgcccggccgaaacggacgttttaagtacaacgtgatgttttgttttcttgggtcggctcgggccgcacccttcttagagtctgactgctgacttttcaaaaaacaacattaacccgggaggctgaggtagcggtgagccgagatcgcgccattgccctactgcctgggcaataagagcgagactccgcctcaaaaacgaacaaaacccacaaagaacaaacaaaaaaaaccaacattaagcagtgtgccttttatggccgtttagtgatacccaggctcttcactggtcatttctggaagtatttaacagcacttgatgggtaaaacaataggcttcacttcacagggtggttgagatgattgacggaaagcgctcagcacaaacgcggcggctgctaattatttcaggtaccctgcgatccctgagcagttgttcaagttctccactcctggcggtttactcccagttccctgaagaaggcacagagccccgaatgttgagggagatggcaacgtttgccaaaatgtggctatttacgtggcagtttatgaaggagaggcagaaagggaggctgcctcccctacaagccaaacagtcctaaaacttgtggcctctgtattttcacagtggaaactagaaactgtttgctgaacttagctgtaagaaaaacatcccattagctgagtggcttaggagata

SEQ ID NO: 95348 - DNA, 134822 bp, Homo sapiens
  misc_feature (1)...(134822): n = A,T,C or G
cgggtctggtgcctgatacctctctgactccatctcctgcagctttctcccttgctcaccagcttctttaatctagagaggctccctcaagggccttggtatcacccatcctattctctctgaccagaagattcttcccccagatacccgcaagaataacactctcatctccttcaggtctttgcttaagtgtttgcttaagagattacgtttctcaatcctatttaaaattacaactctctgcccccatccctctccctactatacttaccctgctctttttacaattcatttatttatgatgtttattgttccttgtaccttgctctattagaccgtatgctccatgagagcagggatatttttgttttgttcacagatgtctcccaagcacttagagtagtgcctgatacatagtagggtatataataaatatttaatgaatgaatctaccaatgtctaattgacaacaatcccttcatcactgctcttgtactcaaatttatcagttttacagacaaaatccctcttttacagtgataatttgcagaggaaagacttttttttttttttgagatggagtctcactctgttgcccaggctggagcgcagttagtggtgcaatcttggctcactgcaacctctgcctccagggttccagcgattctcctgcctcagcctcccaagtggctgggattacaggcatgtgccaccacacctggctaatttttgtattttttttaagtagagacagggtttcactatgctgtccaggctgttctcaaactcctgacctcaggtgatctgcctgcttcggactcccaaagtgctgggattacaagcatgagccaccttgcccagccgagaaagacatttttcaatggataaaacattaggctgaaatgtttgtgtttctcaaagtgagattcatcgagtccaggagccttagaacacaggctcaggggatgaagtgtcctgaatttgactaacgcttctctagcatgctcctggctgaccaccttctcgctcctgagccagaaataaacatcttgctgtcattcaccatgcctggtgactctttgtcggtaggcagggtgggcttcaccctccatgaaaggagcctctcacttttttttgagcaattctggagtagtcattttccctctctttacatcattttctttagcttgccaacttttgaatttgtttcatttttccagattatgaaagaaacatacataagatttagagaactataaagacatacaaaaaatagacacccaaagacttgaaattctcctaatttgtaaaagataacttctgtagcctgcctctctgcacataaatgcaatagtcagacacaccaccaataatattttggtgcagtttttctagtttttgttctatgtgtatgcattaaattgaaatacaggaagttaccgatgttcaaccattttgacccataaaatggcaatttcatatttatttatttgagacagagtcttgctgttgtccaggttggagtgcagtggcacaactaggactcactgcagcctcaaccgccctgactcaagtgatcctcccacctcagtctcccaagtagctgggaccacacatgggtgccaccacatccagctaatttttttcttatttgtagagacagggtctcactacattgcccagactggtctcaaactcctgtcctcaagcaatcctcccacctcagcctcgcaaagtgcagggattacaggtgggagccactgcaccctgcctggcaatttatagttcaacctactgaattcccacataccataccatgtgtattttacatcatattcttttcatgtcattctaacagcaccacttgcccatgtatttatggattctcgggctcttcataagcttgcattaacagcacaaataattgatgagcattagcatctcagctcagagcactgctttgtaaatcactggagcagtacaagtagggcagacttcccaagtcttgatgcgaatgacaatcctcagtgattcttccaggaaactcttcctataaattcccttaaccaattgcctgcatacagtgcctggcacctgattttctgccccaatggcagcttctgggaatgctgctaataactatgtttagatgttcatctcttgttcctcttttacgaatctggtccattacctgtgatgtatattcagtttgtagcgtatcttactctccaataaaatgatgctcttttgttttctttgttgttattgtttttcacggtttctggatctttcagccaggtacagtctactggcactaagagagagaggtgactatatttttgagcttcgcaggaggagggctgctcttacggtcctggctttctctcagcaaacatcatcaggactatcagctctctgtcatttcatcacagaaaagtccctgaggagtccatggaccaggtggttccatcatgttgtgatcctgcctccaaagtgaatgcccagagacgataatctatgtgggtcctctctggaccagtcgatctgggactgagtacagctctattcccaattgggctttaatttgctctacacttggctgagttcaacaatagcctaagaagattatgtgcccattcaaaagccccatttacgtaaggtttgggagcttatgatataagatcaactgtcattggtaataataaccttatgtcactccagrtgcaacagcttaaaaggatagactttaacattttggccccaagaataaaacagtaacaggagactagaacatttaaaggtaatctgtagcctacaaacacatcaaagggtagagaaaataaggcaaaaaaccctacaaaattagatgacatatagcttctcttatcatcaatacatggtaatctactacacagagaggcagtgtgtcctaaaacctaacaccctgactttgagatcagattgacttgtgttcaaatcctcacccccttaacagctgtgaacagcccctagattgttttctcttctgtaaaactgagctaaaacacccactctgtagagtgatggtaaggattaaagagagaatatatataaaatattcatcgtacttgagcttgataatagcagttactgtaactggatatacacaaaacaagaatttttaatttgatcttttaaatgcttattattgcaaacatgtcattgtgacattaataaacttttaaaaaacacccaaacttactactccaaaaaaatgactagttaattttcccatatttccttccagtcttggtgaatgtgtcaacaccatgtttatacaatctatttgtgtttttagcttttttttttttttttatttgagacagaatctcgctctgtcatacaggctgaagtacaaatggtgccatcacaactcactgcagccttgaccttcctggctcaagagatcctcccacctcagcctcccatgtagctgaggccacaggtgcatgccaccacacctggataagtttttttttgtaaagatggggtcttgctatgttgcccaggctggtcctgaactcttgggcttaagctaccttctcacctggatctcccaaagtgctgggattacaggcatgagccacctcacccgacctgttttctgcggtttttttttttttcatttaacattgtaccgtgttttccctgttgcaacatggtctttttaacttagtgtaagatagttattatttcaactaatataccataacctaattaatcatccctctgttattgagtacttagtttgtttccaatttggggagtattctttcattttgttcctgcttctgttatggtgatttaaaacgcatgatttttaaaatatttaggtctttcctttaggtgtaagcatgttcctagctcaaagttgagggcatcgtttaagctaacagctgttagctgtgggaaaagaaaaggtaatttcagtctaggggtcagcagattaagacaacttcgaaaattcacacatcctccgttgacctcggtttcctcatctcagcagttggcaaactggcatgaggatgacggctgattttggtaggcactcaagaaatggatctttaaggtggtctaaacacgttcacgttccttatttcactcaacttccactcgggtgcccagatcgaagcgtaggtattcacaatggttgaagcacagagaggataaggcagtggggaaaggacagagaatgcctcctgctgagcccgggggcgctgggtggagctctgcggggggcgtcgcctgcccctccagggggctcctccttccgggggctccggccccgcccggctccgagcatgcccagtgcgctccccgcccgtccgagtggtgctgagcgggcgccgcggctccaggttttgctggcgactcgaggccgggccgggccgggcggggcgcgggcggtcctgcccctggactccgggctccgtcggaaatccccccgacgcgatgcacgggcggcacccgctgcagcggcgctatcccgggacgtgcgactccgggacaaggaccgaaatgaggttccaggggctgccgaggcctcagtctatccctggaacgactgcccccaggacctggcacccaggcccgactggagggttccaaccatctctgcatcccttcgttcacatattcaacaaataatgtttgagcgcctagtgtgtgccagacagtgtgttgcaggggggtcactgcagtaaagacaagcagagctacagccccaaagctgacatttaggagggaaatacaacatgagaattaaacaaatcggaggaaaagccaaagtgaccaacctcatctgctcctctgcctccttgccgttccctaagcggtccggcgctcttttgggtcttggcactggctgttccctcggccaggaatgctcttccctgcttatctgcgtggctgaaataccactatcaccttctcagtgtcacccaatcagaccgtccatcagctcaagggccctatccgaccgcttcactgaaaattcactgcttacctccagccccaaatctcctgaccctgctctttttcctcttagaacttatcactttctaatataatgcatagtttgctaatttgctgtttatctgttacctgtccctctttccccaaactccactgggggacagaatttttgtctatttgttccccacgcgagaaaaaccagaataggtgytcaataaatatttgctgaaaatggataaatcactgttaaatgctatgaagaaaacagagtacacggagtggtcaggagcagagggctaatcgaggaaggtggtcaggaaaggcctctctgaggaggggacctatgtacaatgagaaggcgccggccacgtgaaaagctgggcaagaacgtcccacagagggaaaggcgggcgccaatgtcctgaggttagtgaagttcgagtgtttgatggacagaaaggcgctctaggatccgcaggaaggcaggtgtgagatgagacggaggtgggaagcaggagcacagatcaggtaggggtcccacgagccttggggaggtttaaccagggaagcttactagtgccaagggacgagcactggactggaagtcagcgggacctcagctcaaccgcgcacccgtcgtgcaagactcctcatttcaaagtttctttgggcgccgacttcttgccttccctaggcatgaaatcactgagggcctggcacacagtaggtgcccagtcatggctgtggaacgaatggctgcatgcatgcgcgagggaactcaggacctgcccggagctcggcggagagccccggtgcccctaggagatgcgtcggggcgcgccagcccggggcgggggcgggagaacaccgcaggccagcccggacgcccgccccccgcccggcgcgcgggcccgtcgcggccagcccggccggcgggaaccgcccgcgggcggcactgggcatgctcagacggcggccaggtcgcgccgcgagcgagcttccgcgccgcccgcacgcgcgacctacctgggcgctccgcgcccccggatgctgcaggtacgggcccgtgcgaccccagcgggccgggggcagggtgcggggctgccgggggccggggtcgcgctcggcgccaccccgcccccacccgtccctggggcgcgcggcggacgcgcgggcgggctggcgggtgcggctgcaccgggatccccgcaccacgtcggggcggggagggggcgccccgctgcgctcacctggcggggccggggcgggagggcgcgggcggggcgccgggtggggctcggccggggcgggctggcggccgggacgcggcgccggagcgtgggcgtgcgctccagccgggcaggggcgggcgcaacccgcggagcccgtgcgtccggcacctccggaggaccccgtgccgccgcgaccccggctcggggctccgagggggcacacagcccgcggggagctagccgagagcggctgccagcgctcggctcccagggcgaatccgcctctcggctttcaaagatggcatttcctgggcctggcacgaaactccagagccaataaatcctccccgttccgcggacgatatggaatgatttatcaggtacctgcggtgagacagctgcagatgggggagtgtatgtgagagtgcccagcccccccgaaattcccattttcagctacctaaacttactgagaagttgcggttgccttaaaaattcatgggaagttgagacaacttgacacctgggttttccaagctggtggaaagagcttgtgacttggaaactggagacctccgttcaagttgggctcccccttggccagctggtgaccttggcaagttgtttaacctctctggtcctcagtttcctcccttgcaatcagctggtaataatgcccacctcgctgggttgttgagtggattaagtgggataaattatgtggaggtgtttggcaccgtgcccggcacaaagctagcaagcagttggcgtgatgtgaatttaattcgtttagagaccctcgtggctctcatttcaggaggaaattagaattaggaaaccatcttcagggcctagtggtggagtgacagaccctgtctctgtgcccaggagaacttctgccgaagtcaaggccttcggaaaaacaatttagccgaattgtaatcagagagcatctcctttaaaagcagttttatacattcagaaactccagaagttggcagttggcttcacttacaaaagagctgttttgcaagatgatccatcttgcaaatgtttaagcagatgatgggagaaagtaaagcctgcttaggaagatttctgttttaaaaagctcccaaatccaactttaagcgattatttagatcagggtttctcagccttgcactattgacatttagggtttgataattctttgtgtcctgggcattgtagggtttagaagcatccctggtctgtagattccagtagcaattcctgttccccagttgttccaatcaaaaatgcctccagtattgtcagatgtcccctagggagcaaaatgccaccccmgcacccctttagaaccaccaatttaattcttgctttctgtcattagcccgagttgtttgagaatttcatcttgtgcttttgtaataactaacctttgcatagccttatagaacttacagagtacattcacctgtatcgtcttatttaatctttacaactcccttgtgagactggtgtcactcccattttacagatgaggacatggaggctctgagcagccaattacacagtatgtggtagagctggggtgtaacccaagtctcctggttccaagggcaggtctttttcttctgcatcaagctgcctgtccctttgttgtatggaggctttgatatggatgactttccggatgattaaatcaagatgtgaagtatattggaagttggaaacttttctgagattgactagttgaaaattaacaacagtaagctattatctgacagagtaggccattctagttaaatattctagtttatagcgagctcccataaatcccacatgcagttaatggaataccaatttgcagagaattagagtagaatagaacgtgcctaatactctgtattgatcctgcgttttctctggtgatttgccatctcctaaaaaggactcatatatgcaaattagacattagctggggaatataaaaggtcaagttactgaaggcatttcagagtagctgaggcatttattgaacttctgtatggcagatgtagtgctgagtggggatgtggggtgcaccccagagaatccaggttgcctgcatccacttccrtgcaggaaagggcaggccctggtcaggccagacaggtggtgggccctcagacagcttggagcaggagaaaaagcccaagttaccatggaagcagattcaggatcccttaccatatcatcagtcatgtctctgacccctcgattcatcttttatcatacagaagatactctggtagttttaagcattctcattcaagtctcagagacctggttagggaggcaaggtcagagacaaatcttatccctggaaaaagctggggttccgaggtggtaattggcttcagagaattgagagcaacgctttgttggctgtgaactggaaggtttcacacacagtggggtttgttgctgccaaaccccaccccattccccaccttgcagataaggaaactgagctggcaaaggtagagtggggccaggagcaagagggaccaattttgaccttctgaactacaggtccaggcacacaagagacattttctaggacaggcataacctaccagaagggctcagctttggggatgggagggagtgagaagacatggcaccctgcctttccccaaccctccgggtttgtggtggttgagaaaagaccagcaatttgtggtccctacatcttttcccaggagagctcaccttccagcattgcggtcctggaaagcagggacaatgcctctttatcttttcccaagatctgttgtagaagctggaatgctgaaggcacccagcacataccctggtctggaagggctggtgggggtgcagtagcctacccagcatcagctcttcattccaactctaatagagacaggaggagaccaggtcagtgtccacactgctcttggctgggtccaggtgacctcagagcctgatcttatagatgtcttctttcctctggccgagaaggacctgagaagtgcttggtaagcccctggctgaaaactgatttggtaatgggttctaagacccagaaatgttgcatctccagagcttctgcttgtgtgtgcacctgaagcttcccactgcccccaggttaacttgttattccaagaccaggtgtgagcacagatttaacagcaaattgagacatttattgagtctctaccatgtattaggccatagggctacagaggtgaacgctgaacccctgccttggaaggattcatggtggatttggaaagacagtttgtatatgtgtatgtgcgtccccatccatctgtccatggtcctgtaagtactttaaaaggataagctaggtgcaagagacaccagaggatgcagccattcattccgatgggcatcaggagacactgtggagcgtagttctaaccatggggagaagttagttctaacttcaaggcataatttgaattaagcctcaaacttaggaacaagatggcatttagggcaggcaaaacagcaggggcaaaggcatgaagagactttgtggatcataggcgtggtgattcttctccaagtccaacctggtcttttttgttttttgagacaaggtctcactctgtcatcaggctggagtgcagtggcccgatcatggctcaagcagtcctccttgtacctcgcacctgggactacaggcatgtgccaccacacccagctaattttttattttttgtggagacaaagtcttactatgttgcccaagctggtctcgaactcctgggctcaaacagtcctcctgccttggcctcccaaagtgtggagatataggcgtgagccaccgcacccagccaaatccagcctcttggtgttcactaatgcagaacccacctgctctggttcgggtctgctttatctctgtacatgggccaggcctcacctagcccagggctaagtgcctattctccttgttttcacctggatgggagcaatgccactgtgttgtctttgaggcaggagtaacttctgcagggatgcctctggttttagttatcagcactaatctgtacttattggttgccacacactgttgtgagtgctctccaaatagtaacttaattcatttaatcttcacagcaaccctgtcgccaggctgcctcccaggtacaagtaggtgggggctgaactcctctgcccagtgtatgtccctctgtgggtgatgctctgattgtggcccggcctccccctggctgcctttacatagatgtgccgggaaacagcccagtctgaattgcagtggagcactgaccccatttcctttaggggaccggcaggactgtgctgactgcgttttctgaaccaaagaacgggatctgtagtgtgaaaaaagaatgtgtgtgccactgctttgtgcaagaggaggcctgagaagtgtttggatactgagagagtggaatttttgaaacattttgatggtttatatggaaagttaggacagaggatttgaaattggaatagtcctggaaaattgaggtcccatgatttactgttaggatacacaagcttttagtaaatgtttaagcagtgtagagtgaagtgaattttttttactgagcccccatagggaacaaactgcattttagcctcaaaatctgactgattccttccagccccattttacagagggggtgagaaaactgaggctcagagagatgaagtaaccaccaaagagcacagtgtttgtaagcagtgcagccgagatttgtctttttggtttttgtttgtttgtttgttttttaaatatagagaaagggtctcgccatgttgccaggctggtcttgaattcctcggctcaactgatcttcctgcctcagcctctcaaagtgctggaatcacaggcgtgaaccactgtgcctggctgcagccaacatttgaacccaagtctgtgcctagacaaatcatctgttgtcaaagtcaaataaaatataaaaacagatgtttctctaaatttaaaacrttttgcttgggaagtaagaataataatttgggaaatctatacagactaggtggtctttggtttggaaaacaaagagaatgttgggagttttattagaatgagaaatattatgtattgttttgaaaaaagtccatcggcactagagaagctcttcgggagctggcaagctctgattgttgcatgatggtagcagataaaactagtcttagggtcacagcaatttgtttcagtagttattaaataaaactggttttaggttataacaggcagttttagcagccaggcttgcagagaattacatttttggagcaatgttatgtgccctgagtatttttcccctggcctctcaactctgatttagttgggcattacaataatgacccaaattgtataatcaacttccaccctgtaaaatgaggatcataattgcacctattccctttaagttgactgttgtcaatgagctaatgtggaaaactaaggcaaaacttggcatagaaaaggggtccctcactttgtggtcagacccctgaccctccagacaagtgctttgatctgtgttcagtgctgagagtcgctgtgggtgagtgaaggtccctcctcagccaggaccacaggtcccggttctcaggactgaagggatattccaagagggagcatccaggactgtgcaggggccatggctgcctgaatgctgtgctgatgagggkcccctggcgtaggagtggggttggagacctggcccatgcatgtcacctccctcagccacatcagctcaagggctagcccagaggttctcggtgagggaggcagcaaccagctccatcagctgttttttgaccgccagccaccattgggcctggggaggggaggttggcctctgagctcagtcttccccactggctcccccgagtcccctcccctgctctggttatcaaatgcattcatggttcttgtagaaaataaagtgtcagggaacacaagaaaaattatgcatgatgcttctctgaaagcagctggtccactgtcagcactgccatgatctgcacatgccctctcctgcttccagtggattctctactccacagacgggggagtcttccatacactcctatttttctcaaaatgaagacaaagctgatctctcagcatctcctgcaggccctatgttcatgctctttgagccctcacctcaccgtgctccttcctgctgcagggactgcaagagcctgggaccttctccccctccccactgattacttcatcctgtgggtctcagctccatgattgcagagcctttgctcaccttcctgacttgagttaaattgttgctataaatgttcatgccaccagatctctctccattatagcacttttcctagtggcaattttgcagttaattaatgtaattatttgtattagtacctgtctcccggctacactgtaagctgtgtgaaggcagggtctcttttttaaaaaaactttttctaagttttatttttttttcttttaatgttttattttgatacaattcagacccataggaaggttgtaagaataaatcaaagaagtcccataaattcttcacccagattccccaaacattaccattttattctttttattttatccctgtgtacatatatatctatcctgaaccatttgaggattatttatcaatgcctcctttccccctacatatatttcctaaaagcgatgatattccgtaactacaatacaaattttagaatcaataaattaatagtgatacaacattgtttaatctataaacctcaagttttatatacttttttttttttttttgagagagagtgtccctcactctgccacccaggctggagtgcagtggtgtgatctcagttcactgcaacctccgcctcctggattcaagcaattatcctgtctcagcctcccaagtagctgggattccaggcgtgtgccaccatgcccggctaatgtttgtattttttgtggtgacagggtttcaccatgttggatgctggtctcgaactcctgacctcaagtgatctgcctgtctcagcctcccaaagtactgggatacaggcccgagccactgcgcccggcctagatgttaggttttgccagttgtcttagtgatgtccttttttatagcaaaaaaaaaaaaactcttataaatgggttgcgtacggttgtcatgtctcgttagtttcctttaaactaagacagttccccaattgttcttggtccttcaggaccttgactttttttgttgttgttgttccaagatggagtctcgctctgtcgcccaggctggagtgcagtggctcagtctcagctcactgcagcatccgactcctgggttcaagcaattctcctgcctcagcctcctgagtagctgggattacaggcatgtgccaccacgcccggctaattttttgtatttttagtagagacgggatttctccgtgttggtcaggctggtctccaactcccgacctcaggtgatccgcccacctcggcctcccaaagtgctgggattacaggcgtgagccaccatgcccagccagaccttgacgtttttggaaagtacaagccaattattttgtagaatgcccctcacattgagtctgttttaactcaccattttgtccccagtgccaagcacagtccctggaccatcaaatgcactcagtaaatatttgttgaatgaggagagggagagatggaaggaggtgcaaggggaaaagtcagcaggttttctgctttcttccagccccacgcctttccctgctgagtgatgtggggttttttttgttttgtttttgttttgttttttttgagatggagtcttgctctgtcacccaggctagagtgcagtggcgcgatctcggctcactgcaacctctgcctcctgggttcaagtgattctcctgcctcaacctcccaagtaactgagattacaggtgtccacgaccacgcccagctaattttttgtatttttaatagagatgaggttttgccatgttggccaggctggtctagaactcctgacctcaagtgatccacctacctcggcctcccaaagtgctgggattataggcatgagccaccccacccggcctggatgttgttatttagttgcagtcatactgtatacaggtttgaatcctgctatttttataacaaagctttccccaaaaaagagaggcttcctgagaagatagtgagcctgctgtccttgcagatatacaagcagaagccagatgatggtttggcagggatactggagaggcaaatggaatgtttgatgaggggtgagactcatcaggctgggcgtccctgctaatcatgggtagacttctctaactgcagcactgacttcacaggcctaggcccccaagaacagtgcaactagaatttatcatcccaaccagaacaatttgagaataaaaaggggtcctattaataattgcacatgactgaygggtctmagccgggactgccctagktaaatccggacgtgtggtcacgtccggatttaagagtgacttmgaggttgagatcagtgcagggtgagccagcatggaaaaccctctagcactaggaatcttctacctggataaagacaaaactaacctctgcatggcctgcaggcctgatgtttgtggctttggtccccacacctctgtggtcccacctccagtaggatgccactcccagctttgtgcctgccacacyggccttttgtcagctctcacctcactatggtacctgtctgccacaaggactggcagagtctggaacgtcactcacataccctggctggatggaggagcagggacagagtttatgatagatggacagggagatgaacaagccagctgtgcttcccactgaccaatttctaatagaatttaagagccagggtgtgtaagcaaagaagggcaggaggcgggagtcaccctagaccttatcttctttcctctagtgctcacacttccacctcttcttcctgcaccaacgcccacatccctgttccagccctagttctgagatgatgactaagtcactgacctttggcaaaggcagggaagcaggtggcattggggacccaggcagaagaggatgggcattggatggacagtagatgcagacagggacttggatgcagagawaccaggcaggaaaccagcatctagggatcccagtaacaaggtcactacagggccatttatcaggaagtctagatttgtaatatcaagtgaccagacactcggtcaaggggtcaggctctgggatccatacagtctggttctttaacttattttctgcctagaagaaaatacaaaccttgccttcctggattacaaattattataggatgaaaatgtgaagataatggagctattttctgggaagcatcccagtcatgtgaactttaagaacactgtccagtgcagtcgtgtttttattactctaggcatcagcagctttaatggaaaagccagttagtaaaggaatgttccggttcctagaatgcaagatactagtactgctgaatgttggaaagattttctggttaactgtgttattagattttactgcttaaaaatgtactttcagcctggtgcggtggctcatgcctgtaatcctagcactttgggaggcagaggcgggtggatcacctgaggtcaggagttcgagaccagactggccaacgtggcaaaaccccgcctctactaaaaatacaaaaaattacacagtgctggtgggtgcctgtagtcgcagctactccggaggctgaggcaggagaatcacttgaacctggggtgtgggggcagaggttgcagtgagccagatcatgccacttcactccagcctgggcaaaagagcgagattccatctcaaaaaaaaaaaaaaaaaaaaagtacttccctcctccccccgaccccacacagctgcttaaaagcatttcgtttggggtcactttttacaggacagagcatgtcacacagtgtcagaactgaaagtgacctcagaaaaaccttttccggctccctcttttctggatggagaaaccgaggctctgcaagggatgtaacatactcaagggcacatagtcaatggcagagtaggaactggtacccatgtctcagaatttccagcccccagatcttgggtgtgttttctacatctcatccaaggaagtttatcagatgggccatgtatttttattattttgttaataccttttggcatttctctgactatagaaataagttgtattggcattgaagcagttaggcatttcttgctgagtttctctatgtagaagttgctaggctgtctttttcttcttttcgttttcatgtagaaaagatgatatatamcttccattgaatttccatatcctgtagcagtgtttctcaaactatagcacatcagaatcacctggaaggctggaaggctgtttaaaagaggctgttaggccccacccccagagcgtgtgattctcttggtctgaatcagagcctctggtgaggccggaaggtttgcatttctaacaagctctctggtgatgccactcattcggacgccagggactgycctttgaggtccgctgcccagggtttcatgacacttttagataatatgctctgcgctttgcrgccaggggggccctccctgctcttgccacagtggccagggactgctcacttgttaagaccagaggcaggttctcatatctcagcccatttggtcagagaaattcctctctgttccagggcttctgtgatgctcctctcccctcctaccttccacaccttggctcttcctctgctgccctttatcctctgatcttactgtcctgcaggccttttcaggtaaactcagctggttctatcagcaggggctcacaggtctgtgtctccggcctgatcatctctgggtatattagtccattctcacgctgctaataaagacatacccaagactgcgttatttataaagaaaaggagtttaattgactcacagttccgcaaggctggggaggccttgggaamcttacaatcatggcggaaggggaagcaaacacaacctccttcacacagcagcagcaaggagaagtgcagagcaaaagggggaaaagccccttataaaaccatcagatctcgtgagaactcactatcacaagaacagcagcatgggggtaactgcccccatgattcagttacctcccacctgttccctcccatgacatgtgaggattatgggaactacaactcagtgagatttgtgtggggacacaaccaaaccatatcactgggcatttccaatcctgtgtatatcacatctgcacaactcctcatgagtgcccccaggcccctcctctgcatttctgaaacagagctcatcaccttctttcttaaaaatgccctctccactagtcctctccacatagtcttcctgcttagaaacccaaggtcactcttcacttgtcccccataacctgccctggacaagcctgtccaccacacctcagaaatcccttctccagcccactccccttttccactccacccaaactgagttctctcgcttctcccatttgcctcttttgcttactgtcacaaataggccccttgcgcctgtacctccttcacatagctaccagaaaaacgttcccttaaaaagcacagaagatcacctcattctgtgcaggctccatctggccttgcttttccccatcttttctccaaccctgcaaaatgtatgctataagccagggcttcccaagttttcatgttaaaatgcaaatacatactcagcaggtttgggctgggtcctktactctgcctttccagcaccgtcccaggtgatgccaggatggggtccgtaagccaccacatgttgagtggctggactctaggggagatctgtgtttcacagagtcctgcagacctgtcttcagtctgttcatactgcaagaatttccaagttctgtgttgtcattgtaatgttttctgttgtatgtaaagttaaccttaaatgttttcaatcgtaaacttagatttgctgttgcagtggttatttgctattgaaagaattttcaaagaccaggaaaggcttcagttttcttcagagttactaaataggtccaggtgaataggtgtatgggagtcgggggtggatcttgagaatgtttttcctttaaagaggtacacactgcaaaggggttccctctcgtgagctgctccaggacagaggctctyccgtactcagtcttctcaggatggtggtggaaggggaaggagaagagtctggtttccgtaggaggagatgagtgtggaaactgatgattccgtcaggaaagactgggcggggaaggggagctctcctggggaaggtgctgccagtcacaggagaagagggcgaggatctgggggctggatcatatatgactctttttatttttactttttatttttatttatttatttatttttttcttgagacgtagtctctctctgttgcccaggctggagtgcagtggcgcaatctcggctcactgcaagctccgcctcccaggttcacgccgttctcctgcctcagcctcccgcgtagctgggactgcaggcgcccaccaccacgcccagctaattttttttgtatttttagtagagacggggtttcacctgttagccaggatggtctcgatctcctgacctcgtgatccacccgcctcggcctcccaaagtgctgggattacaggcgtgagccaccgcgcccggccgactttttatttttttttaagacagagtctcactctatcacccaagctagctcactgcaacctccatctcccaggttcaagcgatctgcccacctcagcctcccaagtagctgggattacagatgcacaccaccacgtctggctactttttgtatttttagtagagatggggtctcaccatgttgcccagactagtcttgcactcctggactcaagtaatccacccaccttggcctccaaggtgctgggattacaggtgtgagccactgcacctggccttatatgactcttgataaggctttgctcttgaggagccagctggggaaaccactggtaggcatgcctgggagccaggctttgtcctagcgcaggatggggggtcatagagggctgaggactgcgtgaggatgagcagtcaggaagtagagccatgtgcacctgggacaatcaggatcttgccacagcaggagggtcagagaagcaagtcccaggtagatgtggggtgagggaatgggatggatatcaaacaagggtgctgctgactttgaccagcctgctccagaaacctcactaccctcctgtcgcctctgaagtccaggcacctcagtccaccactgaagagtttttcaggatctggcctctgcctcctctcccatgtgtttgttctccacaacttttgcccctcaattctagctcctagccaagtggctgttcctcacttcagattcagatgtccatcctcagctccaagtttccacagaggtggctcggccaggctgcygtgctcagtgttagctctcagcacaggtggtgagcctgggaccatcaccgggcccccactccctcactccagggccctgctcgagcctcctgagtttcggtctccacctctccacactggaatgccagtggtgtctccacctcacaaggtcgtgtgatgatcccgtggtgacacagcagcatgctgagtactcaggcagtactggctcagctgtctggacagagggactgctgtgggacatgtgtccacagcttgaggtggagagagctgtggttggtgtgcgccacccagggcagggtggggctcaggcaattctgcctgaggtggacactgcagaggttggctttagttcactgcgtagatgtcaaaggcaccaaaagatggcagctcgcgacagagtgaagaggaggaagttggaattggagtggagaacgcagcctgtcacactttatacaaaatgattcagattctgtaggtcaggggtgaggcctgagactgcatttctaacaggcactcagtgatgctgaagtcactggtccagagactgcactttgagcggcattcatccagaacatgattaatgatggggagccttgtggaggagaaggtagggaaaaaacacgcacagcttaacgtatacccagctttctgcctggctgcttggagacacctcaaaggggcaggtgtttccaggcgtctggggtctgtcgggttctgttggaatcagattgtgggtgatgatggagactgatcgtaagagcccggtgagagctttgggagacgtatggagtgatttgattttgttgcttgatatctcatccctcacagtctggcttcacagttatatcctccttagaaggcatcgctttctgccggaggctgagccatggtcacaccctggaaggtcctctgtcttagcactccccacatggaaagctgtgatttctgcatccctctctctctgattgatttgtgagttcccggagagctaggaactgagacagcctcttaaccttgtaccccagcacctgcctcacagctggtgttagtgagaggggtggatacaggttttgaaggaagaatgagtaaagcctgtgatcaaaagggagtaggagagcccagcaccgagctggggcactggagcctgtcgctgtggacaggaggcccagctatggcattagccaggcctttggtgaaattgccaggaacatggtctaaagggtactcgcatattgggcgtcagctctgaggagcgagggctgggctgtgagttctctgaaggtgtggagggctccatgggggaatggcagtttcagccaagaagctatcatgttgatctgggagccaagagcaaacctacttttcttctgctgccttcaggaaaggacaggtgcccagatttatgcagactggggatcaagacttttctccctgtgcatcagggcatggatagcagctcttcctgaggctgagtagaagcagcrgatagggctccaacaccgggcagtgtctagagcagcccacagccttagcacctgcgagtgctgacgaggaccctgtgggttaatgtcagtttcattttcctgaggaggaaatggaatctcagwgaggttcagtaacttgtccaaagccacagatctgggaagtggaggaggcagcccagcactggagctggtttctggggraggagtgggtccaggtatggattaaaaggccagagcattgcagaggtggtagggcagggcagacagtggatagtgggagggaacccaggaagaggaagcagggttggggatgcagaaatgggacaggaggcagcagagagtcagaggacggagatttaagcagtttaacaccctagcaccaataaagcattaggtgacagcatttaaaacaaaaaaaattagatcagtttgactttcttctgactcatgattgctcatcatagaaaataacagaaaagttgaaagaatagaaaaactaacacatgtggggtttttttgtctttcagattcctttgttttaattagttgcggttatcccgtagatacaactttataacaagcctcttaatattctaatcacacagacatcctgtggctgttttgtggcttacttaactggccgtccgaaattggcaagtagcttttttgtttgtaattttcagtgttataaatgttgctgggaggaaaatctctgcaactaaaactttttttcatgtctgaatatatcctgacagcaggttcctagaaatggaattacttagtcagactgccttccagccccrttggaatggtatgctgtgttagcgctgacacaagccttctaaaagtgcaggtgtaatccctgcgcgcattagttgttcattcattcatttgtgcatttcacacacatttcttaagcgcctatgggcagaggctccattttctatggcctgatcagcaggggagcagctgccagcatcttggacctgaccgaaaggcgggggagtttctgactgtacacaatgtcccagccctccctgtctttgtcacaggcccaggagcgctggacagcctatgggtccagaagtaaacttgggtgcctctgtggctacagggtccaggcagtgcccacccatctgccttcccctcttgtgacacttagtgacatgctacacactgagtatggggttcccaattttatcaatttattcatgcattccatagatacttagtgcctcatgtgcactggacactgttctagatgccatggagatggcagttcactactaaaatccctgcctttaaggaacttacatttaaggagaaatctaaagtagggtgagagggagaaggagtgatcagggaaggcctcactgatgaggtaaaatttaagcaggcacatgaagaaactgagtgagagagccaggtgcatatctaagggaagggtgttcaaggagagggaacagcacgtgcaaacacccaaggttggaacaagcttggcaccacctgggaacagccagagaagcatgagaccctggtggagcagaatgagatctaggactcagggttcatttccccatcccctttggagattttagaaccagagggccacccctcctctgtgaagcagttcaaactaacctcatgtatttctcttgcttatctatagttggccatcactgagacctgtgttcggtgggctctggctttggaagtccctgccatgccctgccctgcccttgggtttccttatctgtgcactgagggacttgaaccaggagactggcaagggtacattgggctttcctctgtcttgtccagttaggtctgtgagttagatcttgggtaatttttaggttaatattaggagtgtgtaaatgccgttgttgatatttaattcttaatatgtttagcctattagatttcctttgttatgaaagagtctcccagccagctgtgggcagcagtcataagaagtgagtggagggataaacctagtggtttatccatcaaccatccaaccatgcatccatgcatccatccatccatccatccatccatccattcatcccacagtgaattattgagcacctgttgggtaccagccactgggcaggctgcctgtgcggcagtggtgagattttaaagactcagacccagcctttttgtgtagggatgttagctctgccagaagatcgtgctggtgaaggactccactcagcaagaccagagcagctaacacatcataccatatacaaaaattcactcaaaatggatcaatgaccttaataaaagaccctaaagccataaaactcctagaagaaaacataggggtaaaccttcacaaccttgaatttggcaatgaattcttggatatgacactaaaaatgcaagtaacaaaagaaaaataaattgggacttcatgaaaattaaagcttttttgcatccaaagacatcatcaagaaagtgaaaaggcaacctatggaatgagagaataggccaggcgcagtggctcccacttgtgatcccagcaccttgggagactgaggcaggcagatcattgagtctaggagttcaagatgagcctgggcaacatggtgaaaccccgtctctacaaaaaatacaaaaattagccaggtgtggtgtgtgcctgtagtcccagctactaaggagactgaggctggaggatcacttgggagacacaggttacactgagccaagatggtgctactgccctccagcctgggtgacagagcgagaccctgaaagtcaacagctcacactaacacaaaacaaattttaaaaatgggcagaagacttgaatagacatttctctaaagatgcacaaattgccagtaaacacatgaaaagatgctcagcatcattagtcattacggaaaatgtaaagtaaagccacaatgagacaccactgcacacctactagaatggttatgatcaaaaacaggaaactaacaagtattagcaaggatgtggaggaatagtaaccctcttatattgtggtgggaatgtaaaatggtgcagcctctgtagaaaacaatctgattattccccaaaaagctgtacataatagggccaggcacagaggctcaggcctgtaatcccagcactttgggagggtgtatcgcttgagctcaggagtttgagaccagcctgggcaacagggcgaaacccagtctaccaaaagtacaaaagcttagctgggcgtggtggcacacacttgtagtcccagctactagggaagctgagatgggaagatccattgagcctgggaggcggaggaggctgcagtaagctgagatggtgcctttgcactccagcctgggcaacagaggaagactgtgtctcaaaaaaattttaaaaagctatagatagaactaccatgtgacccagcaatcctactcctacgtatatacctgaaagaattgaaagtggactcggacagatacttgtatgctgaaatgataaaatttaagcattgcaacaccattcacaatagccagaaggcagaaacaacccaaatgtccaatgacagatgaattgataaacaaaatggaatatcattcagtcataaaaagaaataaagttctgatacatgctaaaatatggaggaaccttaaaaacatgctaagtgaaataagccagactcaaatagacaaatactatgtggttccactgatgtatctagactaggcaaattcgtagaggcagaaagtagattagaggtggccaggagttggaggaggggtgaatggggagttattgcctaatgggtacagagtttctgtttgggatgatgaaaaatttctggaaatagtggtaatgtttgcacaacattgtgaatataattaaagccactgaattgtacacttaaaaatggctaaaatggcaagcgttaggtcctatatattttacaattaaaaaaaaaaaaaacgcttgtttaccggagatttaaaagaacagaaaaaaagaaaagaaaaagaaaagaccagaagaggtagtgggaggagcacgtctttggcaggagccaccggtttggattctgccctgccgctgggtcacctcagaaacacatgtggtaacctcatgggcgaagcctggtcccctcttttgatgtgagagtccagtaagatggtgagtgtgggctctctcctgggtcatgggagttgctcagggaatggcttcccatcccctttaatttcatcttttccattgtaaaagattgttctacctggtagaaaagacagaacacagttaacttggcgattttgcgcaaatcatcatcagttaccttgctcatgtttagccatcctcctctaggtggtggcccagcccctgtctgtcatctcgttcctcctttctttggtgtttttgccctaactcagggctcttcgggacccccacttccttggcattggtgcctgtccttggtcacatgcttcctcttccttttctgggtttactgtggattctttctgacatctgagctctgctagtgagaagtcatctgaacacccagccacagttatgtacacccacgtggtggaatatcgtagagtcataacagaaggggtcagggaagtgtttgaaatacctggacgaatgttggatagtgatcatgagaaagagtggaatatatgattgcatagacattacaagttcaactttttaaaaaacacaaacaaaattgttggttggcttgttttgttcaacctgagcacatcagagtccacgccctttgtagccactggtctgagccgccctctccttcccctccaaggttcactaccatctgtggtcagatccccctttttcacagccacccagggttatttcttgctacctgagcctctctcctggcaggttgaaagaagctcagggttcagacaccgtgaggctgtcctggatcctccagagatccaggcccctgctacacccaggttgccgcccccttgtttatcagttactcctgccccatgactgtcctcatgagatccttggctcagagccagtgcatgtgccccgaaaggtgagtgagcaagagtcttatggagctctagtttgctgagaagctcagcttcccatgggccggaaggagtcctggcagttccgagatccctggaggcaggtgcagtgggaggagagactgactggggccagggctggccacctcactgaggtccggaaggagagctggtcatcaggtaggagcggccccaggccaaacccagagcctggcctcaggaaatgagatggcctgtttctgccctcccgctgctgctaataattaacccagggacggctgcctgtgaggctggaagggcctttagacatcatgtgacacactccagtccaggccttttgcaaaagtgggaggaagtcatttactacatttcctcaattctgaaaggtgcgttggccacactttaatgcttctgaaatcaccgtgaccttcacagtcacagggtaccttggatgtactgtttctttaaaataactttgctgaaacacctgttacatcaggtgtgtcatcttagagcagaggtaatatggtgataaatacccagatcattactcaagtttctaatgttgcagagttaattagggggcaagaaggttttctgggccatttcccttgtaagaggaaatttaccaacatgagagcctcggggagtgtttataaaagattatctcaaaagggtaagaacataccttatttagtaagttacagagacaatagtgactaagtgtggggctccgtttaccacctccagtgaatcacctgtaattcgtctgcctcccagtcacgtggatcagtggactcagagtgggtggtgtgtgatgcccccacctgagcttgggatcatcaccttgtttgaagtctgcctgtgtgacctgtgcgtggttctgagtcgagtctcccaatcttgtaaaatggttaacagcagtgctaccttccaggcccagtcaaaatcaatcagtcaggagtgaggrgtgtaaaaatacttggaaatcgctgaagccctgtagcacaggaagcccagaaacaggaaagggaatggcccagggactgagaaagaaggcaggtgggaagggcaagaatgcataggcagcattcacagagctggtgttgagtggctgtggcrggccaggccctgtgctgcgttaagaatgaaatctctgctccctatagttattcacaggggaggaaactaagacaaaacattaatttgttcaggttcatgtccacttgggagtggcagagcagagactagaacccaggtctggctattccttcaaacctccagtggactctggcctggcaagacccctcctgtcccagagtactcccaagcaaagatcttcttggtccagtcacggaccactcttgaaatcagtgagagggttgtctttatctctgtattctcagctcccagcatgtggaaggcctcagtacagataaatgcatcaacagcagcaatgacatatattatttcctttttttctttaccttttattttttagtagcaattatacattccttttgtttactttttactgtttttttttttaaggtttacaacttgttattttgataaacatatacatttcattcatttgttcctaaatgttgttctcctgatttgcattttggcatgccttttagaagtctttttaaagagtttcattaatttgctgaccccattttatcagggtacaaagccctggaaatctgaataggctgcataaaaatattttatggtttctaggggcacactggcaaccagcagggttaccgaacctaatataacctgagatggccccctggattaaaaccttacaggcagaggattttaaagctggaaaaagctttagagggctctaacctgggaaaccgagccagagaaaagtgagttagtgacttcgcgagtcacctggctgatcagagacaaataagatgatgcttcgtgggggtaagtggagagtatttttctctgtttccttgagataaaattatggcgagggacactggtggtgaggattgggtttctctggccggactaccactggcttcagactccttggcgggaacagaggctggcaggatggtccggttgtgagattccagcttcttggctggtatgcactgtgattagcacatctcaaacctttcaaagtgactttagctgttttcttttctgaaggcttctgctgcttttggctgtaaaggggtgggggccagagcctaagatagaaatatcgtggactgacacccaaatgggcgtgtctgtgcctgagagcaaatattagcagagtatttttgtaaggtttatgcaacttgattcatgtccctgtggagtaaatgtattccatcctgatttccagtctgtctggggcctagtggaactactcggagggaaaatgaaatgagatcagtagcttaattttaggtagaaacagctaaatgtaaaacatattccattgtctattttgtgagctttacatatttttgcttgttatagtccctcatctcctatttcacggtttgatgggccatttcagttttttccaagaatgaggtattcatttagaattatttccgatgagaaagtatacatgaaaggaaattcagttttgaacaataccacattgaggcttacatgtacagaaacttaaccttggaattgttgaaacagaagtcctgaaagcccagagttcatctatcccactcttcactgtcagtctgccctctgaggccttctcaccaagggtctcatccagcttctctgcttgattacctctagtgatgaggagctcactctcttacagggcacttccttccatatttgtgcaggtttaactgtttaaaagctccttcgtctgttgaagagaaatgtgtttctttcatcttctacccattgaacctttgggacctaaaaaaatcagtctaattatagtagctaggtgcaagttaatttgcatacacattatctccagtgattaaaacaaccttagggaaatccttcctcttttataggtagggaaactgagtctcagagagggtaagcagtctctccgaagttaatctcagtaagtgatgaagctgaggtccccccacagctgtctgattctgatgctggtaactttcccacagccttacattgtatcctaattcctcttctgtgtgacagccccttggatttttgaagtacctaatcttatccgccctgagatttcgctaagatttcagttattcctcaggaacgcctgctaaatcagtttctgtggagttcccataccatgcgtgcattttcccccccaacctttgcacatgggttttgcrgtgtctggaatgctgcagcttctccctggccaataccccttatcctgcaagactccccatgaaatttctgtgaaccggtcctgacacccaccccaccctggtggatccagagccctccttgtgttcctccagcaccctggggcttcctctcccctagaacttgatactgcccactccctggcctggcgcagagacggcacagagtaaatgaacatcgagagagtaaatgatgcggaactcctttgccaaagtagcaaccaaggaggctaaaagtaattgtaaacaagattgacaagcccatgaaatcgtagtcagatgcaggttgcttggaggctgtcgtggggacagcttgtctggggtaagtcctgatgtcattttcctcagtatgacttggttaaaacccccccatgggctggcatttgccctatttttctcccaggaggcaggtttgctggctcttaagtgtctgggttcaccaaggtggcgcgcagtggggaaaggttaccagtcactgttcagtgactacctgggcaaaaccaaatcttatttctttgcaacccacccaagacatccacatgggtaccgagaagcaacccagggaaagttgagacctgtggaatttgggggtgtgctgtttgacactgcatcataatcagatttcctaaaactctttaaaaaaaaaaaaaagaacttctaacacaatctaatttttaaaaaactcaggaggatggcgttgtaagtcaggagagagtggtcacctgtggaagggagtgtctggaagaggacatgaggggctcctgctgggctcctggggagcactatatttagcatttgtactttttctctctgtgatacttcaagaaaaaggtttttctttaaattgaatggcttcatttaatatacttagcatgagttttctgccggcttcaaggcaaactttgtgttttagttactagcttctcatcacaacactgaaaacccagctcatggcacttaagagattggtttctctttatagcaacattacctctttcccgaaactgcccgcggctcccgcagcattctttatcttgcccttcagggagcttaaaactactacttcttaccctgccaggatcaagtataacttttattttgttagttttgcaagtgtcatggtgtcgaacctataaataaaacctataaataaaccccaactccataataagaaaactatttgacattttgaagtcgtatgaaaagaaggccagtaattacagatctcagtttgaatacaacgggtcctacaaatgactccacccgggcttcccaggggcttcagtcagagagccactccccgaacaaattacagggtctgtagaacaaatgatttgatcccaaaattgtacttttggagtatcaggattgacaactgcaagatgattcgacggagtattgtgctgtattattaaagtgacctgtgtgagtgtgtctcccttgtgctagagaaaaatctgaagactcgagtattaaatatgttcataaatcattttttcataaaaggtattaacacattcataaatacccaaatttttaaaaagttttgttcaccagcactggcattgtcaactgtgttattcattagcagactttatgctttaaaaatgttatttaaaaattaatgttttagtatataggttcaggataaatttgtttcttggctttaacgttgaattagccatatgaggtattcctccctgaataaggacgtttgtttttctagtttagcaagtattcagtcacgattatgtttacattaaaacctaattttaaaaataagttagtgtatttagtgtatttatctttgtattgttatgtagtattgtactttggaaaatttaaaagccaagaaagcaggctaaaaatggcagaaggtagtgttgatcaatttatgaaattatagagttatgaggaaaaagattaaattccaggtaccagttgtacagtaattttgttatcaactgtacttattttaaaactaataaagggaaatgtataggaaagtgttttctaagatatttgggcatttcacaaatgaaaactgaaatgactaatttttaattagttgggctgaatttcattaagaacgttcgcaaaaaaataaaaatgatggtgaaaacagaaaatattaaataacatttttaaaaagaacattttcaaagcctgataaatagcacaaaatgtatgcatcttgtttcattgctgctgctttaagaaagtgctggttgactcaacgggtttctgaggaagggtgtgtgcattgtgtggccttttataatttggacaaattgttaagcattggtgttggtgaatgatgtgaactcatttgagtgaacaagccaagacatctggttatgcaatatcaagtgatacagtcctttttgaatgatggcagttttcctgttgctttcttctctatttagacaacagtactaatcccagcactgacatatagactggaaaatctgttacttcatcaacaatgatttaggaagcacttctcccagaccgagtgatgggacagctgccaagctacagaaactctatttagctctgggaggtgacttgtaatgtagacagtaaaactgacataaggatgcccacctaacaaagaccctggctgtaagcatagacaggcagaaccaaaaggaactctgaagattgtctggtggaagattttccaccgtgtggctctcagaccagctgcaccattgccatgagggtcagggggtatttatttaaaatgcaacttcaagctgggtgcgttggtatacatttgtagtcccagcttcttaggatgcctgaggcaggaggattgcttgagcccaggagtttgaggccagcctgggcaacataatgagtaccctgtctctttaaaaaaaaaaaaagtgccttccatatgacaagtaaaaccaggcatgatcctgatttggattgtggatcggggaagataaataaaggacatctttggaacaatttgcaaaattttagtatggactggatattagataagtgcttatcagttaaatttcttcagtgtgataattgtactgtggttatgaaatgcccttattagggggagatacatgctaaaatatttcgagataaaggggcatgatctctgcagcaagtggttcagagaaaagcctggtgtgtctgtgtgtgtatacagatgagagacatgggaaataaagtgtatgtgggccgggcacgatggctcacgcctgtaatcccagcactttgggaggccaaggcaggcaaatcacctgaggtcaggagttcaagaccagcctaggccaacatggtgaaacactgtctctactaaaaatacaaaaattagttgggcgtggtggcacaggcctgtagccccagctactcgggaggctgaggcacaagaattgcttcagcccaggagacggaggttgcagtgagctgagattgcgccactgcactccagcctgggcaagagtgagactccatctcaaaaaaaaaaaaaaagatgcgtatgtaccaaaatgttaacaattgaatccagggcaaaagggttacacaggagtttgtttttcttgcaacttttctataagtccagaaaattattttttgttttacaatgcagtttcctgggcccttactgaaccaaaatctctgtggatggtaaccaagaatctgcatttttaacaagtccccagatgattcttgtgtacgctagttttaagtcactggttaaaaagaaagtctcatttcagtcactatttttttaatatcttgatcagtgagcagacattcttagtttgagctcatcttagtgcttaataaatgataaataaatccccacccaagtgtttgtaaattttttttttttttttggatgaggtctcgctctgttgcccaggctgcagagcagtggtgcggtcatagctccctgcagccttgacctcctgggctcaagcgattctcccacctcagcctcccaaatacctaggactacagacaggtgccaccacatgcagctaatttttttttttttttgtagatatgatggtctcactagtaaattttatctttagaagggaataccccacttacttcagaggagtttaaggaacagttaggcctggctttaaaacagactggaatgagaagctgtcctctttgaggtaccaacagcagtaggaaagcatggtttctgtcttcctaaaggcgtgagcaatgcgagtgattgttgcttgttggggccatggttggccccacaaagaactcgataccacataatgcaacccagcatctgtgtgtctacagtgacgagagagaacaacgctggtactatattagctgctaaatgaatgaagcatgtgtctgcaatacgttaaatattggcatttgacgagaagtgcacttaatttgatgaatcattgtctagggtggctgatagtacatgtacttttccatgctagaaatgcccttctctagatcggtcatctgttggagctcagaaatagctaaaaggaaaaaaaaaaagtagagggaagaaggcgctttcctgagttcatagggaagaattgggaaaaggggactgcgccacggagaagggcttctatactgcaaaaaggatttttgaaataagctgaactggaagtgataagcaagaaagagcagagctgtccctgtttcccttgaatgccagcgtaggaggtggcatgtcttcctctgatcgccactaggtggtggcattgggctaggccagcttgatgtaggttgattactgtagtgagccacccatgattcatttatacaggttacttacaaattgggtatttataaatcaagactgttttcttattctcctcctttttttcaacggaactcatattcttcaattagaggcctaagtcccttactttaaaaaataagaatatggaatactttgccatttatttatttgagataagagtctcactctgtcgctcaggctggagtgcaatggcgcgatcttggctcattgcaatctctgcttcccgggttcgagcgattttcctgactcagcctcccaagtagctgagataacaggcgtgccccaccacacccagctaatttttgtatttttagtagagacggggtttcaccatgttggccaggctggtatcacactcctgacctcaggtgatctgcccacctgggcctcccaaagtgctgggaatacaggcgtgagccactgcgccggcctctttatttaaaattataatagtggagttgggtttgctctgtcatttgcatgtgttcctctcccttctttgtgtctatggttcattggcttgcgaaagaacagtttcccagatccgaatgtagacagaccctttggaaataaagcggcggcattaccctttcgttgtctcaggcttcagggcagccagggaggagccctagtagcagccctgttacccaaccctgactcccagggctctggtgtctcatgggcccagggtgtggcaatttgtgccagcatgctactgcttctggttcccctgagtttgtagagcagctcaaagatgtatcacatatctatcacaactatcttttaactctagcaagctgtctttattaaagtggatacataaaactttaagaaatggaacattcatatatctgtaagtcgtttgaaatcaggattgccctacaaaatctggaatctgtagacagcacccaatggcattagaagtttaacgttaataaaatgcctttcattgagtgcctgrtatgtgtcccacatgtgctaggcactttccatgtgcaactctaactctcatggtctttattgtgcccctactgtttacaaagtgaggtgttgcctcttgctgtattttccaagtataatctttgattaaaaactgtattcacagccgggcgcggtggctcacgcctgtaatcccagcactttgggaggccgaggtgggcggatcacgaggtcaggagatcgagaccatcctggctaacatggtgaaaccctgtctctactaaaaatacaaaaaattagccgggcgtggtggcgggcgcctgtagtcccacctgctcaggaggctgaggcaggagaatggcgtgaacccgggaggaggagcttgcagtgagccgagatcacgccactgtactccagcctgggggacagagcaagactctgtctcaaaaaaacaaacaaacaaacaaamaaaaaaactgtatccacaatagagcttcgtttgctattgtttaaaacattctaaagctataatggatttttaaactcatgcaaagaacaagcttggcttccatattataaaatgcatcagcagcagctgtaatcatttgtgtcagagaggccagcatgttcctggttgggttgtggctttgtttagaattaagaggcttataaaggaagccatagaaaccctgagttccccaattgctgtagtacaggaaacagggcagttagtcagcatccattgtcccgaccagattgtttaagatgtaatttcaagacaatctgaaaataccacatggctcaattattgggttattcaacatcaggctcattcttaccaaggtttgctttaggaaccattgtaggaagatttctgcagctttcataaaatacctatttatgacattgtcattaggtttcaagccctttatgtaacaatcagagatgggtgtgagaaagggaagtctgtctctcctgggttgctggtgggctttattttgtcagctagctgtgtgactgtgctggacagcatcattgctaaccacggtgaaatgaataagtcccagcggcacccacgccagcacgagcaggagctgctcaggtgaagtctggaaatcagtgtccaccattggagcatcagcccatgtgactttcatttggaggcacctgtttcaaatcttagtttttttctgcctggggtcattgtgtgactatctctgctttagctgttccacagaacaactgcccacctcttatcacacacagtgaattcatccacatagtgcatggcttagattccgcagagcctgtattctaaggccatccatccaaaacacaccctgaggttccctggaaacccactcctttagtcctcgtcttyctggctgttactttgagggctcccaaagrgaatgtgatcctgcgccacacctgaggatgctgaatcaccactgggggtgcggggacaggcaggttttaaaagctcctcaggtgattctgatgtgcacctcccactaaaaccaacttgaaatggttctattgtgtcttttgaaaaaaaaaatgtaacccacctgagattcttagacaagaactaaaaaataaaattgacattttaaagtcaatgtggttaaagcattatggaacacatttgttgtcttttgataactttttgtattactcagaaaatgcatccctgcttctgatgacattttcattggaaagggcaaggcggaggtggtggggtgggtggaattttataagcgactgaataagttcctttgcactgctggtcccaggaagttttttttttattagtatttcagactctctatccttatctaaggaagaagggaggtttgcttggagctccttaaatataatgatatgagaccaagtgcttctcttcctggatgtactttctgcacagctttcatcattgcggtttctctttctacacctaaccggtgccccctgtcattccctgaagcttgtttcttagtcctccaatctgctttggccacatccgtctaagagctgagtcacctactactccttggtactgactcccaaatcttttctctagccatgccctgacattaggcgctacttttccaattacccgtgacttgcgtctgccagaatggaccctggcagcagcagcttggtcatcacctgggagacaagatgcagactcttgggtcctatcaagacctacttgaatcagagtctgcattttaacaagatccccaagcactctgtatgcacactgcagtgtgagaagcactggtctatgggacatctgtctcccctcccctctgcattccttctttcttttcttgcttgctttcattttttaagagatagagtcttgctgtgttgcccaggctgggctctaatgcctgggctcaaacagtcctcccaccttggcctccagagtagctgggactacaggtgcacactaccgtagctagctacattctacttagaccctcccccatttttctctgtcaaatttgtctatcctgttgtattgctatacggtattgttgtactgcagtactgctatatagtctatgttatatagactataaaatttagcttcattttctatttcattcttccttccattcattcggacatttactaactctaccagacctaggtttggaggtacaatgagcaaaagcagacctagccttgtggggcttcgcatctagtgggagaagcagatattaaatacacatcatgagttctaagtgtgaaatgagggtaagcactagtgagtgaactctgtcacacaaatctgtgactggttagggagaccagggaaggcttcccagaggaagtgatgcttgtgctgagcactgacgatgaactggagttaatcagatgaagaggagcagaaagagctttgcaagcagaaggaatagcctatgcagaggcccagctcatcagagaaagtttgtggagaattaataaaaaaaagttaacttactctcaggcccttcatctttatttgctcttccacccaacactgtcagagttatatcttcaccgttccctgagccaatttgatttgtagaattacttcacatattctttttttttttttttttttttttgagacagagttttgttctttttgcccagggagtgcaatggcgagatctcagctcactgcagcctccgcctcctgggttcaagtgattctcctgcctcagcctctggagtagctgggattactggcgcatgccaccgtgcccagctaattttgtatgtttagtagagatgaaatttcaccatgttggccaggctggtctcgaactcctgatctcaggtgatccgtctgcttcagcctcccaaagtgctgggattagaggtgcatgccaccatgcctggctagttttgtatgtttggtacagatgaggtttcatcatgttggccagctgatctcgaactcctgacctcaggtgacccgcccgcttcggcctcccaaagtgctgggattacaggcgtgaaccaccgtgcccggctgcttcatgtattctttgtagaagcctagatcctcccacctacgtgatatagtcatgtcctcagttgcacacctttccagtctttttgcctacctctccaccattgaaatcaccggttaaaccagtttccttactgttccctaatatcatggtcagattttgaatgccctctaattctctcttcataaatattatactctctttttcaaaaaagtaaacttgttattaaaacatacatatggaaaagtacacaaatcataaatgtagagcttggtaaattgtcacaaagtgagtacaccagtgtcattagcacccacatcacgaaatagaatgttaaaagcatctcagaaaatgcatctcccccttcccctcactacacacaaaggtaaccattatcctttcttctatcagcattgattagttttgcctgtttgtaaactttacataaatggaatcatgcagcagataatctgttgtgtctcatatcttttgctcaatgttaaagcaattgattcacgttttgcatgtaatggtagttcatttctttcttttgctgtatagtagtatatggtatgactgtaccacagtttatccgttccacatttgataaatggggtcttttccagcttargattattatgaatattcttttttgttgttgttataaattatgattttattagatacatattttggtccaaatctttgaattgtcgtgactttaaaaaaaattttttttagcttacaagttctgagtacatgtgcaggtttgttatataggtaaattgagtgtcttggagatttggtgtacagattattttgtcaaatgcgtcataagcatagtacccgaaaggtagttttgcaatcctcaccctcctcccacacttcaccctcacgtaggccctggtagctattgctcccttctttgtgtccatatgttctcaaagtttagctcccacaagatgctggtacatgtcttttagtgagtgaatatacatttttctgctgggaatgtgcccatgactgaaattgttctatcacaataaatgcatatgttgagctttagtagatactattcagcagttttccatcgtacagtggttgcactgagttatgctttcaccagcagcatgtgagagttctggttgctccacaccctccgtggttttgccagtcttgaatcataggggttctctggtgggtgtgtggtactattgctttgtgggtttaatttgcatttctttgacagctaatatggttgagtacctgtttttgttttcttcctgttttctaaggagttttctgttacttcctctcactaggttagcaggagcactccatatattcttggcagatgtatatattgcgactatctcctcccactctatcggttgcctttttgctgccctaaatggtgtctctcaatgaatagaggtccttaattttaatatcagtttatcaatgagtcttttcacatttgaaatcatatttataccatgtttagttctgtaaaaccttagaggtagaacacaaatacataaaattgtgaaacataaataaaaatttaaaagcctgggaaatataaattagaagactcagaccagggagttaataagacatgcaaataagccacgtaattctgtgaacgtacaatttagcaatacatattgcttagagcatcttagaagtcaaaactcaattggaaacatgatctgctatgtagttctcattatctgtgagtccstcagacagtatcgagaggatgggatctgacaggtatctgcactcacaagtaactgacrattcgcatattaaagcactaacaggtatattttatgttacaggttattcagcgatagttatgacctcccggttacgtgcgttgggtggaagaattaataatatacgcacctcggagttacccaaagagaaaactcgatcagaagtcatttgcagcatccactttttagatggcgtggtacagacctttaaagttactgtaagttctctactttttttttttacttttcctgaattaatgctcctaacaaatagttttcatctcttggctcacaaaatgaagaaaaaaatattttaaaatgaaagcttgagatctcagatcttgtatgttgagattgcactggaaatacttaaaaatgttgccccaatttcacctctgccctgagggtcttccccccgcccttctgtgtggtgtgaactgtttgacgctcagatgttggtgcttctgggaagtcctcatccactttctgaaggagactggtttgggaagtggatgaggactccacggaagcaccaacatctggaggcatcatggcaccctatatatgcttcattagagcccacgtcaggttgcattttttcaagtagtgattagggtatatgttgcccatgaaactgagctccttgaaaacaggaaagaatagaaagggtgttgtttcccccgtgcctggcacaaggctgggcacacagcatgtgctcgttaaatgtgtgagtgagtgggttgtgaaacaatcagcctcacagatggcagggcttggggaggttctggctcatcccacttaaagcccgtggcagagccagcactagaaacgaggtctccagtctcccaggccagctgcaggaagatactgggaccatggctgcctatggtgcccacccaccccagtcaccaccgagcccgtgacctttgcccatgacctcttccatcctctggccagtcctaacaggatcagtcccaaccctgaactggctgctaggatctgccccaacctgtaaagttcagtgtgcaaggaaagacatcagaagagaagaygggatgagagaacaattgagggaacaataaaaggccacaagaatgcaaagggtgacaaaaactgatccctgggtcttccgcacaccccatacaagtttgcccactgccaatcccaggtgatcatggaccttgatgtaggcaggaggagaaggcagtttgcgtggagttttagcacggtgggtgctgtatctccttttcagcaggcatggggcggtggcccagtgccttggctgcagacgtctccctgtcagtgcagaagactcaggtggacaaccaaagtcatggaagtttgggcccttcgcctggcagagagtgggaatgggcagtagagatggatgtttcccagccttctgccccactcttccacgagcacccaggcctccagctattccccagtgtcagggcatcatttttttgtaggtgggaaacattgttgtaacaagtgaaaactccagcaaggaaattcagttgtctagttaggtgtctccaaagtctaattagaggggctacaacrtatacctgtgacctgtttcttcagaagccactttggaggaaaacatcctctcaggaggactgtccaaaagaatattctgcaattctggaaatattctgtgtctgcactaacccataggggagccccccagccgcatgtggcaattggacatttgaaatatacctgaataactaatttttttttttttttcctgaaacaaggtctttctctgtcacccaggctggagtgcagtggtgtaatcccagctcactgcagcctcaacctcctgggcttaagcaatcctcccacttcagcctcccaagcagctgggactacaggcacacaccactacacccatctaatttttttatttttttgtagaaacgaggtctcactaacttgtccaggctggtctcaaattcctgagctcaggcgaccctcccactttagcttcctgaagtgctggaattgtaaagcatgagctaccatgcctggcttaaattttgtattttatcttaattaaaatggaagcagtctttagtagttcatagtccccactttagattgctcagctttggtaaacatttcttaaagtgtgtcagaagctcctacgatgtgtgttaaagatgtcaatcccttgtcctgcctgggtgttttgaaacttgctctctgtggggtggggcctgagaatctgtattgtaatggctccccgagttgtctcaatgtgccgtgcagttagagaaccactgatttaggggtctgttggcaaggttgtaaatatttcccttaaaaggcaactagtttggttctacagaaccttgtcttgtatctgatttccttttaacataatctttcatagaattttgtgattacacaagctccatgaaggtcacagatgtctcttccagatgctgtacactaatagtttagtatgtgtctggcttctttgttaaaatgtgtgtttgtctgtcttggagctgttctttaaccgtttatcctcttcctgacgaaaacatgaatgtttgttagtatataactcatgtattcattcagcatatgtttactgagcacttactatgggctaagctttgttctgggtacaaaaaatggcaacagtgcacaaaacagaacaaaatccctgcgtttttgaagctaacatcccagcrggggagatgggccataaaaaaataygtgctgagtcgggctttgcagaaaaataaagtagagcaagagggagagagtgccagggcaaggtgaggttaccattgtatagacgtaaccagagacgtccccactgatgagatgaaagaaccaggcgttcatctggagggagcacatcccagggagaaggaacagcrgtgcaaaggccctgaggctggagcccacttcctttggttgcagaacacagtggagtctggagtggaatgagcaaggggggagggtagcagaagataagctcagagagataacaggggtaaggggtgggggatcgcatggagccttgtagatcattctgagggcactggctttttttcctacatgaggtggaaagcactggggctctgtccacagttgacaataggagggaaggggctgaaagactggtgtggcagtccagggcggagatgatgaccattggacatggtggctgtgtggggctggctaagaggaaactgagcccagaagtactttgaaggtggagtcaatagggtttgctgatagatgggatttggaatgcgaaagaacaggaggcctcaaggtgaatcccagatttttggcctgagcaatgcagcaaaatagagttgcagtttattgagatggggaagactgtgggaagaacaggtctcagggtagaagtaatcagttctgctgtgggcatattgtgggggagaggcctgttattcatctgtgtagcagtataggaatggtacgagatagaagagtcaggaggtwaggggatgggtccaggctggggatacagatgtggatgtcaccaggatagagatgggatttcaagcttgaaactggaggagatcccctgagaagcaagtggatggaagctgcgaacggtgcttaagggtaggagaggtgaggagcaggcactaaaggagtctgagaaggaccagccagggaggcgggaggaggccaagagcgaatgtctgagaatcccagcaggaggaagagtgatcagctctgtgaaaaggggagaaagcaagcacctaccccgagtgagcatcatatcaagccttacaacaggctgggtgcagtggttaatgcctgtattctcagcactttgagaggccaaagcaggaggatcccttgagcycaggagtttgaggttacagtgagctaattgtaccactgcactccagcaggggcagtggagcaagaccctgtctctaaaaaaataaaaaagtcttagagcctggcaaacagtgagcacccagaaattcttagttatgaacgtcattgttcttatcacgtggctgccaccccaagcttccagcagcctggttcaaagctgagtcccatggaacttgagaagttggagggcctggttgcaacttggagtatccctcactttgtgtctttctatgtgtaggaattgtttgcacagtctcattcagactctttagcccagcccaccttgtgaccaggagcagatgtcagggaagctgacttggatatcagtcgttcttctctcagcccagggagcgagccctggtggtgacctggtgcmgtgaagatgacctcttgagggcaggggccaggccaggaggccttttcttattataaatgtgttttttgttattacattttaatttctcttgagaactggrtgaattatgcagaatagatacctgtatatgtgaattatgcacttcagaggaggagatgtagtaggaacaaacagacctgagtcaggcagtcagactgtccttcwgctgatggtgcaaggcacggagcctctcggtgcctctgctcgttggcaagggagatggtgatgactactacactttgcaaagttgctgcaaagattagagatcatatataaaaagcayattggcataatgtctggctccttgtagatgttcagtaaattgtagttaataatatatattaaatgtaatataaaatcatacataaataattccracaaggggagcagctagctttttgacatctggtaatgtgcartgtgtggtctgggtcattctttccccacctattgtgattcttttctgatggatggtgccctgggtagaaggagcaggaggtacaagcgctgttgggcaggaaagggggcatgttcaggaaatgggcgtgtttcatgttcccacacttcagaccgaataatctgaggctgccccaaagaagtctctgcaggtggggcctgacagttatctaattctcccaatgctggtcactgtgacctattttcaagtacattatttgctctcaggcactcaaaaaaaggagctacctttgcctgttctatacacggtctatttctgactcatattgtcctttagttaaatggtttggttcaaaggattcctgcaaagtctgcctgttaaagtagaatttgcagttttccaaacactccatgctgtttgccatccctgggcctttgtgccgggccatctgatccaaaggcctgtttttagctcgtgtgcctggaggggaggggtgatgcttggccctgtcctcctcccaaacccagatcagggggttgcttcctctacggccccagtcgagatgaccatttgtgtggtcccgttgggtgtccactgtgcctcgactgtttcacagccctcgacggcctttgacactctgttacagccactgcctccatggctggggcaggaaaagggagcttcttatggccgtgtccccattcccacaccgtgcctgccccataaacatggagcggggaaggcaatggagtcctgatctgaagaggcgtgtggttgaacgtgcccctcagcttctcacttcagatgatgggaaggggaagcagggaggcagataatcccacagggtggcacaggccacatcactctgagggtattttgaatggcagttgagtatttttagctgtcttcctttaggctgttaggtgagagctttcctttcctggacatgcacttcggtggcttctccaggagtaggagccacaggtgtgtcctgaggagccaacagaaaccaccctggggttagcatttcattgtggataatccacyggaggccacagggagttcactgtgattatgagagctgagttttccgatttagacattatcacttgggaattgcagctamgggggaaggaagaaatcttagacaattaaattaaactcgtattgtcttgtgttgatgtcatttttcttagccctacttcccatatgtgctgtgtggcttcttaaaatttattaaagcttttcttgtggtgggaagtgtgtgtgcatagcatttctgaatattttaactcttttttgcctacagtaaagatgtttttaccaccaattaatttaagacttttcccacttgataatttcctttgttctagaaacaagacactggccaggttcttctggatatggtgcacaaccacctgggtgtgactgaaaaggaatattttggtttacagcatgatgacractcygtggactctcctgtaagtgccatttttaaaaaatgtgctgaactccttcacggtttgcttttatattttatgttttcttgtccaacagagatggctggaagcaagcaaasccatcaggaagcagttaaaaggttggtgtgatcttttcatttcagtcgaacattaggtgttagtgtatcacagcctgtttctcccctccaatcgtcagtgcctgtgacatctggtacctgtagttccrggtgtccaggagtcatgagtgagccgacttctccctgtctgacttctgagtcagcagagatgcttccagatcagccctctaggatccgccccagctgtgggaaagaaggggaagggtgagagtaggcagctcagagcgagggaacccacatttctgtatwcaaggaaggaaaaggaaggaggatggccttacttagcccgatgtgagagccagggtggacaagagagacagggagatagacaaacacaaacacctcatactttccaacagcatagtcgcgttcacggaaaaccgaaccataagtaggtaatgtcaccaatataaaagattaagtcttccaaactaccgcttatctctcaggagtgaatcccagtgctgcagctaactcccagttcggtggccagtcaggccacaccatagtccaccctctgccctgatctgctctcggcctgatgttccaacattgccagcattgttcccctttatgccactcatgccccagacmaacctggctgatctgcagggcctcccagtgcctcccctcagtctgttccatctgctgggaatgcttttccctcccacttccctctgtcgaaatcctgccttttttcaaggctgctcagatctcatttcctctcctagaaactgtgggtggctccctcgacattctcttagatttaccatcacccgtgttggggttctgaatgctcttgtcctcatctgtgttagttgcctttagttccctctcagaactgcaagttccttgaggttaggacccttgttatatttctctctgcatccccaaggtgcccaacacacacaaaaagtggccagtgcatggcggagtggagaagggcaagtggatttgcgcacgcaggtgcgcatacacaggatgccccccaacacacacacgcacacctgcctcagcacccaggcaggaagaagtagacacagtggccttcgctcccgtctcactgctgcccccacagggagcccgattctcaaagttcttccctcccatgagctgcatcctctgcgttcagaagtacctgtgggagcctcagggccacttgcagacaaatacctgcctcatccaagtccccaggaatgagtccacacaaggcatgaataggtgttgtcattcattctctcattaactcctgctttcggtgaacgtatcctgagctcagactgtggcaaggtgctgggctaagccctgggaatccagtccagatcaaatttggactctcccctcaaggagcccacagccaagtgtgcagacagcccagagggttcgacattctatgatartagtaagcacacgataggggacagccagaaagaaaaagaggctatgcctgcagcgcagagatgaaaagttttagaagagggggaggggaggtgaacaagcatcccaaggcagcaggaggacattgttctcccctgatgtgcagattgtcatagcgccatccgctggtacctagacatgtggacaggtgtactcaggggcacacccccgttagggattctttgaacacacgctgcagatgaagaaagaaagcactaaagagcagggagggtagagctcaggatgatctcaggtagaggaggagatctagcaggctagtgagaaggacttgagttgcagagagcaagaaagtgctcagtgcctagatagggctggcgaatatttactgagggatgatggtgaaattgacatgaagatcttgggatcttagcagcacaatctgatcttctcctgttgccgtctctgtgagaagaaatggactaattttatccacacaagcaaattgactctagatgttgatgcataaagccgtatttgaatatgttcattgtgtgatttactagtatactaacttaatatactttacattaaaagcatgagatattttctagtttaaaaatgattttgaaatgtggtatagcagaatcaaagatctcattactctaattctggttttgtcaccagctgtgtgacctaaggcaagtcacctctaattggcttatctgtaaaakggggctaccagtagcagcgtagcccactcatagtcatggtggtgttgaaatgcaggaatgtacatgaaaatgcttgaaacttataaatggctacacaaacgcaggctattatttctttgtatattttgcataataatgccgatttaaggattttttaaattcctaatacagatgacggagtgcaatgtttaaacacagccctaagataaacgtgtgctaggaagtagatgataactcagtctgtgctgatgttgcataaatgttttactttttgaagacttggagatttctgaaacaactaacttatgtactccatgtttgaaattagcccttttataatggaaaaagctatggttgagtgaaaaaatgcatcacttatggaagagaagcaacttacatacattgactttgtcaaagggaaaatttaatttgtttttgaaaaatgttgtaggaggtttcccctgtaccctgcattttcgagtaagattttttatacctgatcccaacacactgcagcaagaacaaaccaggtaacaacatttttttaaagttttctgtttagtgtataaaaatgagtaaccactaaaaatgtactcttcattttattactatggccaaataacttcatttgggtgtaactacaccaacaatgatgatccaagtaaaaatctggggtgcacatactgacattttaatcacctaatgagttttcagtcttgggcctgcttctcttatctcctgatttgctgccattcccagcatactcccatctgccacctcctacctctcccacctccttccacctccctggcctctcctgcctgctgaacacactgtgctcaaaggacaaaaagtcattttctaccaatgtaggcaggatgtagaagacaaatttgtaaaatagtcatccacaggtcaaatagcatgatgtctctgaagagctaaaatcaaggctcttgaagataacaagacatctcttgttataagaattttctttctttttttttgttttgagacggagtctctctcttcaccctggctggagcgcagaggtgcgagcttggctcactgcaacctccgcctcccaggttcaagcgatcctcccacctcagcctcccgagtagctaggattacaggcaggtaccaccatgcctggctaatttttttttttttttttttaacggagatggggtttccatgtcgtccaggctggtctcaaactcctgacctcaagtgatctgcctgcctcagcctcccaaggtgctgggattataggcatgagtcaccaggccagctttgttataagaattttctatcagatccccagtttgcaagagttagaaaggagagcaggctggattcagcttgtcttctcagtgaatcagcaagtacaggaaatatgtgaaccagataagggaaagagggctgtrataggagttgtttacccctcagggcttggagtctctcccaaccctgggctggtactggggtttttctaggtgtgagggacagagtaattggaatggagtaggagagtgtagcacaagaaagttgttgctgttttaacacagactgcacaaacaaactttccctcccctgtggcaacgttaagcccttttattattgatccatttatttttcttagggagggaagctatagaaaaaaagcaatagatgcttagtattgaatcctgttttacattcatcgtggccaaaagacataatcaaggaggcagcattaactcagacacagagtgttgccttgttaattttttttagcagtaattacatcacattttaacttgtaatatgttgaaaggccaaatattaatctgttactgtattttgccttctttgtgcacctcctccctctactatagcagacactgggaatttgactgtattttttattactttttaagccaatgtccaaggtgtctggtatgacacatccggtgaccacacagaagcatgccctgtcctctgagttttccccataccagctctttatgctggtaaactggggataggatagaaacactcagcccagcaggttacttcataagctgacggacacagagctggtgatgaaatctataagaatgtgtttgaaatgaccctaccaaggtttcctcaggccagtactaaataacacactctgggccaggcatggtggctcatacttgtgagcttcccagcacttcaggaacccaaggcgggagggtcacttgaggccaggagtttgaaaccagcctgggccacatagcaagaccctgcctctacaaaaataaaaataaaaaagtagtcaggtgtggtggtgcatgtgtcagcatctcaggaggctaactaggaggatcacttgagcccagaagttcaaggctgcagtgagccatgatcaagccatgtactccagcctaagtgatcgactgagaccctgttgcagaaaaaaaaaaaaggctctgttgaagggatgtcttaaaaacaacataatatgtgtgtgtttacatgtatatgtgtcttttatatatattatatataatgtgtgtgattatgtatgtatgtacatgtgtacgtgtgtgtggttctaaccagtgggttttttaaaaatcacaactccaaagtaaaaatatattttgtttcagaatacagtacacatatataaattactgaagcaaacgttttataaaactatagtaagtaccaggtactctgaagttttctattctgttttatttcctttttttttttttttttttttgagacggagctcgctctgtcacccaggctggagtgcagtggcgcgctctcagctcactgtaacctckgcctcccgggttcaagcgattctcctgcctcagcctcctgagtagctaggactacaggcgtgtgccatcaagcccagctaatttttgtatctttaggagaggtggggtttcaccatgttggccaggatggtctcgatctcttgaccttgtgatctgcccgcctcggcctcccaaagtgctgggattacaggcatgagcctctgtgcccggccttacttcctttttttaaaaacwtgccaactgtgacgcattaaattgattgtacaaccaactgggaggttccaaccccaagtctggacggcactgcctaaactagtgattgtcacctgcctcctgccttcccataacactagagccccaggtttgtggcatccactgggcacattagagccctccagtggccaaacttgagggagaggtttcctacggccagtgcaacctaggagtttgtctccagggcccatcctggccattggccatccacttccatacgctgtggaagagaagcccacttctctgggagctgacaaaatcttcctgctgagccttcctgtcatttgagggacatctgtggaaatgtagggcattcatgatggagagaagcctcgggcacaaatgaaggctgccttcaggtgtccgaagagtagtcatgggaaaaggggaactagatgtgcagggtcgtagaattgtggccagtgggtggaggctacagggaggcagattttagcacagaatgagtaataaacagtgtgtgtctgtctcttctaaaattcactggttgacaactgacaycccacccccaccttccatcttaagaagggtggtatcccgttgtggagtagaatgtaactatgaccttctgggatttgggcaccagatttatcttactgcaacaggagccatggtgggagccacccccataactcttatagagctggtgggccaccaggactgccagatatatatatatatwttttgaaacagggtcttgctatgttgcccagactggcctcaaactcctggactcaaaggatcctccctcagcctcctgagtagctgggattataggcacataccaccacgactagctgccagatcatcttatcttggaccaggcttctaccattaattcacatgctttaaaaaaattaaaaattaaaaaaatgaaaaataaaaaaacttaaaagattttacctatattcctggaacatagttatcttaccccagctttgtagttcctgtttaaggaaattccctctgaaggaaattttagctctcaagagtcaaagaagatgtatagaggtggtatctgttagtttttgtttgtttgttaaggatctaggcagagaggtcattacatttttctgaagttgaggtcacaggtggggtacccacaagagaggtcattacatttctgaagttaggcatcccaggcatctcttctaaagaactatcctgtattctaattgttaaataaatatcttcttcattgtgagcctccacaactgctgtttctgataaatttagatcattctttgcagaattttatatactggcaatctcaaaactaggctccttcaagattcctaggaagtctcccaagctcgggttgggttccactattctagtttctttgtgtatgatgccatggggttgactcagaaactttgctcaatatatgacaaggcagcatttggtgagtggtgatctccacgtttatcttctcatttatatccctaggaagacatactgattagctgagcttgtcaatgaaagcccgggttcaccattggattatctataactctcctttctctttttttctctcagtagcattgtaggaggagagaacacttaattctggttgaatgtcagcttggataaacatagaaacaaactagaaagaactgatgatgttctcctaggtggaaaagatggagattccaataccaaataggtgtgaatcagcaaatgtatgttatactgtctctcaaggccaggtgttcaatacattgtgggtagttaattataatcaaagtaataatattagagttacgacatggatcctaagctttttagccattaaacatataagaaatttgtagcatagtgagtttttttataacatgatcatccaggttaaaataagacacaattgacctcacatatcctatctgagctccgattttgtcatctgtaaaaatggagatagtggtacctaccttacagagttatgaggctgagataagagggaaagttacaaagtagtaccatgtacaaagcccggaactgtgcaaataggaggttgtaatactgtttgaagcattcccatctcaaaaagccagttccttggcctttataaatttgaaggaataatgaaactgatttgtttcaattgtgaaaattatttctctcctgcccctgtgcacttctgccctgtctatattagatttcaagaggtttcccttttgtcatcttggccagacaatggaatgtctatcccgtttgaatctgggtttaaaaaagcatgggagctagtggccaagtgtcacatgtatgccgcatccctaaatagaagtctccccagggcgcttcctgacctgcgcaatgctgccgaaggcctcctttccccgctccccaggcagaggagcaaagtcacaggctgaggggcctgccacgacttgcccacaaaacaggtctggagtttggaagttacatttgctggttgcccagagatgagtgcagaattcagcttggaggtcctggaaacttctagtttactgatgtttatgcttttgctcatgcacccacagttcctgggacacagaatgctcacctgggggtttgtaccccagccaagaaggtgtcttcacagactcccctccttttagcaacttcatgcagatggagcttgggtggatggatcctggcacagtgttcagaacagtggccctgccagtgtgtgggcgccgcttgtgcagagcccctgtgggttctggtcctcaagggcaggggcgctcactgacagcggaacccatagtaccagcccatctttggtgggctgtttccaccccattcatccctgctcagctcttcataggacagcctgtgctggcagaaaattgcccccaccagtcaagacgtagggcatcaacatgagccatcagtaatgacagggcagctttgcagagcgtaaggtagcacctgataccttggaccaaaaccgtatttttatgtatctttcacatgtacagctcttgtctttgactcatcaaactttctttttttttttttttttgcttatttcagtttgagtatgaattaatgaaaacaattgtttcataggcacttgtatttcttacaactgaagatggatatttgcgaaggaaggtaatgagaattttacatttttcttttcctgttagactagcaaaattcctggttttaatctaatgagtgtttatttctggtaacaatatcaaatctaaacagagtggatgtgcaaagcatcctgtacagcattaggctttggacatctgtttttattatacctcagtcttggctgagagaggctaaggattgataactttgtttcatgttatttcagttttattacaaaggatgcagctatctttctggtaaagacctgagaaattttaaagggaggaggggacccagaatgtacaatgggcttcattcaggaaggcagatcaggcctaatttgggtccacttttgagccccttagtacccacggatgactcattttctctctgggaggctttttgctcatttgcctgtgattcagtgcttcttgtgttaccaagaccatctcagtagctagaagggagaggaaattccaagccgatggtccctgagctacctccttttcttgacttagggaagaaactgcagcaggtaaactggtgggaagagcacagcttattcccagtctcttcaccgcacccccaacccctgtgagtttagccctggagaggagggtcttcagaggttaccagcgtgctgtaccatgagggagctggagtctcactggggaaatgagacagtatcccatgaagcaattaggaaacaattagaaccaatatgggcagtagagacaacagttgtcataagacttgaggagctcctgctggtgtgagctagaaaagtctttatagattgctaggatgagccagaattgggttgggtagagaagtgaggaggtggatttccctgggcagtgagaagacaccccacccccgacagtcccacttggaaaccacatgctgagagcttacaggagaatagagagggctgttcgtgtcctacgtaggcgggcatcttacatctagcaggcagaagagaactgttgaaggtttttaagcaggaaggatgtggcaagagccatatccacaaagatagtatcattgtgcacaagggaagactggcagaggccaggggcggttcagtctggatggaagggaatggacagccttcaaggaagctattgtagcatccaggccagagacctgggggcatggcagtgaagtttgtggagagaggaggtggatagttagaagcaagagacaccttgaggaaaggatttccagagctgttgactattgagcactcatagaattatagaattctcatcacttagctcatcctgccattcaaggtaggaatgagtcacttccccagcacaatctacaggtcttcaggcttctgcttgatcacccccagtgagggggagctcaccctttcatgaggcagcatttttacattttagggtaactcaaggttgaaattaccgacccctctcctgggtccaggctgtccttagcagctgcagaaacccattctttccttctcttctgcacacttagtcttttccacagatagtttgcagtcacctttttatgagacaggcaccgaactacgctggtcaaataaggccagggccttgcctcctcaggaacttctagtctaattctccaaataatgggttgtcttcagtttttcttctccaaacaaaatgccccttgttatttccatgtgaatcagggcaaatctgttaaggccacatcctggcttagatctgtggcccttgtcaagtcctcaccacctctctgaggagagggtctctgctaccaaacgcttctcagatgtggatttgtgtatttgtaactgtgggtcttttgacaggcccagtggaacatatggagcacttttcctaggtgtcaaattgtcccgacttgtttgagccgtccatggtagccggcactcaaggtgtcatctccttctttccaagatggttgatctcatccaagcccttcactcagcaggtgaagaccctgaagcccaaggtgaaagaaagggatgtgtttaggaacatgcggccaagttgagagcagaacagaggcttctggtgttccctagtatgtatttggaacagtttttggaatgtttttctttctggtttcttcataggattgtttcttccatctagagggaacctcctcagcctcttttctaagttgttccccaaatcccattcacctcctctttctccagcaaggacactggcgtagatttaatcaaaccccatcttgttaggagagcaaatagctgatactcatcctgtttctgcctatcctccccacgagctctctagatttccagatgaacaaacagaggtgagatccctggacctcatctgtaaccttggggagattatttgcaagtcccagcaggaacacagcatcacttgaggaacaatgggggcccctcagatagggaaagtcgacttcatatgcagctgcagaaccagcacacagtgcagtggacaggaagcggaacccctggagggccgcattgtcagaaaggcggagtggttcacatcttgggtacttcacgggctgccatagaaactgtgttccccacttcccactgggktgctgggaagaatttttaaagtcccagtggctcccagtgttgctgttaaggattcctccgtttatcagagacctccccacycttcaagcccttcttcctgccctcccctaacctgttctgcccagcagtgacccctgctccaggtctgctggtgagctcctgggcaggccgtggagtctgcagttgaatgcagaaaagaaaagggagcaatcagaggattcaaaatgtgcctaagacagaggtggagtcattggcagaaacagggcacctgggaaagcagtgagtttaagaggaaaggagaacaaggccaacccaagtccatgattactagtgaatggcacgaagactgagagacagatcactgaactctgtagatcttcaggagggcaaatagataaaggaatcctaagtcatcgtaattagttaatttaattaaggaattgcaggttttaaaattgaaaatacctttctacttgtccctcctaagaggatgttactattttagaaagagggtaatctagaaccaaagggtcattagaactcaggaatttagttagagagccctatgatgagtctcaggtctttactagaaagatttaaaggctgcccattgatctcagagtacaatttttttacttttttttcccctcttagagataagagcctgacccttcttgagcagccaaaacactggccagcattagtcctttagtttcatggtatttgtgatggatattattttaaacatgaaaaggttttattttwaaaaaattttagtgtattacatttgcctttactgtttatgtgcagcataaagttgcttttgttacaattcatgttgttttgtaatggttgatcaaagcaaagaaagacatgtgttactacgcatgatctgtcaatgtttaaggctgttgttggttcttgtgactttgctaatatgtttttctcctgacaggttaacctgycctcttaactcagcagtggttctagcgtcctatgccgtacaatgtaagtcacaaagggagcatttcacggatggacaggttgttctgatcagtgtgtggagaaagtcactggttcctcctgcttgaccaagtccctcttccccaggaatcctgctgggcagcatatctctggctgtccagatatgtgtttctactcagactggcactctcctgtagcatggrgatgttagattaaggaaggtggttaaggggaaaggaatgaatgaactgtggtgtgaaattttctccaagggagcccatcagacagcagacagctgttgcacattgcattttccagaaactttgctcaggcatttgatctgatcttcatacaaatcccagtgggacaaatatttgtatcagtcatcccttatacacatggaaacctagacccagctaggttaagaaatttgctaggagtcacccctgctgcttggttggtgctactctaaaacactactgggatcttaggaatttcttttcagagttgcagtatagctaatggattgtatattgatctataccagtgctattcaatagaaatataatgtgaatcatatatgtaacttaagttttctagtacactcattaaaaaaggtaaaacgaaacaggaggttttttatgttttatttaatgcaatatattgaaaatattagcattttaacttaatgtacaaagttattagcaagatattttacattttttttatactaagtctttgaaaatcagtctggattttacactgacggtacatctcaatttggactaaccgcacgtcgctagtggctaccatattggatagaaagtccagatggaattttcttgaaggctggtttaaactggagtaggaatccgctcattcaatcagcaaaactttatcgagggtatattcccttccaagtcctgtgggtagatgctgggtaggcacaatgaaaagaacgtatagccagatgagagcaaaatgtcactttatagtagctagctttgtggtggcagtacagttcatcagcatagtactcaggtagagccatttgcagctccagacctaagaaatctcctctaccagaagcccaaaccatcttggcctattaccctgttgacctactgtgtgatagatagwtaaggcagcaagatgatcaggtctgagagcaggcactggctgaactacacaccctgctctggtctcagaacaggcaaaatagcaagagaaggctgacggactcctgaggtrgccctaggtctgcctatttccctaccaggaaagaacagaaatgaaggaggtgaagagcaaggtggctgggcctgcagcttacccacccacctgcatggaaccaggaggtggagggcaggggacatcaaagatgaccctattcacgagtaagacgagtaccagagttagtctctccatcgatacctgcatcgcctcctccttagtgggaaactcaaaacaggcgaatgggcctgggtggatttgaaccttcccttctccctacaatatacctgggacaggcccggccatttcacatccatatgggaagtggcrtggtcaccagtttgtattcttatgatctgtagaccttgtgaactctgtgtctgccaggccaatcagctgaggagactgagcctccccatgtctcagagcaagtttggtgttcacagcctgagcttcaggtttatgaggcaggaacactaactagaatataggcatattcaatttaaatcctggcatccctggccaggtgtggtggctcacgcatgtaatcccagtattttgggaggctgagacgggaggatcccttgaaccccagagtctgagaccagcctgggtattatagtaggaccctgtctctacaaaaactgaagaattatctgggcatggtggtgtgcatctgtagtcctagtactttctaaggctgaggcaggaggatcacttgatcccaggaggtcgagactggcatgggcaacactatgaagccccatctctacaaaaaatagaaaaattagctgggtgtggtggtgcggtgcctgtagtcccagctactagggagactgagggggtagtatctgttkagccccagaggttgaggctgcagtgagccataatcatgccattgcactccagcctttgtgacagagtgataccctgtctcaaaaaaaaaaaaaaaaaatctgatgtctccggtggccagttatgtgggattgcctctcctaatcttggttttctcacctgtaaaactgaggtgagtgatttaagacagctctcaatatggctaccttggttcaaattaagcaataatgtgaaggtgatctgtaactaaaaattctttattgttggaccatccctggctgagtcattgagaactggactggagccatatacctaggtcttgccttttccacttgtacctgcccgactttgagcttctccagacctcagtttcattacctgacccatgaggataataagtgtctccttcaagggttgtagtgaagatgaaatgagtgactgtatgtraaactattagaatagtgcatggcacgtgtcaagtgttagctcttactgtattttcatgtctgcccagaagaaagctgtcagggaattgcctgttgtaaacagtaaattctatttagagtaaaatttaaaaagcaaataaagaattctatcgcaggcttcagtagtcaggttcccttctgcaaagaactgatagaatgggggctaaagaagttgtgggcacctaaaaagtacaaactggcttcagtagaaatagtcacattactgtcatgctaatagaatcatggcttatcaggcaagcagttttaagtataagcttttatccctccaccctcaataaatatatatattgcagagcatacatttctttaagattaatacttgtgccaggcacggtggttcacgcctgtattctcagcgctttgggaggctgaggcaggcggattgcgtgagcccaggagtttgagaccagcctgggcaacatggtgaaaccctgtctctacaaaatatacaaaaattagccaggtgtggtggtacacccctgtagttcaagttactggggaggctgaggtgagaggattatttgagccctggaggtcaaggctgcagtgagccataattgcaccactgtgctccagcctgggcaacagagtgagactctgtctcaaaaaaaaaattaattattgtatatgaaattactggatcaaaaggtacacctacattttatgatatattttgctaaattcttccaagaggggcatctgatataagtcctcactgtgaccagctaaccaaaagcacattttcttattacataaaaaataaagtccggcatagtggtttgcacctgtaatcccagctacttgagatgctgaggtggaaggattgcttgaccccaggaattagagactgcagtgagccatgatcatgccactgcacaccagcctgagcaacagagcaaccccatctcttaaaaaaaaaaaagtgatcttcaggtaaagtacccaaaaatatacaatgatggaaaattgttaatggcctgccaaggctttatgaggctcaaagaataaagtatattttttggaatatatgtttattccagaatgttccctgcacctgtgccacatagaggtctgtaccagcctcagggtgcacagatggataaaacacactgctctccccaaggagtctacagcctgtagggaggcagatgtggatgatactagcagtggagatggccaccaggggtgcacttcatcctgcttagggagaggggagagcatctgggaaaacgtcctaggaatgacccctgagaaccgcctctaagatcaggttggagttgaatgaatagcaggtaaaagtctttccaagtacaacagccgggcagcttgaaatgctgtactttggaacctgggatataccctctctwtgctgcaaaacataaaatattatcaaccagaagaaagcatggaacttaaaatgacaaggtatttcccacataagcacttccttttttgtttgctataattagcttttgcatgtgttgctttctcacagataggaaaatggattacttaggagtttggagcatatagtatagtaagtaggtaagagyagggactatggtcagagtctagcctccaaattagcagctgagcaacagtggcagacccctttgggtctgtttccttatgtgtttagtggggataaaaagcattgcctatatcacagggttaccatgagtaacaagtgggatgacatcattgaaatcgatgtgaaaccgcccagtgttttgcaaatgtttatcactgtttaactttgtttccccctagtggttagcacagagctttgcacagagtggccgcttaggatttaaagggaaaaccaccccacagggaggctcattggttgtgttcgaagctcagaacatttgtcagcaacttgcctaaagagagaaccttgctgttcatgtttgcagaatgataccagggatgggactgttaactggtatgatggataaccttattgggatccaggaggatctccatgagctaatgaaaccaacagagtaaaggttcataggactccaccttgaggatcaggaaaagtcatttacagcatttggttggcctttggggacatgattgctgccatcaaatggccagcagcggctcacaggcctggcaggcaggctggtggggtggtaggagcactaactggggttcagatcacctgggttctgatcttgaccctgtcccaaaggtgtcttttcctttccagaccgcaatttcttcactcttaacatgagagctttgaaggaagtgattctaatgctttctagcaatttcctcattgggcatgctgtgtcagggcatttaaatgatttcctgtgaacgcaccatgtgcgcttaaccctgcacaaactcaccagccacatagccttgacatttctttccacagcttggccacatttggctggccttaacagcctctggtctaaccttgaccaagtctgcatgcattggtcacttggctctctgcccttttccccttccagaactgaaatttgcatcagcctctgtacagatcagttctgagcacccaaatttctgagcacctactgtgtgtcatgcctggtgctgggggccctaaaggtgagtctgacccactcccagcacttgaggcacagtgtaggaaggaaacagatcccttcgttatggtgtggatctcaaaagagcagccctgtgttgtgagggcagttaggtgaacaaggctgaatgaaacataacctttgcatcttccctttttttttttttcttttttgagacagagtctggctgtgtcacccaggctggagtacagtggctcagtctcggttcactgcaacctctgccttccaggttcaagcgattctcatgcctcagcctcccaagtagctgggattacaggcatgcaccatcatacctggctaatttttgtatttatactagagatggggtttcaccatgttggctaggctggtctcaaacctctgaccgcaggtgatccacccgccttggcctcccaaagtgctgggattacaggcgtgagctaccatgcccggctgcaytgccctttcaacttcatggtgaaattcacccaagcagctacctgtctcacccacttcccttctgagattggccacaaagtatcaccatatctttcccatactctgcccttgtaacagagaaggagttatttgatttggaaatytttggtgttgaattgagagtcctcaggaggctcctggcattgcagcgagctacaggaagaaattcattaaaatatttggaaagatcaggactaattttttttttaaagatgaagtagaagcttttttttgttttgtttgtcaagaaaatggaatacgagatcggttgccccattagaggtagagattatctcctcaattctgtttttagacaaatgggaaaacttgtggagaagggaaatggatgtcctcaggtcccataagcctggtcctttgctcttcacctggtgccatcctttttcccagtttcctcaatggtccagacacccaaatggtttgagtccttgaggcagccatggacacttgtacaggttgagcactgcacaactctcaagaatgcccatcacatcataggcatcaacaattcaattcacattggcagacaacagtcaagggtctcaagggagcagtaccattttgcccaggggctagtctggaagtcacccttccttttccctctgcacctgcaggtccctaatgtgattcccctgatagccccagaatctctcttcatatcttctgactccccttagaatgtgtctttctccctaggaactttgctgttgcctgagccctgaccattcagccccactcccacccaccttttgtccctgtggcctctgagcacatcctggtcccctttcttccacacctccctgaatcccaggggatgggtcaggatgtggagagtggtcaggtcggcatggcctcccttctgcctacacccagtttttagagcagattggtccagtgttatggtaaccttggggtatggcagagaaagcctgcaccgtgtgtggcatatggattgtggcatttcccccagtgggttctctttatccagtggcatgagtgcaaactgctgtgctgaccacagtgtatggaagaggtgtgggattagaacagggcctaggttcaaacaccgtctcctaattttctccctctgtgtccttggggagaatgagaatttgattggatcatgtgtgatagtatcttagcctatagtgaaggctcagataagtgtggaatctggagctagtgagaagcttcagttcatgtggtgtagaacttaccagaagagtatttctaattaatgttattctgatgatgctgtagatgcttataaatgcaaaccatattaaaaaggcaaaactaattatgattttccccttcttctgtcttgatagctcattttggagactataattcttccatacatcatccaggctatctttccgatagtcactttatacccgatcaaaatgaggactttttaacaaaagtcgaatctctgcatgagcagcacaggtgaggggggctggggtggcctactttggggacttgggttgggtattttcagacatcatatccctttgtgtttgatgcagcctctttcttttgtgcatgaatcctctttcaagatgtcgggggtttttgaacctttgagctggtatggtggcagatatatttggcataactagcatttctgtaaagtgtaaaatccagtaagagtttagggtgatagctgctgcgtccttttcaggatgtcattgaaatcagtaaattcctgaaggaaatgcccattttgaaatctgattgccccaccaatggactgtaccaaggtaaacctcttagcagtttaccacatttaataaaacaagctgttccttcaggtcttgttaaacagacagacagatggacgtacagtgctgaccagtctcctgtgttcagttcatgaaaagtgccctatgtccaagtggggagcatgagtcttctgcagttgcccctgcgtatttgttgcgagcctcagctccaacacatatgcccaattctggctgctcttccccttccttgttttacttaaagctacagcagcagctgtgcagtccaggtcaaataaaggccaccctgaccaagaaggccagctctcaaggggctgctctcttcttgggaaagccataaaaacaaaggccaggcaaccaagtgtcctttctaagaaggcattgccaaacctctctcccagaattactcccagggcagaagtcaatctcctaaaatagtacggggccagtggcgtttgaaagtttgaggccactgccaaaagaagagataaaggcagagagacctaaagattccctactaattagcaacttggaataattagggcagggattctgaaaggtaacagtcttctcygtctgaatattgtgagcccactaaaggggaartattatttaatttaaaaacaagagggttagagggagtcacattcaatggataagaataaaaactygctttagtagaatttagcattagattgctgaagattgataacataaggcatttaataaccttacagaaatggtatcaaatgttctagattttttaaaattggagttaatgccctctctttattggatgaactctgctttttgtcttttcttccgtagtgggctaaaacaatcagaagcagaatcctgctatatcaacatagcgcggaccctcgacttctatggagtagaactgcacagtggtagggtatgtattcttgttaygtcttggctcaaacattatgtttttattttaatctctgagmgtttgaaaaattctttgatgaaactatttctttttcattataacaggactttttaaaagatatttggaaggtttattaagtaatgctgaattttttgttggtcatttgtccaattgcttttttttaatgtttgcttttgtacttgaagacttttcccttttgaagggttaggggactagaaactagtaatttttgtaagaccattttatattatggttttaaaaggcaaaaaataggtataaattcatttttcaggtgacggtttaaggrgccaagatttctactacttaatctcaagtgttgctcaaattggagatagttactcatatatgatagtttttttaaaaagattatggtgatataattgttaaaatcaataaatatttgaaattagttgtggctactttagtaggatttactaacatctgtcatctgtcaagcaatttctatgcaccagtggattatttcctgcggtaataccatgagttccatatgttatcattaaccccattttacagatggagaaactgatactcagggacataaccgaggtcacacagcacacaagttgtagcttcagcacatgacccctcactgtctaattagcatctgacctttgatcagtggcatacgttttctacctgtgattggtccacatcatatccaaaaggaagcaaaaattaattgagcacctactatatactagcctttatccagatgctttcatatgagaccataaggtctcaccttgtgatcatagaaaccttgtgaaatcgacattctagttattcccgttttatagatgagaaaaccgaggctcatagagattgagtaaatgatcagattttaaatctatgtattttcatagtttatagaaacactttcatttatttttgtttcacttcggtcccttgacagtcctgtgaggtaggcaagttgtgatataggaaataaggaaggaaaatggtgttagatcttacaaaatatcagctttgggacttgaccattcatttttattccatttgcaaataatattttatcttagatagaatgtttcagagaactttaattgtcggtgaagtagggctttatatctgcctgagttgagctgtgctgtcccaccccaagaactgtcagtgaaatgaccctcaagggctgtgaggccagatgatatctgcgtggcaaagacccccacagtatcagagggggttggtcatactaggctgttctacgtgaactaaaaacccctaaatctccatagcttcatatcataaggtttatctttcagtaattcaaagcttgcattgagtctaggagtcttccagggcagccctccaccccatccatcgcaataactcagcagtcgaggctgcttccatgtcatggccatctttccatgtgacctccatgtttgtcacaagggaacaggaagctgcagggttacacaccagctcttaaatgcttcagcccaaaagagacatacattcctcctgctcagagcacagtggccagaactagtcaccgagttctgccctctgcaaggggagctgggaaatgtggggttgggcctgggaattgaatagacagtaacttcctatgctgcaggggttgaggtgcatactgaaagaccacaggattaggagatttgagacctggtctttggcccacccaaaccattcatttgtttccttgttcactcaattttgatttcctttgctaatttgctctgtcacacctgcttcatactccctctgttgtgatctcaagtatcatatttaaatgcaattctacccttcatcaagcaaatttggttttgttataagcatgtgatttctgttgggtactgatagtgaatactgcctggactttccacagtatcagcactgttttgtttgtcccgtttctctaactccatgttcacattgtggttcacaaagggtttgtcccacggcaaaggggaatggacgtttcttatgtcttccacgtgccaaactctcttctagaagctccatatgccaagcccccttctaggttttcatctctcatttcagccagataaaaacgcttcgaggtgggttctgtcatctttattgtacaagaagaaaaattgagcctcaggagcccaacattatatagctagtaggtgccagactgaaggttcacactcagttgtgactgactcaaaccatgccccctctttataattactagtatctgggtcaagcatagtggctcacgcctttaaccccagcactttgggaggccgaggcaggaggatcccttaagcccaggagttcaagaccagcctaggcaacatagtgtgaccccatctctacaaaaatatgaaaaattagctgggcgtggtggcacatgcctgtagtcccagctacttgggaactgaggctgtaggatcacttgagcccaggaggttgaggctgcagtgagccacgtgtgcaccactgcactccagcctaggcaacatagtgtgaccccatctctacaaaaatatgaaaaattagctgggcgtggtggcacatgcctgtagtcccagctacttgggaactgaggctgtaggatcacttgagcccaggaggttgaggctgcagtgagccacgtgtgcaccactgcactccagcctgggcatcaaagcaagaccctgtctctcagagaaaaaccaaacacacaaaaaccaagtatctgattgggaaaacaagaaggtaaatgactcaagaggaggaactattttatttttaaattttatttgtactcaccttgttctcaaacttgtagcggctgtgtcttctgtatcctcactgtccacagcaatgcccagcacttaggcatgcataaatgttggatacactggatttagaagcaacgctttttttttttttttttttttttttttaaacagagtctccctctgctgcctaggctggagcatggtggcacaatcacggctcactgcagcctcaaacagcctcaacttcccaggcttaagcagtcctcccacctcagcctcctgagtggctgggactacaggcgtatgctaccacacccacctaattttttgtattgttttgtagagacagagtttcgccatgttgcccaggttggcctcaaactcctgggctcaagggatccaccctccttggcctcgtaaagtgctgggattataggcgtgagccacctcacccagccaacatttatttcttaagtagatttagagtcagcagttctacatgtatacattttcatcatcatttcaaaatagctaaagcctttacagtaatggaaattgagatttgcaaaaagctttgcaaaggggtgaggcctttctgatttagtgctgattgttgaaaatttaaagcttgagtgttcatgtaaatgattccgtggaatgagtgggcttatttggtaactttctagaccagtggcacccacatgttgcttgacaggctgtgttcactttagaagaatttggtactcagtacttcgatcttaagtatccgttaagtggggctttttgcctgttttcagtagcattttcccatttggagcctatacatatgactatttataacagcgtgggtgctttaaagtcaccagagggcataagcatgactgtaacatgctgtggatctgagatcttcctttttacaggatctgcacaatttagacctaatgattggaattgcttccgcgggtgttgctgtgtaccgaaaatacatttgcacaagtttctatccttggtaagtgcaaacagttctcattattttctgaatcatgctttaaaaatatgcctaacaaaagtaatgttacctcccattctaaatgtttatttctaaagaaaagatagagagtgcctcccgagttttactctgacctctaaatttggtccagatttggtacttaggaaaatttgagtttagttttcattagcattcccttcccccaactcaccctgtggtttgggatactctggaaacctggtggataaaatggcacaggcaggccttggcattaaggaatttttcctgggcagtacattggtcagaattcagagaagagctttctctgggcaggaaccatcgtttcatttctgttcctcggttattaactgaacctttaccaagtgtccagctctgttctaaactctaaagggacccaaagacgtgtacaactgagtgcttgccctctgagctcacaggcctggtgggaagagacctgtaggccagcctgtcccgcattactcgtgagtggaactgaattttggagagaagtttgagtttaatgtgccaggcaacagggagctttcttaggggaaacaccaccaaaataataccatctacataatggtaacgtgatggtgcaaggaatgggggtagcacgcattgccaggaaggtacaggagagtgagtgccatagacggcaggagatgcagatggaaaaggacaaacggggaaaaaacacggagttttggcaaaacagtggcagcaaggaaggaagttagggaatggggataagagaagatttggtgccaggtatgtgccacacagagtttgacctttgacatctaaatctgctccccaacttgggagcatagaatttcattacctgaaacacaaagatgttcatcacagcattatttataacaggaaaaaacctgcaagtaacttaagtaaaactatggagtattatataataatatatataatattaatgagttagtaatataatactctattgttatataatataccctatattatataatagaataatatatattacacataaatatataattatatataacaaaattatcgttattaatagcagtaattcttattgcatgcttactgtgtccaagtcctattactgtgtattttctttgatttatctcctttaaactccaaataggcactatataggttattatccccagtttcacggaggaggaaacagaggtacaaagaagttaagtaagaacctgtccagagtgacacagctaataatcagagtagttgaaactcacatcagagtctagctccagagcctggacttttgtttcaacactaaaagtggtatttgtaggaaaacgcttaagtagcatacatacttaatagacgctgttcagttaagtttcaatatatctattttccaaaaccaaaaaatgtgacgacagccctgttcaatttgacactgaaatcagtgtaacagatagcaggatcttctctccatctttcattcacctcatctcttttagaagcccctcagaggaagcaagaaactccagcctgcttggtgggctggggcgtgcccaggcagctctctggcccactcaggactaagatcaggctaagcagagggcacaatgggcatacggctcatttttctgcacccagcccctccagatgccgggggcttcctccaggtgccacaggcctaaagccccttgggtccagcctaactgtgaccaaacctcctaagggcccacagacaagggctggaccctcacattgtggagaagatgtgggtcccacaaggtcactgcaggagagagaagtgggagacttggtcaggagaagcaggtttgtgaacagaagcctttttggcagagcctgcagggactctccaacccccaggctcacccacagtcctgctgaagcctccctcacccttcaacatcaagatggctcctgtcgaggcctggcccctgcctccagtgtaaacctcagagaccagcggggagaccagcaccagatggtgaccccagggtgacaagggaggtgcatgggcaagtgcccaggaggggcaggacataagaagggccctaagcatgcagggtaaggcactcaccaggatctgaacaccagctgagctttggcccaaggaaaattctagagaagtggcagggtgtataggtccagagacaagagagaacccagctagtgagtcaggaggagtgggacaggccaggctggagctggccatgggcatgaggagcagcaggagaggggccaggtcatggagggcttcacgggccataggagcctataggctcagttcttagtgctcttrtgagactctaggcattcctgcatgcagtgctcacagttacagtgatttacttccatgcatcattctttatgtggttcctgtctccctcactggattataagcctctggatggcagtggctccatgtcctcttccctctgtccccagggcctggcatagaactttgtacatcctaggctctcagtgcattttttttttcttataaatgagtgaagggcagtagggagccccgctgaggccccaagcctggaaacgacaagagttcatgtctgtgcataatcagatttgacagctcagggagagagctgtcaggtggggaaattggggtcagcctgggaaggcgatgctgagctggagccctaggaaccacaggaggcctgccaggccctcctacccctgtatwtgaagccaggggtrgggggagtaagaggtccacagatacccatgggccaaacaaggcaaggtaagaactcaaaaggggagttgattctcctgactcsttctgcagaacaggaatttttgcatctgccagttggcacaggagaatcgtgaggagactcccccgacttcagggagatggcagagcagtaacacacactaggaagagtatctccagaaggggtgagcccagacactcttctcatccttagactattaacctgtagtcaccccaaaaaatttacktcacagttacatctaccaacagatcgttgaaaatagatgtgtattaggtaatatctaatatgtaatagaggtatattgctgatccatctgggggatgtcccatgaatagttcaagtttcgttttacctacacagcctctccattctagaatgttctaccaaggtctttgtatgatcctagagaatagtaaaattccttcatttccccaaagtatttcagaagtaaagattccagcagagaaatatgcaccctttgtatggattacagaagttttgcataaatgaatgatagtcagcccttggtgtacttgggggattggttccaagaccacttgtagttaccgaaatctacacagacttgtcacacagttggctccgcaaaactcgtgtatttgaaaagccagccctttgtatatgtgggtttcgcatcctgcaaatactgttttccatccatgtttggttaaaaagaatcccccagatagtggaccccacatagttcaaacctttgttaatcaagggtcaactgtaaatttattttaaaagttatgtttttaattaaaggaacaagcattgcaggcctactgtgtgacaaggtagggacttgacattcctactctgcttgaatcctcacaaggccgctctctgagaagggcagtgttttcaccactgttgggaagacttcatagtggagagcttaggagcacaggcttcagagtcagctgagaccggggtgcaggtcctggctccaggaatttctagttgaatgatcttgagcactttggtgatgtctctgagcctcagtttcctcatctgaaaactgggtataacaatatgtacttttcaggattgttgcagggcttcgttgaggggatgtttataaagctcttagtagcagcctagtatctaaaaaatgttcagttaatggtgactaaattctgttatcttgcaaatgttaagtaggctacttgacacgtggctgttaagtaatggagctggggttcggaccaggtctgtcctctttcagctgctccatgctgctctcagctgtcttccccatgtatataccagctcacgcagagctgcagtgccacaaaagcagcttatagcaaagagagcgcatggcctatgtttcttgttatttaaaagctacatcataatccagtggcccttacgcagtgctcagcttcagtcagctacttggtattagcctgcggcagtggggctgccatcatttctacagagaagtaaactctaggcagccaagagcccccactcatcaggatcatggagtaaaggacatgcattgagaggcatcagcttcaacctggccgatccctgatgtgctttgtttgtgttttgttttattttttgaagggtgaacattctcaaaatttctttcaaaaggaaaaagttcttcatacatcagcgacagaaacaggtgagtagttatgtctytgcttgctttgtttcgtgcatatgtatgtgtgtggttagagacagggtctcgctatgttgcccaaactgagctcaggggatcctcctgcctcagcctcccaagtagctgggactagaaacatgcaccactttgccccatttcttgtgtttttaagttacttcagcttttagttctttaagggttgaaggctgtttgctatgtatgtatcagggaagaaagagcatgccattgtggagccagagtctggaggatccagtgattgtctgtataattctgcttagctggttggaggattaacttgctttggagtcagagacagtggtttcagatcctggctcttccacttaccagctagccaggttacttaacgttccctagcccaagttaccttgtttccagaaattctataatgcccacttcttagggaattgtgaagattaaataaaagaggattggtcaaagcacttggcagagagcccaccacaaagtaacagtgaatgtcagcaaggtcagttccctcccatgatgtgttgaaactgcacgatggcttggtaggtgtatatatctcataagcaaagtccatagcactgtgataactccatttgctcatccatacagagatgtagaacttagaggagaggaaactgaggctcccacagctagtgagtcaggggagctggaattttaaccagatcattacgaatccgagacacctgctctttccacagcactacacccttatctttttatgctgcatgattttcacttactgtcactgtgtcaatttcccaatttttcaaaggtaatatatgcttaaaatggcctcacagagccgtgaactcttaggaatgaggacacaaaagctcagagcagctaggactggaatctggatctcctgacccctcagtgcaagattcagggtggcacaaaaatgtataagacggcaatttaacatgaaaacagaaaacctaaactcatgcagaatgcaggcaaagcaaatgattaaaatgattattacatatgagcactggattcaactctgtgctttgtggaaagcaaatagagaaaaacccaaagggttataaacttgctgttgtctgatagatgaaagagtattccttcaggagagagatgttcccagagttaaaatttaaaaggagtgtatcagacggtttttatctgattgctccaaatgtatccagcctagaaatgtaaatagatttgaaataaaagcattcatgaagaagcgcagatgatgataaagaatagattctggtcatctctattaccatgttcataaagacggttaacaaatcgtgctcttgaatattccggtacactggtttgtggccacggcattttgaaaccagttttctgctgtctgttgcatcttacctcatttcaccaatgtgggttaaatgcttacaagtccctgctcctatgtctgtgtgggtgaaatcttgactgtttttcctcccaggctgaatccagggaacatattgtggccttcaacatgctgaattaccgatcttgcaaaaacttgtggaaatcctgtgttgagcaccatacgttctttcaggcaaagaagctactacctcaggaaaagartgttctgtctcagtactggactatgggctctcggaacaccaaaaagtgagtgtgctgtaaagactgtgtccacactaggctgagatgtaaatgcatcctggtcatcagtgaatagaggacattgttaggcagaggaggaaacccatagcccaggggctccaggcattggatctctgaaccataactaaaagtctcccggggtcagcagtgtctaagggatatctcatgttcccagcatttctctcccctcaactctgctgaactcagcacttccaagcagtcagaatggcagctgtaccctgcaccatgacataataaaggaaatggagccatggttctgtgtgtctcctggtgccagcatactgggctatcccagtctgatgccactatgccagcctctcccacagaactttaattccataagatgctctataaaaatgaatgaaggaatagaaaaacatttccagagtcaagtgactttgggatatattgcctataataattacaaaataacagtagtaatcacagttgataattactgagcatttactttgtgctgggcacataattatatttgactcttacaactctcctatgagataggtactattagccacaggaatgatattcaaaatatttaatgactagtacaggaaaagaaatggatgtaaatttatatatatttatgtataaatatatataatatataaatttttaaattctaatttagattaaaatttattctctaaataaaatgatgtacrgtaaaagaaatggatgtacattgatatatataattcrtatatacattttaaaattctaattaagataaatttattctctaaatgaaataaccatgcagtttgtatttttgttttctttgttctaagactaccctctaagtataagaggtagcataaattgtcaatttattcttataatttcttttttctttctttcttttcttttttttttttttttgagatggagtcttactctgtcacccagcctggagtgtagtggtgccatcttggctcactgcaacctccgcctcccaggttcaatcgattctcttgcctcagcctcccgagtagctaggattacaggagcacaccaccacgcctggctaatttttgtatttttagtagagacagggtttcaccatggttggccagcctggtctcgaattcctgacctcaggtgatccacccaccttggcctcccaaagttctgggattacaggcatgagccaccgtgcccagcctattctctcttttttgttttgttttgttttgagacgaagtctcactctgtcgcccaggctagagtgatctcggctcactgcaacctctgtctcctgggttcaagtaattctcctacctcagcctcccaagtagctgggattacaggtgcccaccaccacgcccagctgatttttgcatttttagtagagacagggtttcaccacattgggcaggctgctctcgaactcctgacctcaggtgatctgcctgcctcggcctcccaaagtgttggggttacaggcatgagccaccgtgccaggccatattttctaaatcatttgttggtttttcaaaattgttttcgtgatttgttgttgatgtggctattactaactaaatgagacccgtgtctgagccattatctttctgataggtggaactgcatcagactgttccagttactttcctaatacattgataatcattagggaacttgtaaactgaataagtagctaatttctgttagtatcagtgatactatttgyggtgctaaatgctatctctcagcttctgatgaaccaagagtgaatatattaagtttttagctcttataatactgtttagtatttgtatacattcagtagatctactgttgagcaagccatgaaaataacttactggattatatcattgacttaggttgggcctgatcctcaggccagatgagagaaggaatggggaggcaactgaaaccatgccctctgttgctgagctgcctgggttcaaatcctgcctctgtcacttgagctttaatttgttgcttctatttcttcatctgcaaagctttgtcatctgcatgcatccaatgccagcagggctgggttctggtcttgtattgtggcacaagaaaatacccctattttggtgactgaaagcaacacccattctgttatatctcatgactttgtgagtcaggaatcctagaagggcttggccagaggcctcttctgctctgtgtggtgtagatagggatttctcagtgaatgtggccagaggatccaagataacttctcttgcatacctggtgtcttgatggaatggttggaaggctggactcacctggactccttagcatccccatctggatactccaggagggtggttgaatttcttacatggacactcagggttccaggagcgaaaggcagaaccgttcagccttcttaagggtgagacctggcactggcacagcgactctgttgctgaaagcagtcacaagccaacccagatgcaagactcaaagaacttgcagtcatctttaatctgccacaggggatcatttgggttgggaggatggcttgggaggacaagtcagcagttcttttactacctgtgccagcttcagcatactggtgaatttcaagtctcattacctccattttacagatgaggacactgaggcttagaagggtcacatgacttgcccagcccctagagatacagatacacatctgcttattgggccttctgaaaggttccacataaaaagaaatttgttgggttattttccaagcttatgggacaatggaacacttttttttcagagagtccctattaataacccatgacacattaaaccttggagttgggcagtttgctccccttgttttgatcctgtgctcttcatcactggcagtgwggtttctgatgtaggcctgcctcagaggaaagagtctcccagtgatgctgttgtgagcattttgatcagggtgacaacagcatttcttaatgtgaattagtacatgatgtgctacagggcgattcatattgtttatgttcttttgtttgttctttgttctgttttgtttttgttggttggttgatgtcatgtcacaaggaaatgtgtagaatgttttcataagacattaaatcctagtttaaaatttagagatgccagaaccaaagttgtcaccctttaacagggtgacaggcttcatgctctattctctcaaataattcattctctgaggggtctagatagctaagatttaaattctctaggtataaataaaattcaaaagtaaccttcagggtagcacatttcaaagaacgtagcctgaaactctgtataattttttgtttttggagacagagtcttactgtgttccccagactggagtgcagtggtgcgatcttggctcgctgcaacctctgtctcggggattcagggggttctcatgcctcagcctcccaagtagctggaattataggcatgcgccactatacctggctaattttttgtatttttagtagaggtagggttttgccatgttggccaggctggtcttgaactcctgacctcaagtgatccacccgcctcagcctcccaaaatgctgggattgcaggcatgagccactgtgcccagtttgaaactactttctaagcgcattttcagattctctctcaaagatttaccagtgatttatagtgacagctcctgccagctaggatgatgaagagcacctgaaaaaatggttaatatttttacttaggccagtgtgaataaaataagaattccttgaaatcactggagctgtatttctgtgtgatcctggaattccttctaatctggttaggtttggttatattctggaaacagctttgttgcttgagtagtgaggacaagaaaggattttcacccgaagagaagaaatcacataaggaaattccaggacagacaggaatcgcttttgagctgtctccctctactccccataaccttggcattaacctgccgtccttcagacaagaagcatgtgtagactgtttcacacatgcagtaatttctttcctgttgaacgtcagtgtagaaagtgaacctgcatctggtttttcaggtcggtaaataaccaatattgcaaaaaggtgattggcgggatggtgtggaacccagccatgcggagatccttatcagtggagcacttagaaaccaagagtctgccttctcgttcccctcccattactcccaactggtatgtcctccttttttttttttttgtactacccaacagtagacactttatctcttttaaaaataaaaactcaacttataaactcctaaagatagatgacctacaatttgcattttaggctcttggcagaagtaactgttttcatgaagtacacaagtctagctaaatgttttccatcgtgtataatgctgagatgctctttttaaaaaaacttattcaatctaaatagtttgggaaactcgagcctgctgaaaggcctcctttggaatcacagcacacattagcatattaaacactctgagacgtccaataataaaaaagtacggttagctttacttaattcatgttttccattaatatcccacaaaataaactttagggaaaactaacgcaggtacgtgatgtaaatgatgtaaggatgtatgaccttcagcagcagaagcaaatgcacatcagtaagtagcaggccaacttaagaggatggactcagcttaaaaagaaataggtggtcgtttggtaaagtgagaagggcactgggtttgtagcagaaagacctaaactcaggttttggcccttctgttaattaacaagtttctttacctctgtagcctcagtttccccatatctaaaaagatgataaaaactaccgcaaatgaaataataatgtacaagtacgtagtaagcttttaaaagagtcaggtggaattatcattatcttattataatggtcctcaaagacatcacaccatttttgtgaatacctccaaaaaggctaggggccagaggggaaacctagcagggaatcattgcccccagctccacactggagtaagagtgcgtggctgtaaatacctgatccaggatctgctaagcctaagagaaactgggagacaggcagacagaggagatgctgtgctgggcctgctagggaaggaccccttcactgggggcctaatgctctgggaagggacagtgatagtatttagtgttagaaatcatgacgtaactgaatagatttgcttcttggtttccaacatttagatacctcattctaaagaggtaaatttatgctataacacagcagcttaatttatctgaaaatctcatcggcagcaatgccaggggcccagagagcccaggactggatccaggggaacagcggggttggatgttgccacrctcgtggcccggagctcctgtggctatttataggtcctctcctgaggagtcacaagagcctttttacttctgctttggacacagcattattgattatccaggcccagggggattgcaaatcatggaggccctgacagtcctgaggagaaatggctaacaaagaaagggaagatggaaaaactgtgagggaaaatagaacttagaaagcttggcagcttgggatcccccgctgcaggagctgacgcccaggtgccacactggatgccctgagaacacggcctcattggattcattctcaggagcaggtaagtacagccgaggcccagagaggtgacgtgccttgcccaaggtcacatgcctactgccactgttggaggacagtccagtgtttatatgcccatctaatgcatataaacgtgtttaataagggatatatcttaaaaagcaaacattttctcttggatcaagtgaaattcacatgaagggatgtcgttgaaataaggttggagttttgctgagaaatgtagtttggcttctaacccttttgtttgcattgttcaaattaatcagaaaaattatctgaatagcagtccatatggcctatttatgttttgagagcttgagtcctcctggaagaataacttacccttaagtcaatacccgtcacttcccaaagggcataaacccatctaattctgcctgtttatacagctgaggctactgttttgggagccaccacttgactgagagtgttagggatttgtgtcacccttggtgccttctgctggggtagtaatgagttaaccggctctgaatgtcagcctccgccaaggaaggcatccttagaaaggtcaggacacgaggttcactggtgtctaataaaatttttaagtggaatttgctttgaacactttgcactcaacgtttttcccacccaggcgaagtcctcggctccggcacgaaatccgaaagccacgccactcttctgcagataaccttgcaaatgaaatgacctacatcacggaaacggaagatgtattttacacgtacaagggctctctggcccctcaagacagcgattctgaagtttctcagaaccgaagcccgcaccaagagtaagaaactcgtgttgttttatttctgggtatttgctttttggctgttgcggartttgctcaggtccaggttgccatttgagaggaaccaagagctggtgcctgcagccagctcccacaggtgccttctgccaggataagaacataaatcagactctaccttttcacccggaagacggtctatgtgcctggggtctagagcttgtacttctttttgtccacgacaaagacttcctagtcactaagtacttgttagtctcttgaattagtctcctctccagctcacaagcaaagcccagtttaatcattccctgttctggaggtacagactctagggccatgctaactctgatttctctagattattaaagttttaccatcacatgatttcaratcattggaaatatgcttgcttctaaaagccttctccgaacaacagggttctgaggggttttgttttcaattaatagttagtataaagaaacaaacgttagaacatctctaattttctttgagaaattttttgttaaatttttatgtcctacctcccccaccccgcttttttaacgtgacagagttccctcatagctcaaggacagaaaaaatgtctgtcctgaaagatggttgagtgcttttgttattcaataggatatatttaacccatttgtttccctttttgccttggttaccagggagttcagaactgcacattaggctcaattgtattcacttccctcagcccagatttcttgtataggaccttctcttcctcatttgcctttgttatatgggtcttttttttcttattttratggattcatagttacatatctgtaygttttggggtaaactcgcaaatcatttttttaagtaggtaagacatagattataaattaggttaaagcatgatagtaaaggatcaactgttaggaaatcaaccatagtcattgggtatctattctgttaagccccatactatttctaaaatatagtaagataatggcccccctaacagctgaggattagcaagcaggcacgttagttaatctgtaaattttttaccactgtagctattaggctgaaagcatcaaatgcaccctgattggactccaggcatttgcaggtgaattgcaaatctccttcccatttgtatgtgaggctgctacctctcctctgtccttgcccacagcaaacatggtttccagtttatctgtgttcttaacacctctggttaaataatccctgtggtcattctttccttgtgacctgagcttggatgatgcttttgctaaatgattgctatctcttgttccaacttgcagcctgctgcccctttgtcagggctacagtggatgattgtgagttcctttgtgtgactttgtagcttttcaaaccacaagcacatctagaaatacaaagcaggagtgcaggcatgcgtgactagagccgttttgagtctgcagtgggggctctgcggctttggcaaaaggagaaaacggtttagggaagcgttggagggctctgggaagcccactcacacctgctgcgtcagagcttcctgtggtggtttgcagtcccatcacagaattgtacagcatctaaaccttccctgtccagtacagcagccaccagccccagttgtctattcagatttaaattaattaaaataataaaaatgtaggcattcagttcctcagtcacatgagcctcatttgaattgcttgacagccacacaggagtgttggcctccatcttggacagcacagatacagcccattcccatcactgcagaaagtgttgtcagcagcactcatctagactaacacgtttattccatcgttcatttaaagggtgaacccctagaatatctacaagcgaaaagtgcatttttcacacagaattcatgtgggagtaggtttggaatcatcaccttgcttgcagtctgggcgctccacaccactcacccagctgctcatctgtggcatggggcaggtggatagcctctgagtgccctcacagcccagcaccctctgtctctttatgcaatcagtgccaggtggggagggatgcattctgtccaatgacatgcaggcactttagagggcttgcattcattcccaagtccagcggcacactttatacatccttggctggtcattgaggggaacaccggagcaaatcagagaagttgtttcaggagcctccaggccagctgggcaaatagcacattatcagcctacgctgccacactccagggctctgtcactttggtgaaaggaaaaggggggcttagggaacagtacgtgccctacatcagattttcctcctgtggtctgcagtcccatcacagagcatctagaccttcatagtccaatacagcagccaccagctccataggactatttacattccagttcattaaaattaaataagatttaaaattcactccttcaagcactgtttgatgtaagtgatttctggccctgcttgttcctatacattgcacaatgagtcttcttgaaacccctccttgagaccttgtaaagtgtgtcatcttggggctctttttatcttgcagctaaatgttaagaatagcaaataacagtggttcaaaggcaggcttccttgtggggttttaccaggtgcactgacaatagacatgtcagggggtcaagttagtgactgtgctctgcaagtgggatgaacagccagaaaagcagcccccaccacctctgttaggtgggagacctcttcctgccggtgggaagccactttgtgctgggtcttcagaggaggctggccctcctgagggtctgggaacccccattgctccaggtaagaagtacagactggtctgtacctggtgagagaaaaaaagaaaaaaaaaaaaacctgttggttagtttctgtgagtatttgcaaaatgtttacaaaatatttgacatgttttatacagcagatttgtgttaagaggcaaaaagaagcattctgtcagagaaatcggatgaataatatcacagacagtgaggagggttccttttaagaagaagaattaagtgcgatgttctgtactcgtttaaaaaagaagaaagagagaaagaaaaagagcggttagatttggctgtaaacccagagtggcgcagctcaggctgcctgagtgccatcttagcggatgagtcacttgctggtttgttccgtatttatagcagcacagcaaagtttatgattatagttatgaatccttggcagtttgctttgtgcccaagtaggctgcactcttttgttgctcccaaggttctatcagccattgtgtgttcctttccctgcttccgaatgaagaccaaattctgcagagaagtaagtttctttcatggcagaaatgaaaaagctaccactctccacccagataaaagggagagaatgttccctaaagaaagagacatgcagaacagaaactgggggaaacacattgtagagcagtttagagttgtattagaaaaactttctggttgctattttatcacagttgtcttgatgggtcaccagcatgacaccctccgagtggatggggcttcatgcctgcataacttcttcgctgtttgcctctttccttagagcctgccttcttccatgggatttggggcagccattgttttttatttcaaaaattctgtgctggccagccatagtggctcatacctataatcccagtactttgggaggccatgctggtcagattgcttgatcccaggagttcaaaaccagcctgggcaacatggcaaaaccccatttctacaaaaaaatgcaaaaattaggcgggcacgatgttgtctgcgtgttgtcctggctgctcgggaggttgagatgagagaatcacttgagcccaggaggtcgaggctgcagtgagctgtggtcgcacccctgcactccaggctgggcattggagtgagaccctgtcaaaaaaaaaaaaaagaaacaaaaaaacaaaaaacaaaaaacttctgttcattggaaggaacctgggggatccccttcttcagctttggcggcagtgtaggaattcccccagccctgagagccctgcgagcaatggagagtcccctacagtgcagctgtgtgctctgtcgttagacagcccaggtgcccactgttcttcccaagctgtgctggaagcctccttgacgctgacccagcatcaaggttcctgccttgaactctcaggacaacacagatggtgtctgttcccagttccacctgccagccttggttactgttccttaagatagacaattccaatgtagtcactttccacccatcaccctcgtaaccaccattctccaagtgcaaatgagccttctagagggtggcactagatctgaatgtggaggaaggatctgcataccattctacatgtccccctcggaggacaccaggcagggacagggttttgttcagagtgtttgtgtcccttttccttgaaccttgccttcttgtttgagtccacttgcgtgtagatgtctctcagatacctgaaacccaatatgatccaatctcagctcctcatgttggtgtccagcccatggctgttcctgtgtcttggtaaggggggccattgtttcagtacttcccagtttgcacctatttgaaacatcagtcgtccctcactcctccttttctttcactgtccctatgccatttctcatcgtgttgattctacctcccagacatctcttacatttgactcctccrccatccccactgcactgcccccatgcagccaccatcgtctcttgcacagtctagctcagtcatatccaaatcgttcccctgtctttggtgtcacctccttccacaccatgcttcacaagaatagcaaatttatcattctgaaatacacatccaagaatgtcacttcctgcttaaataccttttctctgctttttcagcatttcctgcctttacctgtgctactgcttttgtttgtgtgtttgttattatcagtgttttgccagaatgccttttttcccacttgactacctgttcaaactcctattaattcatctttcaaactcaagctcaagtgcacctgctccaggaagcctctcctggccttacacagtaccctagacatctgagcatctccactgtaacatgataatattattacttggttaattgtatttcttctcctttggacartgaattctttgagggcagggatagtgccctattcacctctccttccttaaaacctgacatggttatttggcatttaatagacattcagtgrctatttggatggatggatggatggatggatggatggatggatggatggatggatggttggatggacggacggatggacggatggacggacggacggacggacagacggacaaatggttagatgaaactagatggggccccgagatacaaactcctaagttttcacaatgggatgccccctctgccacttccacatcatgtgtccatatcacatgagcaacatcacaccatatttatctgtaccccaagaactcaaacatatttactttgacaagtttggtaactgtcacctgtgagcaggactatgtggtaggtgcccctgcagggcatctgtcaatgagaaattctcctcagagaattcagggatgaattgaccgaggtttagcaagtgctttcttgccagtgaggtgtctgatatctataggggaagcctagacagattcatgatctgttgttccagcaggaaagactgtgagctcataaagcaccatacctgaaccatatcccctctgccactttgatcttgtgcccttggcatttattacagccccagatgagctgtttcctgtggtgactgtctccacatcataaaaatgtgtattggaagacagtcttctttctgttactcaaggacccttatgtgaggagccatgtgggaaatttctccaggaattttattcagaagaaactgtgccctctgggtgaactggtatgagttcctctagcgccgtgctattccagctgtggccacaggccagcagctgcagcacctgagagctggtcggaatgcagaatctcagacccacacaggcctgccgaatcatactctgcattcagcaggaccccagctggttcctgtgcacagcacattctcagaagctctgatcttgcagatgagaaccatttaactcgccttcactttgcacctgagcttccagattcctgagtaaattccttgctcttttagagtaactcacccaatcacctcgggtgatcctcttggtaccttgccaagaggctttattcttcattcactcagcatttcagttgagtactccctgtgtgcctggtcctgtgttccgagtactaggagaggaacagaaagagcactagggtctcctgaccttgagaagctcccaaaacagggcccctgttccatcacaccacaatttgagagcaggactttgcctcctttcacaggcggcggggcggggaggtctttaattttctagggtttagggagagcttcgtgcgggagtgtctctttcwtgggagtgtttctttctgatgcctgctgcctttacagttcagaagcatgtgttttctggagggtgaatacttgtttgtctgcctgatggtcagtctgtgtctcacatttctctgtctctgcccctttctccctaagaaccaggatgtggtcagtcccacactggctcttccatggtgtcttccccgtcctgcctcagggacaaacctcttctgctccttcctcccccttgtcattggctccatcccatcctcaccatcttcttgcatccctcatcctgcccctttcttcactccacttgtggaattcatggggcaactcccctgcgctcctcagccgcactgcattctgcccagcgacagaggaggcactagggctttggtgccttcacccctggccaccctgtgctgtggccagctgccacttactcattgcatctcctcatttgatgtcctcttcctcgtctgtctgtccatcttgcacactgaacagaatatcaccgcgccctacagagcacctgtgtacacagttgagcaggccaaaaatcagccatttgttgaaataaatgactaagagtaacccctccaaccctgcttagaaaataggttagggcaggccgggcacggtggctcatgcctgtaatcccagcactttgggaggccgaggcgggcagatcacaaggtcaagagatcgagaccatcctgactaacatggtgaaaccccatctctactaaaaatacaaaaaaaaaaaaaattagccaggcattggtggcaggtgcttgtagtcccagctacatgggagactgaggcaggagaatggtgtgaacctggcaggtggagcttgagcttgcaatgagctgagactgtgccactgcactccagcctgggcgacagggcaagactctgtctcaaaaaaaaaaaaaaataggttagggcataaaatgacttggaatatagtattagtactagcagcaatagtaatagtagtagtactgttgtcatttagtaccatgggctagtttagacagaccattgagttttaaatcaaaaaagaaaaatagggctggggatggtggctcacacctgtaatcccagcgcttagggaggccagtgcaggaggattgcttgagaccatgagttctagaccagcctaggcagcatagtgagaccctgtgtctacaaaaaatttttaaaaggctgggcatggtggctcacacctgtaatcccagcactttgggaggccgaggcaggtggatcacgaggtcaagagatcgagactatcttggccaacatggtgaaaccctgtctctactaaaaatataaaaaattagccgggtgtggtggcgggcacctgtagtcccagttactcaggaggctgaggttggagaatcatttgaacccgggaggcggaggttgcagtgagccgagattgcaccactgcattccagcctagcaacagagcgagactttgactcaaaaaaaaaaaaaaattaaaattagttggacatggcgaatgcctgtggtcccagctactcaagagaccaagataggaagatctcttgagtcaggaaatcgaggctgcagtgagctgtggtcatgtaatggcactccagcctgggcaacagagctttaccctacctcaaaagaaaaaaaaatggattgggggggtgcagggagggagagagagggagacagaggtagagacagagacagagacagacagaacgagaactggaaataccattttaacttgttttgtaactgccaagcagttgccctttctgccactgggtgatgctcttgtaaacagtgaaacccagcaaagatgccgtatttggggggaattttgtaaagcttccttttacgtaagtgaaagtcatgctttttcaatctgaaaacttgtatacaacttcaattccaaaatactctgtctctgaaatgccttcccatccataacaccctacccccaaccagccacttggacaccataaggccagactcttgtcctactgtatcgctgtgtttctccattggtctgtcactgaatattttattcaaatagattgtgattatgaatcattctgtgtgactatgatacagattttatatttaaattaggctcatttaaactcactaggagaaagagaagcaccaatttcataaaaaatccatggataagggcttgaaatgaaggtcaagaaagaggcagtagcagctgtcttttgtctgggtttcactgaatgacttggtctctgcgcttctcccctcacttcactttggatgaggttagggtggggcagagtcttagaatgtaggagagycccatagtcatcagctctgtaaggtgtctgtgctgggcctgtggcwccggaaggggctggtgtgggtgatgcagagactcaagggtcctgtcctgtacagtgacagcagggatggttaatccctgtgactctgaggggttagaaataggggtcttggragtgggctctgcatggtctggagagggaagaaaggcttaggacgcacatcggtcaggtttctgtctgctaagccgggggaaagccatgtgaccctgggcaagttactcagcctctcctgacctcagcttcttcatctgtgaactgggagttagaacaaatgaccacaaagttctgttccgttttcatcatctgtaactctctaagacagcgctgtccagcaggacttcctgccgtggtgaaatgttctctgactgcactgtctcatacgggagccactggccgcatatggctagtgagcatgtgaagtatggctggtttcttgtcttaatttatttaaatttaagtagccacatataactagtggctaccatactagacagtgcagctccacgatacagaagaaactatattcgatagaggaaaatgtaacaagatctcagcgtggcagttcatggatgtcacaggcaaatcatgccaactaggaataatataaattctcctgaacgcacaacaacaacagtcctgtttcctttgaggaggcaagagtcctatgaagcagaaccatccgcagaagtgagacagaaggaaaaaagctttcagaagggatgggctgtgcatctgcatgagcttgcctggcagagcctggttcagtaatgaaaccaccagaggagctggacacatttccctgtcacccttctaaagcagcggggaagggagcaaagttttcagcagtttccagatccaccctgcctcctatcccttttccccaaaaccatgtgacagtgtctaggccagatgcggtcaggggtggtcagtgggccctgggtgtactcaaatcccgctgacaacctatgcagctgaggttccagggaaacatacagcccccagctgccaggcccctacagtcagtagtgtttgctctaataaaatattaacccagttattaatatctcctccttccccatgatgaaggagtttatccgagaacaatccrgcacaaagctacctgacccagaagtcatccagttctgtgtctccatcttcaaatgctccaggctcctgctcacctgacggcgttgatcagcagctcttagatgacttccacagggtgaccaaagggggctccaccgaggacgccagccagtactactgtgacaaggtgagcgagcgcaggcagccgggtgatccacmcacccagggcttcccggcctcttgtgggcagctgagtagctctaactaaatgaaaatatcttatcaccaactgctggagagagatgtgatgcaaatgaccactttcaaaccgttttccagaatgataatggtgacagctacttagtcttgatccgtatcacaccagatgaagatggaaaatttggatttaatcttaaggtatgttgtgtatttataaaggaagttttgtgctgggaagcaatctttcaatgagtttttaatttgcattacaaatgtgctgcattcctgagctacataaggaagttggttcaaccctcagaattgagagttgggggttttttttgtttttgtttggtttgagatatttggggttttttttgtttttttttaaaaactcactttatcgcccaaacctagagtgcagtggcacgatcgcagctcactgcagcgctgacctccccaggctcaggtgatcctcccacctcagctgggactatagggatgcaccaccatacccagctaatttttttcatattttttgtagagatggggtttcaccatgttgtccaagctggtctcaaacacctggcaatctactcactttggcctcccaaagtgccgggattacaggcgtgaaccaccgcacccagcctagaattgagaggttttttttaatgtggccttaacagctgccgaaggccaagtgcctgctctgtgcctggcattggctatccactagattcatagcaccttcttaagttctgataacaagtggtaaggtcagtatttttaaacccattttgcaaatgaatactgaggttcccagaaatgagggcacacagttggcaaacagatctacccacttcaggaatgctattaagagaacccctcagcattgctaaagctgataagagaaaaacaattcaagttcaacctgcagggccaccactctcctccaggcacctttaagcaggatctgcaaactaaacccacaggccaaatcccatctgtttctgtaactagtttttttggtaacagccacagccatttgtttactggtgggttaatgactgcagagttgagcagttgaatcagagccctcactcccacaaagcctctctggccctttacagaaaacgtttactcatccctactctaggacaaagtgagggcaggtggtcgcctaccccccagctgccatcatgcacagcctcatctgccccagcagctgtgttgaggaccagcgctcacaggccagatgcgctcacagggtgtgcccccttcccaggcctygctcgcctctgctgaaagcccctatatatatatatawaaagcccatatatatatatattaaagcccatatatatatataaagcccatatatatatatatatatatatattttttttttttttaattattataagttctagggtacatgtgcacaacgtgcaggtttgttctagcagcactcgaagacatgctgtggagtccctctctgggggcatctgcgtttttaaggaggagcttctctctgagtgtatctgttagttcatggactgtggggatggcagagggaggcttctgaacagagtcctggtcagcccgctggatccagaggggtcaggaatttgttccatatttctgaaatgacgtgtgattcgaatcagtcatagtgaagtttgaagcctccctgtaccaaagactcacatttattggtacctccatgttgttgatgctgtgagctactcgtttttttgtttgtttgtttgtttgtttaacttaaaaaactttgttttgtttttattttaaaatgtttacagggaggagtggatcaaaagatgcctcttgtggtatcaaggataaacccagagtcacctgtaagtaaatacattccatgttattcctcgtgtttgtttgtttccccctaattctaacaggtttctgtttctgagtcctgtttctttttttgccagagcaaagaatgtgcttagatatacatcaccatgttttctataaccttgcggctcagtgtggtctttgaagccatagcacccatgttacctgggacctcattagaaatgcagcatctctggcctcagcttaggcctgctgaaccggaatctgcatttttaacaagagccttgagtggttagtgtgcattcaattttgagaagtccttttcaagagaaggaaacttaggcagtctgctgttctgctcactctaagtgggcacgtgggccctgtgcctcttctcaccatctttccaccagtgccccttttgtcatctgtgtaggcctcctaagaagagcatttgctttgtttttctttcaaatttattttattgtttttaggccaggcatagtggctcacacctgtaatcccagcactttgggaggccgaggagggtgaatcacttgaggccaggagtttgagaccaacctgcctggccaacagggtgaaacccatctctacaaaaaatacaaaaattatctgggtgtggtggcacacaggtgtgatcccagctactcaggaggctgaggcaggagaattccttgaacccaggaggcagaggttgcagtgagctgagatcacgccgctgtactccagcctgagcgacagagtgagactctgtctcaaaaataaaataaatttattttattgtttttaaaataatatcaagtaattttttcgtttaatttttttattgtgcatactcaaggtgtacaacatgatgtcttgttatacatatagtactgcagtcaaacaaattaacatgttcatcactttccatagttaacctatttttcttttttaagagacagggtctcgctcttgctctgtcacccaggctggaatgcagtggtatgatcactgcagcctcaaactaggctcaagcgatcctcctgcctctgcctcccaagtcgctgagaccacaggtgtgtcccacctcacctggctccatagttaccttttaatcatctgcttttttaaagcagtaggagtcactgtgcctccttacagtgaaccacgttgggattttactctgaggtagtccttaagctcttgtcatttaacttttgttactgtttacagtttctgtaaattcagaaggctttctttcctgtgctgttcaattcattgcttctctccataatggtttttgcctctgttgtgaagcttacaaaagctttcacctttgcaagacagataaatactcacctctagctggcaaatcatttcctaacagtacatctaggaaacaaaaggctggaaatggtatagttatattataataagtgaaggttgactaccacggagaaatggcttcagcaatttttatatccttattctgaaatgtttcataacttatattctgagcagtacttctttatatcttacaaccatctaccatgtccacatagcagtggatgcattatacaaataatgacagtactacccgagggagagaaggcaaacttgatcatggtcccaggtgtctgggagcagagcgagtcagcgttcttcccccaaggactgtgttatggtaacaggagaaactcgcttttccccaccacccaggcggacacctgcattcctaagctgaacgaaggggatcaaatcgtgttaatcaatggccgggacatctcagaacacacgcatgaccaagtggtgatgttcatcaaagccagccgggagtcccactcacgggagctggccctggtgatcaggaggagaggtaatggccacctggggggaggagccatagggaagctgtcctagccaagctgcgcctgctccagccctttatctgctcttgaaaatgttgagtttgtagccaacatttgaaaatcaagaatcttcaggtaataaccgaatgtttggcttctcacttgaaaaatgtgaagatctgcccccaggaggcctgtccccatgtggccagtcttctggggggagacagcgcccctgcagcccctttatacaggacatgagcccccagctcccagttcctcccaggcccagcgcagcccacatcacgcactctctaagtggcatgactctgcagacatttgcattttcagccccttcttaaaggatctggtgatattttattcgtgcgtgtttgattttgtcggggaggcagtgaggagagcagggtctgactgtctcgggtgattcctcactctgcctctgcgggctgggggaccttgcaggggttacataaccagtctgtggttcagctggctcaggtgtggaggaggacagcagtggtcccgacttcacagggttgctgtgaagattaaatggcacttggggccaggcacagtggctcacacctgtaatcccagcactttggaaggccaaggtgggtgtatcacttgaggtcaggagttcaagaccagcttgaccaacatggtaaaacctcatctctgctaaaaatacaatagccaggcatggtgccatgtgggtatagtcccagctactcaggaggctgaggcaggagaatcgcttgaacccaggaagtggatgttgcagtgagctaagactgtgccactacactccagcctgggtgacagagygagactccatctcaatcattcaatcaatcaatggcacttagactggaaagtacctgcattgctgcctgatgggagcagaggtttgaaggacagcctctactgagcatcacactgttgtctttatagttgttgttataaaataatacgtcaagttccttgaacaccgtgcacagctgtaaaatactgaaagtaaatgaaggttgtgtctgcaaagccctgcgtctctgcctgcctcacacgtttggctgacactccatactgctgtgctcctgcctcggctctgctcccactgcaactctcagtccagagccaccaggaccagctctgaccccacctcctccgtgaggccttaccagatctctccggttccccacctgtgcaaggttgggagttgtgggggggtggtcctagctttgctttcacctgtattgaatttaacatgaagggaaaacgtgcactaaagaggtaaggctgaagcacagaagagatgctaggactacgatatttacgtgggagcctcccacatagaaacggccctgagttagggattgagctctcaggaatgatggtgtcacaggaaaagcttgggacctcaccctcatgcctgaggaaatgcccattttagggaagtaaatgaaaaaacctgagaaagaaaggggagtcgggatgggtagaagaataacccggtcagaaagagcaagcagaaacaatatgcttttttaaataacattctttctcttttctttacctttgacaaaagcctctgagtgttaaacaccattatttaaaactaaccaggaagattagtatgtcattttatgtaattaacacatattgaatcattcacctagaagtagtatctttggtgaaaatgattaccatgtagcttaatcatttaataagatgttttgaaccatctgcattcaggtgtcataggtgtgatttgtttgagggagacggataaacctgagtattgctacacaagtcagatgcactgtcttgtacgttacagctgtccgctcatttgctgacttcaagtctgaagatgaactgaaycagcttttccccgaagccattttccccatgtgtccggagggtggggacactttggagggatccatggcacagctaaagaagggcctcgaaagcgggacggtgctgatccagtttgaggtaagaccctctggaggctgaatcccactgccatgtcgcctattgggctgcccctgcctctgagcagtggaggaaatgaggcagagacacaagcccttgtttccttggtcgagatgattgtgtgtttcacaaaccaaaagcagtcaactgagtctctgaggactgacagggcgaggcctgtgcttgtcgtggataacagggcacagcaggcagcccccttctcaggctcggagcagcaagcagggatcagggtggccaccctcgctgaactctgtctcaccctcttattctagtaacatttggtagtcatggagaaacatgccagaaactgaggaggagggactctgagtgtatttaactgccaacacaaaagctcaaaactcccagcagtggaaggcagtggagaggtggctgtgggtgaaggaaccagctctctgaccacccccagccatgtgctggaatttggagcaattagtgttatcccatgagggcatagtgtctcgccctcccaagttgcccagaaccctataaacacaagtaagaaaccaaactcaaacccccatcttccccaggggaacctgtgattcataggattcaggctgttgacaaaggtacacacagacattttttataaaacaaaagggaaccaaaggaaactcagcttttaagccagttttactgatcactaacagaattaaaatagaatgtgttcatcttccaaatttattttcttatttttattttttaaatatgttgttgtcgttgtttaaaatagagacagggtctcactgtgttgcccaggccagtcatgaactcctggtcccacgccgtcctcccgcctcggtcttccaaaacgctgaaattacaggtgtgagccaccacacccagcccatctcccaaatttatttaaaagtagaagaaaacagagtaattcctgtaataaaagaaataacaccaaaaagcataaaataggtcaacaaaagaaaatagatcatcattagaaataacaacagtctgggttcataaattcaggaagagagtcacatgggactcaagaacagaaatcaacaatgcattatttattagaaaaccacataaaggaaaaagaagcaaaactcggacatttgtgaaatgtgtgtgactgcagagtaattgaggaaggcatgagtaataggaatgtttaaaatgaaggaatgcaaagcagagagctttgagtgaaagattgattttatgatgcatgtgaaaacacattaaagcaatgtgcattgaacagcagtagaaagcaaaaatccacaagccaaaaagtaaaggtgactgacttccccgccaaaacaatcaacagggaattaattaattaatatatttatttatttagagacagggcgtctgtcacccaggttggagtgcagtggtgccatcttggctcacttcagcctctacctctcaagctcaagtgatcctcccacctcagcctcctgagtagctgggactacaggcatgcaccaccactcctggctaatttgttttttattattcttttgtagagatgcagttttgccatgttgcccaggctggtctcaaactcctgggctgaagcaagccacctgcctcagccccccaaagtgctaggattacaggcatgagccactgcacccagccatttaaaatttttaattaatcatcttgacacaatataaaacaaaaattatgtacttatgcaaatgaagtctggataaaagggtagtaactataattacttgaatagaactaatagatatattactgagtattctacaaagggaaatagccctttttttcagtggcctacaggaggctgttcacacttttggttaaaaagaagaaaatgtaggctgggtgcagtggctcacacctataatcccagcacttaaggaggctgaggcgagtggatcacctgaggtcaggagttcaagaccagcctggccaacatggtgaaaccctgtctctattaaaaatacaaaaatcagccaggcggggtggcaggcacctgtaatcctagctacttgggaggctgaggcaggggaatcacttgaacccaggaggcggaggttgcggtgagacaagatcagcctaggtgacagagcaagactccatctcacaaaaaataaaaataaaaaaaaaaggaaatgtagaggttatcttctctggccttgcctttcaaaaaagttcacattttgagcagtaaaactcattcatattttcacacactccaaaatcgaaacaaggaagaacttaagagccagtcacagtgcataccggttttttggtattagagaggacaggaaaggcagtgagaagtcgtttgtttgttgatttagcgagtgtgtcttgggtatttcccctggatcaggaacctgatgagggaaggagaggggagtttctggccccaaggagtttacagtctaattttagtgtattttaggaggtacatcatgtgtcccagaaacagctgaagaccaagacagggtaagatgttattatacagaatatatgttctgcagcaactggaggtgaggggactccaggagatccctggagtgagatgtgtgggattaataaaggggtgattaggattaagtgtgtggggggagcatattccaggaaaatctcagcccaaatgcagacaaagctcatggggtatcacgtagcataaagagacaggcctacctgggtggacagcgcagtgcagatcctgggcaatgcctctaggtgaccaccgtccttcagccctgcgagaactggttccagtttatcagatagtccacaaggaggcgctgtgggctctcactgaggaaaagccaaaggctggtgttttcggtgttcatgaaacctccttcacgcaggtggctccaatttgaggtgtgttttacatatgggaatcccacaggtgatttcccttgaaaagtgttcaactttttaaaaagttttcaaagacattagagataaatacccaccctgtcccctacctgtgtttctcagagggtgaccctccgaccacttgtatggagatcacctggggagtttattaaatcaaggccccgcccacagctactggattggcagcaccaggatgggacctagatactgatacttttaacaagatcagcacctgttttgatgcacacgctgttccagaggagaggaggtgaagacccaaccggaaccactgctgtgcatccgaggctttgtctttggagggtatggtgggatgatagcataagaaaaggagaacgtatacattttagggttgcgttttagcatgtacacgtttccttcatttttgtctatacagttcctcaagtaggatatttaagtaggaaacccttctttttaataaaatcatttgcagaattccaaaatacagaacagatgaaagcaggtctgctctgtgacctgtgatgganycagtagggtcctcaaagcccagcctcttcagtcttccttcactggcccccagggagccctaggctaaacagaccatcatgtgaaaaccactgttacaggtgcgagaatggtgttttacagagcagccagaggagaggcatagaaaaggaaaccagataaaatgagaaactagtaggaaaggaaagctttcatgagcacttactatgtgccacaggctttaaaggatatcaccttaggtaattctcacaagagccctatatagatgctgtcattatcccagttgtaggcatgagggaacacagtcttggacaggttaagtgacctcttccaggtctcacagtaaatgtcaaaggctgattggaacccaggctggccaactcaaggggtggttcttagccactctgaaataacctttgaaaactacaaaatgctgttgatgtatgagagttgttattagaataatagaacatctgagctagaaaatatctgagaggctgtctccctacacggagccagacagattttaaatcctggctctaccctcacttcctgtgtggccttaggcacgtcccctaacctctgtggcctctgtttgcccatatataaattgggtatcttgtgagttcatttaagagttagatgagataaatacttaatgtgttgtctggtatgtggtcaaagtgccataaaaagtaatagctgttattatttataaataaagggaggctccaagagtctgtagaacatgcccaatgtctgcctaagaggtggtcacaggccggacatgagggctcatgcctctaatcccagtactttgggaggccaaaacagggggatcacttgaggccaggagtttgagaccaacctgggcaacataacaagacctcatctctactaaacataaaaaaattagccagccatggtggcacacacctgtggtcccagctactcgggagattgaggtgagaggatcacttgagcctgggaagttgaggctgcagtgagccgtgttggctccaatgcattccagccaggataacagctaaaaaaaaaaaaaaaaaaaggtaactgtgttgtgctgggtttggagctctgggtcgtctagtcctggtgttccagttctctaccttctccagtgtggttggcaggtgggcgtcctggctgatgggggtgtacactggacaggagtaggaagaggaaggggctrttccccagcagggcccactgcaggtgtccacaccacccactccatggcacgaaagacctgccctggggtagccttaattcccttctgcgagagctggtttctatcagtgcttgctttggagcatttttttttttttcataaagggaattccctttatgaaaaaaaagtccctcctgtggctttcagtaaacaatcacaagtgtgttccagaaagcatttggtcccagctgtcataaaatcacacttaataattagcatttctagagcactttggaacctagcaagtgtggtgcacatatgttgtctctgttaactctcacaacagtactgtgaaatcgatatggccagcatgatgaggatcacccttttacagatggagaaaacgaaaatcagagaggctgagggacttgcccagtggcacacaactagtcagagatagagccacaattagaatatatgttaaatatctaggctaggcatagttgctcatgcttgtaataccaacactttgggaggctgaggcgggacgattgctctagcctcggaggttgaggcttcagtgagccatggtcataccaccgtactccagcctgggctgcaacagagcaagaccttgtctcaaaaaaataaataaaattttaacttattgtcggcaactcgccattgctgagtgtacccagccctcactctatcctccaacattagccattccctttggtagccacactgtatgacctacatcaatgggagcagtttggtggtatttttgattggccccaaactgcctaaatactctttgtgtagccaaggtagggtgttcctctttctcttatgtaaaggagcagaattggggttcacactgaccccaaaattaccacttccaggaagctcttgtttttgtttgttcctaagaaaaacttggagattaatctacatgttccctgagttgaagtgtccatttaagcaaaggacaggatctgcatttggtatagactttcctggataaaagctaagtgatgatgctaacctgtcctttatttgagaaccagcttcccagcaacaaaggatcccagtgtccattttcatccagtgaccaggtgactcacagcttccctacctccttgcccactgttagttaagagctcgaaaatgaggaacaccacaagagaatgcctgcatcccccagttgatggattacagcagtggctacaaaagaccaccaaaggtcatgtcaaactcagatacccggcccctccacttcagcatccaccatcttcaccaaaaccagaaaccatctttgttcttctggcccctgtttttactttacttactcctacattgcccattatagaagatagccattaatgtcaaaacaagtgactcactggctcctgtgataattataaaaggtgcatttggaagggcagaggtagctgaaaactttataagaggtttaaattgacacctgtagaaattaatgagagcaattgtatcttcaagattagaaccctttagaccgagtctcattctgtggcccaggcaggagtgcagcagtgtgtgatcttggctcactgcagcctctgcctcccacgttcaagtgattcaagtgattctcgtgccttggcttcctcagtagctaggattacaggcatgcgccaccatgcccagctaatttttgtattttaagtagagatggggtttcaccatgttggccaagttagtctagaagtcctggcctcaagggatctgcccaccttggccccacaaagtgctgggattwcaggcatcagccaccatgcccggcccaaaagattgcatttttaaaaacggttttccaaatagtttgttgtttttgtttgtttgtttgttttttaaggaaagaaaacatcatcagtataatgtgtatctgggatacacggagcaaactgggggctttggaatgaccgtgtgtgcagcctttacatttcaagtgccagcgacccacctaaaggaagtgctgccataacttattgttgtgtgtctgtctgaaagggcccctgcaagaatacttgttaggtttgccagcagtagaatctgcatctgggactgtgcctggaaaggggcactatggaaggtcccaaaattactagcaacgatttcaattcagcaaacctttctgggaaggtaggtagaggctccaagaccccgctagatggtttctcttgccctctggctgggtcagatacaaaggaaaagcgatgtcctagtgtgggtgagctacccgtgagtagtgaactgttaatttgtctaccaagtggtactaaaacaacctcttggggtgggctctttgggaaaaatgggttaccctcagcttagttatagggcactatgtctaagaaagctgaaattgctttgaaattctcttgggcatgctttattcacatggttggcactcatttttgaaagcagcagatcccattattccttgactctacaaatttttattgagcacctactatgtgccaggcacaatgctggtctggggtttgtggtagtgaacaaatgagattcctgtccccataaagataatgccgtagtggctgatacagcaaacagccattttgaaacttggttccttggagtcgactctgggtttttgtggagggcatgaaaggcaatctgcttctggcctttgctgtctccttacccatggtttccttgattcccggtcccccttttttttcctgtccttttccctttttcttcccccttcttgggttctcagccttcaggaattcccctttttctgttcatagagttgacggagtgcttgcttccacttgctgggccttgccagcatccgctggttagagccagttgggggtgtgaagctctcacctgagggatgtgagtaggctgcacacctttggttgagtgaggagattagagtcacctgatgccttctctaatattatagtaggtgacttgttctaagaagaaatatttaagccaaaaaaccatccattgcacccctaccacattggagagcatctgctcccaccattcaaattttttgtctttggaggccagagctggtgatactgatactgtaatttcaatacagttgttccttagcaacccctcttagccgaactttttataatttaccgttagcttcagagcttcttataactatactctgatagaatgagaacaaagcattttaggacataaaaattaataatttttcataaaattcagtggttttgtcattttgtatccctgtgaccctgcctctcagcctcctggtgactcccattctaggacagaatctaagggacctgcagccaggagctgttgtctccctcacactccttcagcccaggaataaccaaagcaaattgttgtttttccgatgaattggaaaatgaaaaaaaagtgaaggttctcttaaaagccatgtctcatactctggccaatatcacaaagccttaactcattccgttccatccctgacccttccagaaagacatacctgtgattcctacactcactttccactctgtccctccgccttctcagagcagtgtttcataaccagactgccaagcagcccacagggcctggagaagagtcgataaattttaggaacttgaggccaggcgcagtggctcacggctgtaatcccagcaccttgggaggccaagacgggtggcttgcttgagtgcagaagttcaagaccagcttaggcaacatggtgaaaaccagtctgtactaaaaatactaaaattagctgggcatggtggcgcacgcctgtatacagattccagctacacgggaggctgaggcaggagaatcactttaacccaggaggtggaggttgcagtgagccgagatcacaccattgcattccagcctaggtaacagagtaagattctgtctcaaaaaaaaaaaaaaaaaaaataggaacttgaaaaaaaatatatacatatatatagagagagagagacacacacacagacagacacacacagacagggtcttcctctgtctcccaggatggagtgcagtggcacaatattggctcactgcaacctccacctcccaggctcaagcaatcctcccacctcagcctcccaagtagctgtgactacagacatgtgccaccacacttggctaatttttatatttttagtagagatggggtttcaccatgttacacagcctggtctcaaactcctgagcttaagctatccgcccacctcagcctcccaaagtgctgggattacaggcatgagccactgtgcccagccgaaaaccaactctcaacacttaggaaactaaatgtttaaattctgtttctactaagttgcttcagtcctattcagtgttagcctttgcagacataaatatgagtgtgttgtcaaactttccaaaggccaaaacaaccttaactttgatttgtccacctagctttttgtaaaaattttgtgctttttaattttataaatagatttcttttgttgtatttctttttctcactttagtcatttgaatttaaaaataacaattctcattgacataattcagataattcagaaataaccaaagtaaaatagtctcctgactcctatccccttcagtttcttccctccacttttttttttttttttaaattgagatggagtctcgctctgttgcccagcctggagtgcagtggcgcgatctcggctcactgcaagctctgcctccctggttcacgccattctcctgcctcagcctcccgagtagctgggactacaggcgcctgctgccacgcccagctaatttttttgtatttttagtagagacggggtttcaccatgttagcctggatggtctcaatctcctgacctcgtgatctgcccgcctcagcctcccaaagtgctgggattacaggcgtgagctgccacacccggccagtttcttcctctttgttataatttacaaacaacaattttttatgtatccttccatacttgttccagtgctcattgcagatatatcatatacacatgtatacacacacaagattgtgtctttacacattatatacactgtgtgtgttgctactatatgatcatcattgtataaattattcattgtataatttgtataaatttacaagttataaatttgtataaaattgtataaataaaaatacaaaaattagccggatgtggtggcacatgcctgtagtcccaactactcaggaggctgaggcatgagaaccacttgagccttggagrcagaggttgcagtgagctgagatcgcaccactgcagcccagcctgggcaacgtgtctcaaaaaaaaaaaaaaaaatgtaaacactgccataacactttttaatatatgatttatcttagtaggattaatcttagtactttacaaatttatcaacagatcattactgctgagatacatttaaagtcttatggtaattaaagcctttttctgtagctgtgcttttctgctagaccacctcaagttgattttatttacactttcattgtttgaaaaaaaatctctttttcccaccaggttagctttactatgttcacttaattgtatattcacttaattgttgattatattcacttaatcagttagaactaaaatgccgtttaggtaaatttaacttaggtgcccgccttctgccagagtcaacccaaaacctctaataaatcattagtttattcctaaaatgaactcacagagtttattagagactgcagttatttaagaagttgttcagctgcctgatggttatgaactgaaactgtaaaggtggtgagtagctgagctcttggagtgtttggaaattctagacatttggcaaatgtataagatacagcaccattattatgacccaaactctctatgttaattatcttctggggagttctgtgtaatttatttatttagtaagagaaaaaacagactaacagaagccagtttacaaaacaatacaatttgcaaaaacatagagggaaaaatcctttttaccctccctattcaaactgcaaacacatctttattaaggatgttggccacaatttggtgaatttatcatacatccctgtagggcaacttggttatatgtatcgaaactcaaaaatcctagcactttcagaggccgaggtgtgtggatcacctgaggtcaggagttcaagaccagcctggccaacatgatgaaaccctgtctctactaaaaatacaaaaattaagcaggtgtggtgatggatacctataatcccagctactcaggaggctgaggcaggagaatcgcttgaaccccaggggatggaggttacagtgagccgagatcgcaccacttcactccagcctgggtgaaagagtgaagctccatctcaaaaaaaaaaaaaaaaaaagacaaaaaaaaccattaaaaatattatttggtatagtaattctcttcttagaagtttgagtaaaaaaaatttcaaaacagcctaatgaaaaagtaagataaaagttaatacaaattatagtaaactagattattgaaccattaaagatcatatgtgtaaataatagttaatgacatggggaaatagatactatataataagtaggagaaagcagcttgaaaattagggtagttatttcccagaatactccattagatgctgagattttccacggccaaattagcttgagatatgtttagctgatcagaatttaacaaatgtatgcattatgcattgcaggacttgtcctgttagagattcatagaacataaaataaatgttttccaaatgtcttgactttgaaactttttctaaggaatacttactatcttcttttaggacacttaggttgagtagaacatagcataagaagtgccaatatagccgggtgcagtgactcacgcctgtaatcccagcactttgggaggtccaggcgggcagatcagttgaggtcaggagtttgagaccagcctggccagcatgagaaaaccctgtctctactaaaaatacaaaaattagccaggcatggtgatgcacacctgtagtcccagctactcggaaggctgaggcacgagaatcgcttgaacctgggaggtggacgttacagtgagccgagatcacgtcactgcactccagcctgggcaacaaagagagaccctgtctcaggaagagaaaaaaaaagtgccagtatgttgttcaatctcattttttgcttttaaaaacatagtatataaatgtattatgcgtttacatatatgtgcttctgttcatttgtgttcatgtaggcacagaaaaaataagctggagaaaatatacaaaaagcacatctcagagttgtgaaattgctgataatttttttctttatattagtctgaatttcccaaattttccgcaaaaaaaaaaaatcacttccaacactgaaaaaactgtgtttttaaattcccatagagttaataaaaaccactggtgagaaaggattaaagggaaaaagcagtcatatagaaaagaaaacataagccttsgagtcagatctgagttcttgtttgtgatctcgaacaaagcattgaacttgcaaaataagaatacaattaatatctcttacagggctgttgtgaaaatcacatcagataccrtacaaatatgtctaatacatgactttagatatgcaaagattgtgttgtttgagatttttcgtagtgattacatgtgtagggaagtacctctgtaaatgaaatgtactatatattgggataaatgtttttcctgtggaaatagactcctgaaatgatgaatgaaatgctctcgttcttaaaggaagggtgtggttcactacattgaactgaagggaaatgattctagactaatttagatgatttccatttaattttgagccagaattcttcccccccccccccacatctagttgcttttagctcttgtcaaatagttgtcataaagacaaggtttcacttaccatgctccattacctgagacccagacccttcctatggcattttttcaaattaaaaaaaaaaattattaaagagtttagtcagtttctcatggaactgtagaatttcttattgggaagattttcttttagtatataacacataatcactttaaaatgttaagattttggtactgtgaatgataaagtatgttttcacactttcttcatctgatttttgcaatgcttgcttttttctctatttctcacatagcaactctacagaaaaaagccaggtttggccatcacgtttgcaaagctgcctcaaaatttggacaaaaaccgatataaagatgtgctgccttgtgagtatccggcatgaatgcctccttcccccctacactgagataatgtttccctttttaaaacagattgtctggtattctggaacgattttcagtgtgtctgtaaacaccaccgtctttattgcagccatttcagactcggaacagttggggaatagtgtttatgctaatgaggcagagctgcagatggggctgggaactgaactctggtttacttggtatgataaaaatamtgctcggaataatcggtaaatttttctcttccccgcagatgacaccacccgggtattattgcagggaaatgaagattatattaatgcaagttacgtgaacgtaagttaggaatctggatgatgcttaagagcacattcaccactgtcgcaacgatgatgagggcctgtgtggggctttgcagttgacacagtgctttcccgttcaccaccgcatttcagcaccacaacagccatgggagggcaggcagaatagtctcattttacagaggagaaaactaaggttcggagagttaaaataatttgaaaagtcacaaagctaacagaagatgggaccagacttgttctgtgtttctaattcaatygtccacatgcccctgtactgagtggcttccattcaggtgtttgtttttgccagtgatgaaactgtctatttctctccatgtaatgagtgtcatcctgccttaaaaaaaaaatgagaaaaataaaacctcctctgtacatataagccaaaaagaaaaagtggaatgtttcacatgttatgggaaaagcayttattttctctctaaaaacgcatcttgggcaacttacttggcctctctagacttccattccttcttttttattttattttattattattatactttaagttttagggtacatgtgcacaatgtgcaggttagttacatatgtatacatgtgccatgctggtatgctgcacccattaactcgtcatttagcattaggtatatctcctaatgctatctgaacctggggtcagactttctgtagccaaccagatagtaatatgtgatctttgcatttgaaatgtaaccacttaaaaagattaaaagccgctcttagtttgcaaggtggcacacagatttggccttcaggcgatacgtggtctgccaactcctaaatagacagatgatttctcagattaagttctcaagttatagcaaagtgtcaagaaatgccctaataaaaactggtctcatcagtgattccacctgttccaaagcatctatgggattcattgaccctcacttcaacattcccggtgtcttaaaagcagagcatcagaaacattaggggcagcaataccataaagaccagtcttttcatataatcccaggactgaggaagccatttatccaagcaccagccgaaccatgaattagaagccttcctttaccttgctcacctgagagtgagtgaatcccagtgccagcccaaagctcagcaggttctgagtgttctttcgtcaaaaggactcagtccagagggcaaaaaggaaacatggagcaggaatatttctacctgaaacattcatttcaaaacatttcaacatttaatgtcaagattgaccaacttcatgatacaagcattggaagccatgcagaaggcaaagtgcaacaagaattggtggtgtaaacctgtaaggtttatgctttaaataaacgtaaatagattttgatagaaaaccctgcatagggaaagacttaggggtaggattggtacatacggctgaaaatgcagatagccaatattgattatatttaggatagagcaatgaaagtcatttaaactcttctgccatctcacagatagatttctgatttttgcctactgagtaccacacacttttatcttaaagatctaatactggtggttgtcagatatttttcaagaagttttagaaataacttgtttgattttccttattggctgtgaattgataaagagataatttttctggtgcaatatcaattagcaagtagaatagtttaaaatccagttccctgtgcaccctggggcagcaacagattctaatactttaccaatttcttaccagatggaaattcctgctgctaaccttgtgaacaagtacatcgccactcaggggcccctgccgcatacctgtgcacagttttggcaggttgtctgggatcagaagttgtcactcattgtcatgttgacgactctcacagaacgagggcgggtaagtagcttgatttctaattcagatgtgtgcagtgtcacaccctactctgtgtaacatgaatctcagcgctgagaagggtcttcagcgtctcctggtccagcccgtatgtgaccctaagtctcctctacagagcaaccaatagacacccctagtgacgggargctcagccctcctcctccccagtcccagcttggatccattacaacaagccagaaggcrcttcccctagccttacttcatgtgccccaacacccctgcagtgacgtggccttgcccattcaggacaagtgctggtcctgaaagagcagtgtgtgtgccaggttaacagtggcctttgtaaaaaggagaaattacatcactgtgccattttccatagaatccatttgggcagctcagcgctgtccctgtcttgtctgtctgcccttctcttccctgtaaagttgactctgccttttcagcaggaaggtcattcttctcctcagagaaaagggagcccccaccgcccagcaatggtctcttgtcttagggctgataaccctaagggttggttgccctggatagcagcccccttctttccctcattctgctttttccagcttgggagaaaaggccctttctgtgatccaggagacctcagcttcctccagccactcctatggctgctgtccgccagctccgtgctgctgacagcccctcttttttgttgatgtccactctgcacctgagctcatttgaggtctccattgtgacctggagggtttgtttcccagccctttctttctcactgaagctattccagctgctttgtcagtttcctgcattagagattcccatctcctctgaggtctagcattcccttcactatctctggccctggaacttaacctcccctgtttatccattggtagaaacctgttcttctgaaatccagggtgcatgtttcctccctcttctgttgcaaactcttggatgacaggatgacctcagccctttrtcctgaaggccctaacccgtccacatcaccacccaccagttcttccagattaggagtccatcactccaggcagcagctttgcgcctttctctgagagatgaaattttcagcatctcccatttgttttctcctataccatgcatttagtagagtgggactcccagcaggtgtgcagctggctggagtccacccccgctccccagcctcgctgtgctactctcaggtctgcaagtgcagagagagccttctttgaagcctcatatccccagcggtcagtaggacacttccccacgagatacttgatttctccctttttaaattcccacccaaaatgtttttctttgtgctctcccttgaggctcatgggtttcttcttagaaacattgcaattgaataagttattctccctcactttccatcagagatgtttcttttggagagaaatatcattttttgctactacacgtgaataatgcaggtactcttcctggcccactggcggtcagaggcaggggctttggggtcagaggaggcgtttgagttctggcaccaccgctttccactgtttaaccttgcacagggctctaagcctcagttgcctcatcactagaaaggaggtggtaatgcctgtcttttgggattgttttgagaattaagaatgagctaccctggactggctgcctcatccagtagtgggtgctccacgtggcatagtgagtcaggatcctggcctccttgtctcacagggccagaggcagataggtttgctgctctgggcaacattaggggcccctgggttgccatgaggatcatgtgaggtgacaggaagaggtttgaggcagcacaaagctctataatcccccttgctcttgttatctgttaaacacactgtttggtgaaatgcacacttaggcaacgaggctcttcggcagagaactgatctctgagtcaggcttcatcaggccctctggttggttcagcaaatggatctaggcactgattccttccacctcctgaacccagacccatctgctcatttgttgataggacacatctacctgagtgtcctcacatacaaggtgcctgaagctgaagctgtcagccatgcacctgcacccaggtggtacacgccctgagctcaccagtctggccagtggcacccatctgcccagtcacccgagccaggaacctggaatcggtcttacccctcccttctcttcacttcccacatccactcaccacggtctgccgctgccagtctcccctctctgtcccccaaaccctcaccttctctcagagcytttgcatttctcttccaggagcagcagcagcagcctccttagtggcttcctggcctagaggctcccccagcccccgtcttgtccatcccttggcacagctttcagcgatacctttccagagggttgcctggtcctgtcatttccctgctcaaaccctctggtggcttctcaggtgcaccacgtaaagtctcaccttgagactggtaccttctgtgcaggtgtattgtactgtctgtcgttccctgggtacatcatgtgcctctttacctcttgaccatgtgtgtcccattccctctgcctgaatgatccatccttgccttgccaacctgatgaagaccctcgtccttcaatactgagatctccatcccctctctccaggacattacctcctcctcctgtgtgagccgcctgtgtctctgacttccctctttcttttcttttcaccacattcccccaacaccgattcgagagcaccttgaggacagtgccacatcgtgtctcattcatctctgcatcctcagggatgtttattaactaagtgaacaagaaagcaagcttttcaccatgaagccttctaaatttggcccatgactcccactaaaccctatctggtccatcttcctgagatagtgctctctctccttctttggcatgttatccatcgttagaawcctgttcttctgaaatccagggtgcatatttcctcccttttcctccctctcctgttacaaacccttggatgaccagatgacccgagccctttatccctaagttcctatctcatcttcatcactgcccaccagttcttctggattaggagtcggtcactccaagtgagcagatttatccctttctctgagagctgaaattttcagtatgtcccatttgtgttcacccataycatgcatttagtagagcaggactcacagcaggcgtatggcttgtcttccacccagcttgtggcttgtttcctctggtccagaaagacacatcctttcagaaaccatctccctggtcagctttcccttcctgaagcctcttctcgaaaccacacctggggactggaaatgagaaacaggccccactcaggcttgtgaatctctgaggacagagcattctgagttctggcagcatctgcccagggtctcgtccccagcagcatgttgccagcctcctagcttcagtgatcttcgttgtccattgacaacttctccagaagtgcttcttctcttatatgctcagctttgcatatgttactgtttaatttaaccacagccctaagaaggtgcattttcttgtcattccagagtattaccagcctggctaagggttcacaggcctgttgagacattccagctctgccccagttcctctctctgtgatctgacacacactgattcattctctgagcctcagtttactcatatgcaaaacagagacaatcatagtacctacctcatagggttgttttgaagccaaggtaaagccatgttcatgaaaggcaccattcagtgcttagcatctaccgttctgaagatatgaagcttcagaatcatcgcccctcgctgcagcagcattaatgtggagactgagacccaaagaagttaagtaatttgcccgagatcactaaccaaatatgtttagtagaatttattaaccagggttgaaactcaggatctccacagacttgttctttccactacaccaccagtttttccagatccaaattgaactgcaatctgtatttggtcagaggtaaagagagagtctagtactgctcagattcactgtggaataaggggagtctctctggcagtacagatattggtagttctgccttgcatgggttgatctcatcagagaatatcttctctgcaattaccctgtgggcaggaccattgggagcctacaggacagggatttatccttcctatgcagatgaggaggtgagagagggcttgtgtctgtcaactctgccttgggccctacagcccttaacctgtcatgtctaagcaaagtcacagaatggctactaaccaaaattacccatgtttaaggtttccaagtaaattcttaactccagctttccagcggcatagtttagtttcaagtattcactgtgacatttgaaagtaagaatagagaggctgtttcccaacaaattacatatgtcttatggttataccacttttccaccatgaacaaatgtattttttacttaagttgctataaccacatataggctcaggggaaaatgcttgtttaatgacttaggatttaactgacagaaggatctatgatgggatggacagcctagccctgaagtttgcttagaagccagaggcaggtgctaagatggcttacaggacaagttgcaggttttagaagcagggatagaaactggggagggtggtgggatcagcccgtctgtgcggacagcacagccatattgagagacactggggtgccataggaagagtgctggactgcatcactgtgacctcatggccttgggcaagtcacttaatcccgagtagccctggattccttgtctgctgtgtgggatatcacctctttagggcgtcacctaagaaagccttcaagggcttcagagacgctgctccagtgagaaaggtattcatctcgatttgtgagtcccttaatctgggtttttgtggaaactcatcactgttactcaagctggtatgtaacccatgacagcaacagaagtcatggccacccccgcctgccccctacagtggctaagtactgcacacccacgccggccgcctcaccagcgttgaggcaggagccacctccatcttcccggtggaaaacatgaaaatcagagaggttaagcaactgtttcgacatcatctggctgacaaatggaggaggaaaggatcccagcggagttgtgtatgacaccagatgtgtgcccttaactgctgtgcctggaggcctccccctcaaaagggtggggagaatggtggaggaggggtgcaggaggaggggccgttggaggtggggaggggcctgaggggctggggtctgggagggtagagaggttgctcacaggctaaggtcctgcatctgaggccactggtgctcttccagcgagtggcccctggtgatgaagacgctgcgtcctcctcctccaggctgcagcctggggctgagcggagacctgtggcctagtccctggcaggctgcccccaccccgccytgagaaacagctgatggacttggctgagtttgttttctcccatcagtgctctcrgktgtgcatgagaggatgcctaacccgtccacctgtccagggttaactgcttgcaggaacaccccacagayggggctcactcactctcggtggtttcttacagaccaaatgtcaccagtactggccagatcccccyracgtcatgaaccacggcggctttcacatccagtgtcagtcagaggactgcaccatcgcctatgtgtcccgagaaatgctggtcacaaacacccaggtgagccgcagcctgaggggcacggtggaggggcaggtgctgaatcagcggccactgtcatcccaggtggtcacgcttctaggtgtgcactctgtttgcacctggcaagcgtgtcagtaagtgcgcaagactgcccatcaaagagccagggcccagagttcacagtggccctagtcacaacaggcacgaggtgcaaacagcccagtgtccatcgatggaggaatggataaacagcacgtggtctgtccatacaatggaatatgattcagcctttaaaaggaaggagattctgacccctgctacaacactggggaaccttgagcatattatcctaagtgaaataagccagacatagaaagacacatactgtaggattcaacttctgtgaagtgcctagagtcgtccaattcatagagacagaaagtagaacggtggttgccaagggcttggggaaggaggagaaaggacatctatggacattttgccatatggcataatgggtgcagggtttatgtttgcgggatattttaaagttctggaaataggtagtgctgatggctctacaacattgcgagtattctcaatgccgctgaactgtacatttaaatgtggttacagtggtaagcctcatgttagtatattttgccacagttgaaaaaaaaaaaaaaaaacagtcagcatgtgtggcctctaatggcaagtaccatagcagcaaatggaggagatcactgggcagaggagatcactgggcagaagtgatcaaggaaggcagccctgcaggacaggcccacrgctgagcctgagaggggatggggatctttggggaaggaggggaggaattgctaggggccacagcagggctgtgcgcagagggagaaagcatcaggagacagggccaccctrtgtctgggttggggctgggtcctcatgctcaccacctggatgggctcaccaaggccactgcatctcccacagaccggggaagaacacacagtgacacatctccagtacgtcgcatggcctgaccacggtgtgcccgatgactcctccgactttctggaatttgtaaactatgtgaggtctctgagagtggacagcgagcccgtcctagttcactgcaggtatggcrcttgctgttttgttaggtttggaatcctttccctgtcggaaaaggcctggagacaattggcaggcgccagacccaccctacatcccacaaagtcgtgtgcccttacaaacctctgttgactgtggttcttcaccatttcaaaagttttttggaattttatgaaatcctaactttgtgaatgtagcacagaactgaagaagaaaatcccctcacacaccctttctcctgtccttctgtcagctgaccttcgtcataggtgtgagtgagaaagggaataggtttggcacttcacagtggccctctttccactgcctgctagcccccagtctcagatgtgtgaggacaggctgtctcagcctgtttgagagcacgccgtgagtgtgcgttttgtcttctcgaaggccaagggaggaaagcccctttggagtcagcggggaactgctcgctgggccatgcagaaaggctactcagacaaatcccaagtctgtcttctctcccstctccagtgctggaataggtcgaaccggtgtgttggtcactatggaaacagccatgtgcctaactgagaggaacctgcccatttacccactggatattgtccgaaaaatgcgagaccagcgcgccatgatggtgcagacatcagtgagtagaaatccagtaattacggtggctggcactttctgagcacttacaccaggcaggcctgagagaagggctttgtgagtcaacagactgcagctcagggggactgaatcacttgcccaaggtcacagagcttgtcagtggctacagcccacacccatctcacctctgagctctgctgcctctgtggtttatttcctgccagcccgtctgtcagggagcagccctggttgcattctgtatcgttgaacaatcatttgtccattatcctcccccgcaccgacccacctagacctgggtactccttttggctcagtggatgttgcatatgaccctactttgagctctgttccacccgtgtggtgcctgagtacctgctgtgtcctccacgggcaggccagagctcaaagtagggtcatgtgcaacatcctcttgtcctcaagaggaactctaggggataactcttggggatttcccctggaactgcaagcggggcagtgaagcggtgtggaaagagcatgattaaggtcccaccacaaatggaacaacctttgcataagtcctgaacctctctccaagcttcagcttccctgtgcaaaatggggaccatcccacattcattcattcattcatttgacaaagaagggtgcagagacaggcttgtatctagtaggagaactggattagtctatgctaagtgtcagcagcggtgagggaagttcagggctgtctgagaacatggtggaagagtatctaaagcaggatttggaaagtctaggaaggcttcctggagaagtgtcttctctggtaaaaacccccagggtacatgaggagttagcaaagaaaggagcaggaactatatgttccaaccagctctgtctcttcacaggctgtggacaaagtttataagatttccctaataaatttttaagctttggtagttttatattagtttgtacccagaaaatcttgttaagagaaaaaaaatcagcttatgttattagggccattctctgccctgttttttggtatggaagacctcgtggctggttaaaaagaaaaaagtccatcatcctggtagattttcccagctggaagctgggcacggtggctcacgcctataatcccagcacttcagcaggctaaggaaggtggatcacttgagatcagtagttcaagaccagcctggctaacatagtgaaaccccgtctctaatgaaaatacaaaaattagccaggcatggtggcatgtgcctatagtcccagctacttgggaggctgaggcaggagaatcgcttgaacccaggaggtggaggttgcagtgagccaagattacgccactgcactccagcctgagtgacagaacaggactctgtcttgaaaactagatagatagatagatagatagatagatagatagatagatagatagatagattttcctagctggagaagctcagtctaaatgcttttatcccccctgtatactttgctacaatatgtttcttaggtatttgctaagataaataactgtatcctgcagagcatctttcagtggctctgctttgtaaaacacaatccagactccttaccccaacacaaggtgcccacaaccaggtcccagcccacctgtgcagcccctcctcctccacatgcctaggtgttgagtccaggagcaggctccctgaccccgtttctcaaaatgggctcttactgaggcttccacacttccacttacaagaagggctgtcccgcagggacttttgctccttcccacctcccccagaccgccagtttctccctctgtcatgtctccatgacactttgcccacccctctctgggagtgccccctccccgcatcatataggaactagggcttcacaggtgtacctggcctgtggcccagagttggcgctcagggaatatttacaaatgctgcaaaagacccaccggtacagggtgtggtaggcagcatttcctggagctacaggacttgacagcatttttttcttttccagagccagtacaagtttgtgtgtgaagcgattcttcgtgtgtatgaagaaggtttagtccaaatgctggatcctagttaagacaactgtgaaaaagttcattcctctttcccaagggcatcctccttgaaagaggaggacagacctctctggaagcagcaagaggaaccagtagctgtgggaaaggaatgggcacctctgaacccaggcactttaaacttctatagaaaagatatcgtgtacataggaactggtgtagataagcatgcaattatggcatcatttaggcctgtatttctatggaaagatacaaaaaggatctcagtttggggcctgtcctaatgccttcttccctaacatcaccacacacacccctgtcggcatcctggagcaattgagaccggacacccacagagctgttgtcctcccagcaacaagatggtgtggttatcttgggtcatttggatgttttgtttgtttctgtgtgtcagactgtaagggctgagctttctgtgcttctaggtggagctggaacaattcagattcacccgccctgatgctaaggaaaccctgacgtatgtactagatggcagggcactgggggtcaggctgaaggctgagcaacacctctctgccctccctccctttgtcccatctcccagcgacttccaatattcatgtttctgagaattgtgtccctcttcaggttccctcttggtgcctaacctggattagtaatgtgcattcaggtgaattttcagctgaggctctgagaactggtactctcagtgtgttctggtcatcttgtggcttagttgtagaagcaggtgtgtctcttgcctctgcttgcctcctactgcacactcagcacccaggactggaatcaccgactactgaatctcctacatgtattgctgctacttcaagctcctccacttgaaaccttatgattttcccaaggggagatgggacagtgtcatctaaatattccgaatgtttggccttctgagaaaagagcttctagtaattgaaccatgggaaacccagcttctggagggttggccgtggggctgtgtacatgtgtgtgcccaggggtgagtgtttctcaggattcctaacgattcaaattaccgttgagtatatataaagaatgagtctctgtatggaagaacaaatgtgtgcattcacccccagtcacaatggtctccattgcatttcaaaggagaggatcagactatctgaatataaacacaatctgatgttaatttattctaagaacaccatcattttgattgtcctaaagaattctgcctttgtgaataccgtgttaaatttttttaaatttgtgacaggattgtagcaaattattatttaaggaaaataaattgtgtaaacatttaatgtggtatttttgaacagcggtttttatgtactcagaagaggaagtaaagccaggttcttaatggtatttatagaaaagatgttttcatattataatgcacataaatgaagccattttgatattcagcaaattcggtgccaattgaatagtttgctggtagcaagacggatgaagacctatatgggagattctttatctctagagctagcatatttacttgcatactttgtttcttttccacatggatattttactgctaaatggcagaggtgggagggagatgtcacacagtaccataaccccatattgaaaacaagaaaccaccagaaagtttgcagctaaggggcaggggattcagttcctacgcccactcagcactaactacttgcgggcctggttgcttagaagctctacctctctttcattatctgtaaaatagaaacaatacttaggactttagttggaacatgaggattgaataagatcacgctattcatgtgactttttatcggctagaacagcaacagacactgctgtgggtgagttacttagaaaagtttagttatcagtgattagcccaaaaacacatcagtcaaaaatagaatccactggatttttgtctctctttttagagacagggtctcactgtcgcccaggctggagtacagtggcatgatcattgttcactgcagcctcaaattcctgggctcaagcaatcctcgcacctcagcctcctgagtagccgggactataggcacatgccacctcacctggcttgtgtgtgtgtgtgtgtgtgtgtgtgtgtgtgtgtgtgtgtgtgtgtgtgtgtgtgtgtgtgtagagacaggatcttgatgtgttgcctaggctggtctcaaactcctggcctcaagtgatcttcccacctcagcctccaaaactgttgggattataggcgtgagccactgtgcccagcctaactgggtttttatgagaggaaaatagaaaatgctcttctagaagagagagaacaagagcacaaaataatctggactcacaaaaattcagcaagctccaagaaagggggatggagggaacgctggcaaaaatttaaatgccattaggatatttagcaagttattactgtttggtaaaaatgcatcatcaccctgtgtgcaaaatgcttgcaaagtagtctaaatgtctttggagatgggtgttttactgcttttttccaaaaacaaattgtttattatggttgcagaaatgcagccattacggtcacataaatttctaaaaagcctaccaaaggttgcaagcagtcttctgccactgggcaggccagcagttcagacccagcgaggttgccaggaacaaatccaggaaatactgggaagaacaagacaagagaattacctaaaagagcaaacaattcaagtaaatcctgtagctattaccacttaaaatccgtagctcaagattcctgtttcaccaccttatacacttaagcaattatacttaagcctttttttagtcctaagtgaagaactacatcagaatcaggataagtattttgcctgggaaatttggctgcatatgaatggagaagacatttacatcctatgttctggcactttctgaaagatctaattaaacatgttgatgtgccaatttaatcaagatgagagatccctgctggtgtcaccctctagaacctgcacttggtgttttgactttccagaagaaaaaaatgcaactttggttagggggcagtggttggatcacacagttgtctttcgtttcctaccacagtaattcatatttaaatatgcttttagattagtgtggatactattgctgctgtgttgctacctgacctttttctggggggggtacctcakaaatgagcatttgagggcaagcgaaaaagccctcttcatcctccagaggcaacaaagaggcagcagaaatggggaaagattgtgagaggcagggcttgggtctagacctggacttaggcaagatatgttgccctcaaccctgagttttcttatatgtaaaaagggaaggttgggctggactagatgaggtcaagatttgccattctgggaggctgatattccagagaatcaaaattaatcctaaaccaaagctttatggctgctacagagacatgtcacatttctgagacttgtcaccaagagtttgtccctcagactttggcgctgttgaatgcaaagacaaggatggccaccttctggttcttgcctgttgtcctcagctgagagcagtctcggtaaaggtggcaaagattctgtgacctcagaccggggaccaaatgcttgggagtctgatggccgggctggrccaccattctcatagctctcattctgtttggagcaaccaaaggatttgtgtgaagttatttggaaaaggaccttaactgagcagtaatcttttttctgtatatttggaatgtttttcattctgacctgttctgtcagtgattctactgaaaaacaatttaatcaatataaaaatgttcaagctatgcaacactgttattgtctgttgacatttttattctaattgatttctgcaaatcttttcttatttgtgtttgctttttcctttcatttagaaatcaactcttttggaggagagtgctctctgctcatctccaccttccctctggtcaggagcatgaactcccatcttggccttgtcctggggtattagtccattctcatgctgctaataaagacatacctgagactgggtaatttatgaaagaaagaggttcaatggactcaattccacggggctgggggaggcctcacaatcatggtggaaggcgaatgagaagcaaagtcacgtcttacatggtggcgggcaggagagcttgtgcaggggaactcccatttataaagccatccgatctcatgagactttttcaccaccacgagaacagtatgggggaaacctcccccatgattcagttgtctccccctggctccactcttgaygtggggattattacaatccaaggtgagatttgggtgggggacacagcaaaattatatcacctggtgtggcaaattctatacccaaattaggttccaccatcctgacgagtagctttcacatagtacaagttcaccttttgtcctgcagggctgccagggtggcttcatggtcaccagggtcccacattcctccccacttgttgctcggccatcctcagtctacagctccatcacattccagctagtaggagggaggcaaggggaggagaaaagcatgatccctccctggaggaggtgccacctgggtattgtacatcctgttgatcagaactttgtcacagggccatacctactgcaaggaagagagtagagggaaggtcatttttattccaggaaaccatgtgcctaacmaattcagggcttctatctgagaaacaaaataataggtttgagggacaattagtgctctctgccatcgctcaaccctttggctgcccttcttctgtgacatagaatctgctctgttgcccaggctggagtgtaggatcttgctgagttgaccaggttggtcccaaaatcctgggctcaagtgatcctcccatgttggcattcccaaagtgctgggattacaggcatgaggcaccgcacctggtccaccacagcttctataggctgcttactccttgggcagttttgggggagtccccagggttactttcatggttcaggaagaccaggcatgcatttcttagacaatagaatccatcagctactcacagcggaagatctgctctgcttctgcctcttcgacataaacgtggttgccttgaggctgcctaaaagagaagcatgggtgggagcaacacccttagtctggtctttgaagcaacctggtttgcattttctggcagagaagccttatctgcactaagactgccacttcaaggccactgcgcttaatagctgcagtttgaaggacaaaagcagttgtcattttcagtgcttcaagactttaatcaactttgagtgcagctattgacagcacctctctgagcaaagcaagagtccctcctgtcttagcctgcttactgttgctatgcaggaatacctgaggctgggcaatttataaagaaaagaggtttatttgcctcagttctgcagactgtacaaaaagcatggcacccacatctgcttctggtgagggcctcaggcctcttccactcatggtgaaaggcaaaggggagtgagtgtgtgcagatcacatgatgagacaggaagcaagagagagcggggagaaggaccaggctttttttaacaacctgctcttaccgaaatgaagagagtgagaactcaccccatcctcagggaggacattattcatgagggatttacctttatgacccaaacacctcccattaggccccacctccaactttggggaatgcgtttcaacatgagatttggagaagacaaacatcaactgtaacacctcccatctctgcaagctggctggctgtagccccagttcatctcatgtataggactgtgaaaagcaacaaggagcaacattcacacttcttgcatcctcccaccattttctcttgctgtgtgtggcctcagtctgaatgtagtccaccttccacattcccagtagcagataacaatttcatcaatgtttagccattacacaaaaggcaatatttgtatctttgccatctgctggcccaccaattccactaagccactgccacattttagatactatttgcagcattttgtcttcaggtatcaaattctgaatctgaaagtcaaagtaaaggtggttcaagcaaaacggtttatttctgtctcacataaacaccagcagcccagagctggtaccactcactggggacccagtttcctccaatctggtcactccactgtcctcaacacagagcttctacatcatagtccaaaatggctgctccagctccaatcatcacatcaacattccagcaagaaaaacaaaagaatgccctttccctctaagtatacctcctcaaaatttcatgcactactctgacttacaaacagttggccagaacttaatcatatggatacactgtgctgcaagacaggttaggaaaggtagtctttatcctagatggcagtacacagccaaaattcaacaggctgaattcaagaggcttttattgaagaagaaattattattagggcacaattagcagcttcccctgcatattctttgacttcagatctactaaagggctgattcatgaggagttaaccttactcaagacccagtatacaggaacaaatgcaattctgtcatttaagcaagactgacccactttttttttttttttttagacagaatctctctctgtctcccaggctggagtgcagtggcgcaatctcagctcactgcaacctctacctcccggtttcaagtgattctcgtgcctcaacccccggggtagctgggattacaggcgtgcaccaccacaccctgctaatttttgtatttttagtagagacagggtttcaccatgttggccaggctggtcttgaattcccgacctcgggtgatctgcccacctcagcctcccaaagtgctgggactgcaggtgtgagtcaccatgcctggctgtgacccaccgtcttgaagtatagcactgatagcttttgacaggatcagcacccatccattatgtacgtgaaccgcttgagtaagaatggacagataacaaacttctagaaatcccagaaccctaccccctaattatacaggccagtcctcatctgtgactgcccttgtaacctttggtggttagtctctaagcctctggattccttttaggatccaggaagtctccggaattttccttgaggctgccccaggactttcaacatgattacccaaaccagaggaagaaccaggtaagacttgttgggatgcagcagcagagttctcaggagagatggtggcagtgaggatggaggtgaagtgatcacaacccagacatgattaaaaagaaaagtaatgagttgagacctggcaggtgtgcagagggagaaacaggggatgaggccatttcataagttgggcaactgtgtggatgttggtgctaccaacaagaattagaaatgggacaatggtgagattgttctttgggcctctaacactggggacatgtgtaaccagtctgaagagtctcaggcagctatgtctgaacacaaacctttattctcaaaatgatgcagacatttctgagtcctgagcacttcaatcagccacggtaaatgccttttcttttgtgccattcctatttacattttaatccattcaaatgatttctttttttattaaaaaaaaaaaaagagagagatggaattgtgctttgttgtccaggctggtctccaactcctggcttcaagcaatcctcctgcctcgacctcccaaagtgctggaattacaggcgtgaaccattgcacttggccctattcaaatgattctgtaatcaaatccagttattaaaattgcctctctgggaataagcatgcagttgtcttaatctgctcaggcttctataacaaaaccataaactaggtggcttaagcaatagatatttatttcccacagttctggaggcagggagtccaaagtcaagatgccagcaaatttgtttcctggccaggactctcttcctagaaggcaaatggccatcttcctgctgtgtcctcaaatggtgacaacagggagcctgcatctcttcctgtctttgtaaggacactaattccatcatgagagccccatcctcctggcctcacctaacctacctccaaaggcttctccaaataccaccccatgggggtcagggcttcagcatatgaatttgggagctgacataattcagtgcatagtgtagtcgaagtcatattttatcataattctaaacagaagtccaagtcctctctctcagaggccttgttgtcccccagagccccacaacaagacaggtgaggaggggaggactgctcatgtggggtccccagcctcgtcctgtgtggtcctctgctgcgtggtggtcttggygcaggcattgtgtgctttcctttagtagggttcagctttaccctggccctctccaacatggataagcaaccctcttccttcctctcaggggtgtggggaaacacgccatcttccagccaccaccccaacccagtttctgagtcatgcagcccatcactcagccaggtggctccatggacaaccttatgtttttaccatctctgttcctccatagacggcaatgtaaaggaggccccccggagctatgcaaggtagcagtactgaccatgcttcctcacatagaccacaagaaccactgtgccaaattctgcactgccctggagctccgcaggtatcgcatcacaactgatggctttctggcctaacctgaaacctgctccagctggaactccatccccttcccatctgttgaccttcatactgccccttttaccacccaacagtcagcccaagattctgatggaatacttgttgcaaataagcctcatgccttggaggctttaacttgcatcttttcatttaatgccaagtagacaattgtgagtaaagggaggaattctctctcccctcccctctcccagcttcataccccagggagaaatggtggtgcttctaaagtggtgtggcaaaagaacaaaaatgaaaataaaaaataaactggtgtggccagtaacaatgtcaaaatcccatctcagacctggtccctgagaacccccctacccctaagcacagagcacggcgtgaactgttgacaccactgaggcccaccctaccctggaccctgactagatggggccctgcaactaccaccctcactgtaactaatctacattgttcatgcttcttggcttctctgaattctgattaagagttgggggcaggctggatgcagtggctcatgccctgtaatccctttgggagggaggtgggagactgaggcaggagaatcacttaaggccaggaattcaagaccagtctgggcaacatagcaagtcctcatctctgtttaataaaaaaaaatagagatgatctctggcagagcctagctcatgtgcccatgcctagctgcaagggaggctgaaaatgcaagaatttggcattttccgcctctgtaatttgagatgtgggaattgatttctgccttacacggtggagatgtctccaaatgagaagctggatgatcaaaacaaatgtccgctatagtccacccctttcactctcaatattctcctcatacttgtaaaatataacagcacctggcaaataatgaccatccctcatgtaagtgaaaatgctcacccttccgcaaaagcggccaaacagaacactcctcaacttcaactaggggcaaatcccagatctcaattttttttctatttggtcatgagcctatctcattttcctgtactctatgagctaaattgtgtgtgataactatcagcattccctataacacaataaaagaaaaaggaggagagaagtaaaattagatattttaaattatacataacacagcaaaagaaaaaatacaatagaactccctggtgtgagagggcattgcccaccaggcaggtgctgtctggactctgtccagagtgtgagtcactctgccctaggcctctggggctccactgagaaactgagatttcactgaggtcaggggt

SEQ ID NO: 95349 - DNA, 118498 bp, Homo sapiens
  misc_feature (1)...(118498): n = A,T,C or G
accacagcaaaaccagtgctggctgcctgctggacgactggcacatgaagaagaaataaacttctgtttcgaataagtcactagcattttgggtttattgtcccttgtagccaaatccaatccaaactagtatactcatgcagccaaattggtctcttgatcacccccccgctcccagttttccctagtctgctctgacaaatctgatctgaggactgggaagagaggatgtataaccacacagatggcatttgaggcaggggagaagtggaagaggattcccaaagggacattttacaagaaactgacttggcaccaagagtctccttcctctgtccagtgtttggtgccaacatcccagcgggtcgacatcctggcaaacgctgccatgtctttggggactatgccgcttcgagtttactttagaaacagtatttcacctggcatgctcacaaaggcattgtgactttggcgacctcctgttgccactggtccctagttttgtgctggaggtggctcatgctggctcttcaatacagtcattattaaaaatggaaatatatcaacttgaagttcaataaattatatcaaaaacaaaggcaataaatactcagaactcatcacttcctaatttcattttccacccttgaccatgatctatgttcttgaagttatcttgtttcttgtatgaatatggtgggaatactgtgtcatgctgggcggttcacatcttttcctaactctgccttcagcaacgtgacgatgatggtttgaaattgaccatgatgggaacaggtattgactggggttctttcctcctagataatgtggggccagagaggaataaaagtccctatcccttcggagtttccaatctcactgaagtatcacaaacatgaaataaaatattatgtatgaaggagaactagaactgaactcagctaggaggcaggagagctagaatctgttctcagctctgaaacaagtggtgggactgtgggcaagtctcttggtctctcatcacagcgtttttcatctagaaaatcccattggactccaagctccaccaggggagcagctgcgtttaccccatttgctgctacatcccagccctccagcataattccagacatgtaagaggcaatgaagcaatgcttgtcaagtaaatgaatgagtgggaaagcaccatctccaccaacccttccagctctgagaatgtggaggtccatgatccaaactaaggttaagagaagtggcacaagactgagagccagggatggtcaacacgggccagtttcctcagatgcctacaaggaaggggccatgctggactctgggcaaaggtgggcaagccaagaagttgggcaagccaggaagtctgactgagatcacagtgatcattcctcgaagccctggtgagaatcgtgagcggacattccttttagttcttctctgttgtctggtacctgacttcatgctttggttcaatactgccttgaatgccagctgaagagtttgttaaactcccagcaaawcaaacaaacaaacaaaaaaacattgaaccatccccctgcccactaccacttccagctcgctgtggagctcattctcacacccctcccaagatctcttgctgatagtctcggamatatttacagcaatcrcctgagtacatttcttttctttccttggctaaactataattttgctatttaaaaaaagttacaaaaggaatgcaaatgtgcccgttaacttttccrtattcttaccactctgagtctgattttaaagcggaaaacgttgcatttgtgagaatactcaaatttaatgtaaatttctcaagataaggcaaattctctcatttattagcagtgcagaaacacaatagccaatgaatgtatcccgactatgatactctacctgttgacatcaccctcccrtcctacccagtcccaacacacatacagttcccccttcagagatgatgaaaaagcaagaccattaccactttgtagttatttcacattctaaattgctcttggagcgagttcaaaggtgttaggtcagaattttgaatgcgattgttattatttattcttaaggtttttttaagtctgaattgattgaaataacttgttttttccatgtggaaagatgaaaacagagatttattactatagtctcacaaatgatgaagggtgtgcagtgagtgaagatagatttgttcccagaatcctcacatgccagaactaagggcacatagtcagaattaaagaagatgcctgtttacaaatctatttagaattgccccacgtgcggaagaggatattggccatcccacagtcccacatgttgctgggtcagggtaggaaatcagcttctttgagcctcagtttcctcaaatgtaaaagggagataatgatatctatatgaaaggattgccaggattaaatcagagaaatagcccaggccagcgccttgaacttgtgtgcactcccaaatgttagctccattcccccttgctccctcccccgtccgacttgcccccatttccagccagtcacttggacaagttattatcaatacagaccttactactcccaagaagtcgctcaggtgaagattctgcatagctggggtggagagggggagtttagccctatgtgtaaatggtagatacagttttagagtttccacgaattcaggctttgggtggttccccattctccaggttgcagctagaaggacaaacatgccctcagccagtgtcagacacaaggaaggggtgtccatgtgtgaccctgttgggctcctttgagcttctgaaaagcctcttggccctctgtccctcattactacaaactgcccagggccttaccagttgcctgaatagcktatatactcaattaatttgagttaaaatgttaatgggtggtaatggcctttaatttgccaccacttcctcattttaacccaaacattcaatgacttagtctacagaagtgatggctgtaggaccttcgggcttcttggaaaatccaaggcaggaaaagagacttgcttaaacagaggggtaagcaggaggggaggggtcagggtggccaagccaagcacatgcccatgtggcagttcacatcaccagtctgacattctcyrccaatctcatcagtcttcctctttccagattccaggaacaaactcattttgcagaggcagcaacgggtggtgtatgtacacaatcacttgttaaaggagctggcccaacgagacccaaacctaagtgatcacagatagcaggtattctatagtcaacgatcacaagggtcccccatcaccctccaagaaaaatcccacttcagtgactctcattgcaaggacagcgtctatgtgaggaagctagctctacttccgagcaggtatacttgagagatattgctctgtgggtctgattacagggatctctctatatggaatcgaaccattcaacaaaagcttccactgtttcctgtccactcatatgactctggtctggtgggtgcaaagaaggaagactgagcctgggatgagaacatgggccacctaacaggaaacggaaatagattctgctgtaatcgtgggtcacctaacaggaaatggaaatagactctgttgtaattgtgcttgcagcaatgaggttgacccgacctggtgaatttagtaccacggcaacacttccatgatgttctgcatggtaagagtgcagtaggtagagaagcagagaagcagagaacagaggagagaaaggtcagtttcttcttgctcttttgggggatcttattaatcaattataagtgagccaggagaccttaggtctactgcagctcaaatcccctatcataattagacacctgaatgtctgtctcccttgtgaacagtgagccactagagggcaggaaacccgaggtgtctctctccacttggtgtctctagctcctagcacagagcctggtacaaggtaggttaaatattgctgcacgttggagtgagtggaggagcgattcaaatacagagcagcataccaggcgcatcctgtactttcctctccctattcaggtatcccaaccattcccttcagaaaaacaaggcaaaatgatgacaaaaacctctccacacctcctaaaccacccttcaagcaagaaaaagggaaagattttggcattttgaaaacttgaaataaggatggttagaccccgtgccagccacactgatgggaaactctcctttgacgtctcatccctgcctctaacagacagggagagtgacgtccaacattgttctcaacatcagaaaaacctcaccccaagaaaaatacatggtattttcgaagtgcttactgtaaaaggagcagggtgcgctgacttcgccaaggaatgggaaggaaatgaagcgctgaggtgggaattagtacacgcttcctctggggaaaagacatctgctcctggcactcctcaaaggaggtgatgcagagctctcccttgacgctgtgctgcttccctaatccattctccaggctgggtgatgggacctcttcctgcaggggagagcctgccctggctcccagggtcaacaagggcagcagcccccggcttggaagcctccctcctgcccctccttacacacgaaggggcagaagggctctgggcacaagcagtactttggtagaaaatcagaaggccctcttacatccccgggggcgccatgaagggacttggctgctgccagcccctcgccaaactcctctgagtggtccaggggataaggccgacacgcccctcccattcactggggtgtggtttccagcacttaggacattccatgtagcttctccaacaggactcctcctccccacactcaaacccaaaggaccctttcataaaccagatgatcatttctggaaagttacatttcttaatttcaggaattgttccaattcgtgcaaagaaaataaaaggtaattatctaattccagtaaaacttaatggggcccttcccacccctggctaatggttggtgtgaaatgtaatttgacttaaactgtctaaggctgtgaaagtgtacaatattcggaagggtggggggcattaccccttgtgggagccatatttttctagaaggcattttgatcaagacaggcctcccgcggttattgatcttagggtcattgagagtccaagaactggggagatgaaggccacccggcgtcagcaccgcgagggcggacggaaggcgggcgctgagtctcccattggggttctagccgagggttccagccaggattgcgtgatctgggggcagctcggagagctctcccgacccagtatcgggtctataaatggagataaagatcagcacctggagggagtggtttctcgagggctgagagcctcgcccacaaactgtagtcagcatcttcactraagttggcctgtcttggatatttcttctctcctccccttyccccacctcccctcctaattcatcaactgctgaaacatctgcctggctgaaaccgccttctcgccgcgcgmtgggggctgtccccaggtgttggtctttgtgtcgagaaaactttgcgaggaggcgagggagctggacaaagagcgggcgagggagggcgtttgccagcctgaggggtgmgccgggcggtgcgcgcacttccctgggctcagctccgtacccggtcgctcgcggtggccagagcccagtctctctaggccaggagtggcgtccggctgcatccccgcgccctcgggagctgaataaagccaggcgggagaagcaaaggctagcgcctggacgctggagttggtgggaggaggcgagcagaggcgcggagcaaagctgtcaaactgcgcgcggagccgggcgcggggcgggggaagggagaggagggagggaggggcaggcgggagccgggagggagcgagcgggctcgccgcgcctgagcaacccctgcctgtcgctgccgctgccgctgccgctgccgccgccggcccggactcgtccggagcgcagggtgtctgcccagctgcgcgcggcgcgcggaggctccggcgtccgccgtgcgccctccggcccctgctcctcgcgccggcccgcttgggtcctggcgggcgcgaacccaccatgcagctgcagttccggagctggatgctggccgcgctcacgctgctcgtggtcttcctcatcttcgcagacatctcagagatcgaagaagaaatcgggtaaatagctgctcccaggcccgtgccacgagccctggcgggatctctccctccttctgtactctccaccctccgaccccctttgtgtgcgccgcgccccgctgtagctccgctggagagatggggacggtttggcagaaggtggcggcgacaggggcccgggacggtttggggagaggagggtgggggcgcggctgctgtggggtgtccccgggcggggttcacgggaagcccccagctggcccgcgtcgggaagcggactcgcccaccctgcccccctgcctggcgtgtccaagcgcagtgtcgccggggtcgagggagggcgccggggagtgtctcgggcgggcggaggggccgagagtggagggaggcaggagtttctttgtctccagcacggccgctttctcgccttggcaaagtgggcagggggcgcgcagggatctctgagctgggggaggggttcctsgggccggagcggagggcggggttctscatgggctactgggaagcggaatgtcccctgcacacacagacaggcacacgcgcctcccgccggcccgggagcccggcgtaggagctggcaccactagagaagggctcgcatagctggactgagaccccccgccctcgcctggctttggacgttcagccaagccacggcaaccccggcgaccctgggttcctgtgcgctcgcagcgcggagacggagacatttcgggaaagtctgtaccgccgcccggtgggcttctgggccctcaggcgggcgatctggcgctttttttctcccgacctcgccagaggtagggtgggaccgcgagcccggatcctcccggctccggacttcctggagtgcgcacttgaggcgcgggacgcaccggctgtgtgtcccaggggctgagactcgcgccccgccccgcagccttcggctcgccgggccgggcccctctccrgaacctccaaagggcggtagacgacaggtggggaggcagccggggttctgaggaggcccgaggagagcttcctggccctgggcaaggggaaggtgaggtctcaaagagggcagaaggtctcttcttctgtgggatttgtgctctgccaggcgctcttctcgagtcccgcgccgcgtgcgcccctcctttgtcccatttgttacttcatttgttatctgtgctagttgagggtccgccacactgtcagtccctcaaatgggagatgccagtcctgggcccaggcgggatgccgaggccccaaggacaaaaacttgtgacaagtgccgcttcctgctctcattttctccctgcccctgcccatctccctggaattccttctgtgaactccgctgggcttccagaacccctctccctgcctctttctcctctcattctcggtttccccaagagctctsaaaactttcacaaatgctgcgcagttaatacacaacgtgccaccaattcccacgcagagataaacatgctacttttcatagctgctcgcctcaraaacgtggattggaaaggaaatcgggcaagtcacgtcttggggtaatggaagatgcggtgaggagggccttcctctaggctctccggcttctgattccggatgtgggcactgcccggctcagatcacttgctgacctttgcccatgtgagagggaaggcccggcgctgcccattgtcctgttataaaaacataagtkctgtgcttatccaggcacccctaggtcagccattcactgaattcttaccaaataccttccacatgctgggaacttttaatttttaaaatgcaatcaggagatcactttgcacataatgttgcactttcttgccaaatgcacggtgaagcctacgctccccacatcaggttgttcccatatatgtacgcaccccggggacttgtctcacttgagtgctccctgcttctttttatcctgtctctgctgggccaatcctaggaaaaaacggtcaaacaagtacgatgtgtcacctcctgtggcatcttccttccctctcttgcctctcgtcccaggctgaccactggcttgaccagtcctgaccaggcctaagacaccctctctcccaggctgatgtagctgccttaggtcaacactgcatatgcctttcgactgggatgggcactcttgccccacccacggtcagccccacacatgtttaatccagaggaatggaggcatattttgggattcaccatggctggaggagtaaacacatgggcagagcatgggaatcccaacagcaccttctgtctgcttacaagtgaggggtttctttttgtttgtttgtttttgtttttttttttgtcttttctttttttctttttcttttttttgagacggagtctcattctgtcgcccaggatggagtgcagtggcacaatctcggctcactgcaacctccgcctcccgggttcaagcaattctcctgtttcagcctcccgagtagctgggattacaggcacctgccaccacaccaggctaatttttgtatttttattagagacggggtttcaccatgttggccaggctggtctcaatcacctcaggggatctgcccacctcagcctcccaaagtgctgggattacaggygtgagccacccctcccggcacaagtgaggttttaacactaaattcattcttggaattaccccaactttgggcagctgggctcagtgcccaataagagccttggcacagtggccagtgaggggcgtcaagagggctccgccttcctcaccatatgccttcctggagacctcgaatcatactcaggcacaagaggcttttgcaccagccctgcccctccatccccaactcactccggacctgtgctagggaggattacagatgatctgcgcgtgtcggcccctgggagaaagcgatggctctgtaaaaggatggctgtttctggaaagtaatgaacagtgggaccctgtgatctgttggaaggaaggaaagatagaaggaacctcttttgggggtaactttttcaaggattaaggaattttaaaaagtgaaagaagaaagtgaattacatgtgtattatctggagggataaaactgagatttacttttctgaagcttttgattctcttttttttataaaatgaggcttttaatgtggtggtctcagaggtcctgtcctgcctgaaaagttatacatcatgaattgaggggcagggctttctttgaggggagttttctgagacacacatctcttttccttagtgattattttccaaagttccatttctgactctcttgctctcattgagctggagctgactaagaaaacaaaatgtagaaagataagttctctgcaaagcacctagagagtcctgcctggtagccaaggagtgaattcaaattctaagtcagaaattgggtggggctttggtaaaataggccctgatcaattcatgcacactcccaagttttagatccaattcgaccaagttgtaagctaaaatcttctgattgtttcttggccyttaatcttgagtgtaacttccactaggggattgtgaggcgtagctgtcttgcccatcatggtgtccatggaactgggcacacaaggcattcaataaacatctgttggataaatattttcctgagtctggcacagtgatgggcacacacagcatccttgggcaaagttgaaactcagagctggccgggaacggtggctcacgcctgtaatcccaacactttgggaggccgaggcaggtagatcacctgaggtcaggagttcgagaccagactggccaacatggtgaaactccatctctactaaaagtacaaaaattagccaggcatggtggcgggtgcctgtaataccagctactcgggaggctgaggcaggagaatggcttgaaacctgggaggaagaggttgcagtgagccaagatcacgccattgcactccagcctgggcracagagcgagactccatctcaaaaaaagaaaaaagaaaagaaaaagaaagaaagaaactcactgagccttgggacaagaagagagcatagggctctccctgtagaaacctttcctttttatcagctagggtgaatttgacactgagaaataacatcactaatctgagatcacagcctggctggttaagggcagagcaggcttgcacaggtctcctcttttgtaacccaatgtcctaatcctcatattagttcctctacccataaaggaattacagaaatcttgttaaagagaagttgagtgactagtaaagataacaatagcaattatgacaacggtgaagatgatgatcacggttagcatttactgagtgcttcctaagagctaagagctactccaagtgctttatagatgttaacacattccagcctcatggcaatccagtggtcacctgccagtggcactgtttgtagagctctgtgagccagatgctaggctaactgctttgaaacacatttgctggatcctcaccagaaccctctaaggtaggtaccatttctatccccatttattgatgaagaaaccgaggcctggagaggttgtataccctgctgataaacttgtgataaagcagctctrtggaaggccgaaacccatgcatgctcttgaccattgtgctagactgccctgtcctctgagttattttttttaccctgagctaataatgttaacgaatatatctgaagascaactcatccccagtggttcttctaaaggcccagagttttcctgagagcctggtctggccttagtagtttctccatcagtcatttagraagacagaaggtgaatgaggaggaccagaggaggactctgagcacatctccccaaaatgtccctctagtccagctaagttcagtgccatgctggaggacagaatggcattaaccccaacctgttacacraggtcacctgccataggtatgagcattccagactctgaggtggagcctggggctaaagtgrcaggaggaaggaaagctcctattccattgcaaacctgattctgatgtcaatcaaaagggcctgcctcgatactacgtgctgtatatttgggcatctaggtgtccggagcaggggagatagtaaagatatttaacaactgctccctctccagcaccaacctgttagaatggacatctgacccatcagaactgatgccatccagtacacmacggccaggggtcctagtgcacctcagccaaacaccaggccctgtctgggaaaacactagacaaggagaggctagctctgatcatcagccatgacgagatctgtgagcaggcagcaactactgccaacagccaagagtgaggtgaggtgaatcgtttagtggacgagtgcacgtggatgggaaagaaaatgaccttgagcagttgcagtccaggcactctgtaagaagtacacgtttgctcaacacgatgcatttttttttaaaaaagcccattcttctccctagtactggtgtacttcactgaagtataagcatgattggaagataaaataggagagaaagatctggttttaactcacttgctccaagtccttattgccaactgttccaaacatcacatttaaattgtaaatagataccatcttagaaaccaattcaccactcagagcctctttccccctgtaaggcagggttgctaggttttaaacatgttttaggttttacaaattggaaatgttgtagattgcaaattataaatacttcttcgagaggggattctagaaaggctcccattgcttttagcagggcatacaaagcaacacatcatctggtcttttgcctctgtctgtagccggcctgggctccagccatttttgtattgcttacaggttccccaaaatgtcctaggatttcatacctctgtgcctttgcacatcccgctcctgctctgtggaatgccctccttgcrcacacaccatccttcctgctgttgccctgctcctcccaggcccttcctttctctcactgctctgtcttcttccaggctaagatctggtatctcctagaccccgtccccttccgagacatctgcattggttgcccctcctgtgtgcaccctagcaccccatcatgcagcaccccatggacatgcatttcacaattatattttatttatcctttatctccagcccctggtgatacgtatatggtttagtaaatgaagcctattaaatattttttgaaggaacaaactctgaccgaggatatgccaaaaataagcattcagcctctctgctcccaaaagtacatactattctaacaacaattaaacaccctctgcttgatctggaagccccctgcttttcctgtgtatctagcgtggagggtgcatcccagtgaagagcacagtctggctatracgttattcaccattgcggaatgtttggggccaatggaaataaaagctgctttctaatttgtaaaagcagaggacccagtggtgtttgccccctgccagtttaggtaaaaaccaaagatctagagcccagatgccaagcctctgccggctgttggttctccagagagccctttccagccctccactgcccacrgtgctgctgaggctgccccctcctgcctggaaggacagccggccccgtctaccttaatccccttcagggcttccatagtggcgttgagagcagaccaggaacgcagggccagctgtttccgtgcaagggctggtccccaggtaggatgctggaaactgagtgttagagacgttgacagtaagaaatgtgaggtcaggtcgggatgtgtcatctcaaagattttcctcatgaagcaccttctagtggtgtttttatttgaaaacactggtcaaaccagtgaatcctcatgacgggtcaagacttggggcagctgtgtggatcctagataaggtccggagcctcatctctctcagctgtctcaagcagagatgagttagagacagttgggaggatacagtggaaacggccgggggagggacaggaacatgaaagccaccagctgggtgagtcaggtggctatctcctgccagggcgtggggacaagctcatcttccggagaggcactgtggggtgagacaccgtcgcctgtggccggccggctgaccgcccctgggcttgcttaccatctctccagagccaaggctggtccttaagcgttgagattagtcactctcttgggtggcatctgggctggttttaaattctctttagtctcctgcaatttatcacccagctaggaagctgcccggtgtcctracgggacctgtgtgtcccatgttttctcagctttggctgtcactgacttcgcgacgatggcaaggaggaaacggctccaactggggagagcagcggccccgacacgacatgtgtctgtattacacgttggcagtcgaggttcctcctgacactttcaagcacttgggatcccrattcactcccctgggaaatccagcatccmgcctcgctgtgtgggtgtgcctttgacttcccaaactgctctgcaagcatgaagctctcagctctgtccaagggtttcccagtgccttttttttttattattgaaggaatgcrgagggactcagctttgcttcctggaccttttttaagrttcagggaaacaattcctcctcctcctcctccagcttcttagttgatggccaaaggatgaaagaacccctaggtcagtggttcccaaatagtgagccacagakgagtggtgatctgaaaggagccagaaaaaaaaaaaaaagtgcaatgtagccatgattattaatagtttcaagttgccagctgccattgcctgaaaagaactcttctatattctgagataatgttcctttttcctttgggatactaagatgtcctttcttttatgaaagggagtgatggtagctatgaaattctcccttggctgaagagggtggtaacctcatgagtccccacccccagtgttttggaaatactatgggtccttgaaatctgattgtctggggtctggatccacaaggtattctgaaaagctcatttcaggaagtagcctcactcctcacatattttcttccccatggaggctgatgccagcagagaataacaacaaagtcatattttgtctgtgtctgctggggtccaaatgattttctaaacactttagctgtattcacacctgtaatcctcccaacagtctgaggaggtctatgttattattatctcccttttacagattagtgaactgaggcccagagcagttaaataacacagctagtaaggtgcagagctgggattcaaacccaggctcccaggaacaaggataattctccaaaaaacgatgtcttaaatgacatccagtggggaagagatgcgtgcttgtattttcaaggaataagccttggaaacacaaaggtctgtgggagagagaaccctgggatgtagcgatgctgaaggaaacttaggggatagcatgttggagcccaggccataatgggacatggcagccaaaagatcagtacaatttagggttgccagttccaaaacaccttaatgcggaatgacggccaggggcacaccgctctgcctctgcctccccacatttcctctcctctcacaccagcttccccgcacggagtctcrtcagaatggctccggagcatggcatttgtttgaccatctcattaccagagagagagagagagagagagacacactgagagagaagagaaaaacaacacaaatgatcaaggcctggaggaattttcttctaggggaagacagaagagttggtgctgtcagcttccccaggtcagtggagcctgacaaggaagggaaggagggagggagtgagtgacggagggagggagcccttcggggaggggccaggcttaatgcaaggagatascacatcccaaggagccccctttcctackgtaaccacattctgctgagagctcacatgtatcacctcactcaaccttcccaagcaccctgttagtccatttgcagatgaggaaatggagactcagagaggtctcgggacttgctaaggtcacacagctagtaaacatggagctgggattccacccaggtttgcctgactccatggtccatctggtcttagccacttttttatactgaggttacctggctgctcacccccattcctcatgcctcctgccctgggcctcctacactttatcccgttttctgtaccatgcagagagtttgcacaaagatgctggaaacttttgagacgatagaatagactcatcatgtcagatagcttcgcgaacacaatggcatctgtcaccatcgggcacaacacttcagcggaggctctggaagaggcagacatacctggactctacctggggaggtgtgagcacttgttattgagcttccccagttctaattttgaaaatcggctgcacgcggaggagtgatacccagggttaattcacgccttcttggtaactgccagagtagcttaataatgaaggcgggaggcataagatgtctggagaaagtgaattagtaaattgatagggcaggtgactttagtttgctattttcctacaagcagtaaaggccctcctactgcatctcttgaggttcccacaatttgggatttgactttaggtggactcaggatgatgcccaaattgtatgctaatcaaaacatttagttcccaggagaagcaaagagaagggcaagagagaaactccccgtggtgttctgtcttggcccgggcagggagcctcttaggccggctggacacaaaggcagcaacgtgctgacagacggcatcccaaagaaagacctgtgatggcccagccttggtagtaaagccagttaaggctccacaggcccttccccaacctgccagaactgcccaccataccatagctctaacctccagcagaatgccagaatggctcacttaggtattcatcatacatctctccctgctgccaacctggggccttacgtttatctgtaaggactgacaagttcttgccagagctggattcatggcatataattcaggacattgggccagacctttggagcaactgagagctactcttggaagattaaggctccagtcttcagtggaacacttattacctgtgtgagttcaggcaaatgacctcacctttctgagtctcagtttcctaatctgtataatggggttaatgatacccaacttacagtgttctgaggattaaataaaacacaaatggtgggaatgtaaaatggtacagctactatggaaaacagtatgacggttcctcaaaaaatttaacgtagaattaccatatggtccagcaattccacttctgggtgtatattcaaaagaattgaaagcaggggccaggtgtggtggctcacacctgtaatctcaacactttgggaggccgaggtgggtggatyacctgaggtcaggagtttgagaccagcctggccaacrtggtgaaaccctgtctytactaaaaatacaaaaaaaaaaaaaaaaaaattagctgggtgtagtgctgcatgcctgtagtcccagctactcggaggctgagacaggagaataggttgaacccgggaggcggaggttgcagtgagcctagatcatgccactgcactccagcctgggtgacagagcaagactccatctcaaaaaaaaaaaaaaaaattggaaacagggactcaaacagatatttgtacacccatgttcatagtaaccttattcacggtagctaaaaggtggaagcaacccaggtatccgtcaatgagtgaatggataaacaaaatatggtagatgctgggcgtggtggctcacccctgtaatcccagctcttagggaggcacaggcaggaggatagcttgagcccaggagtttggacatgcctgggcaatatagcaagaccctgttcttaaaaattttttttaaaaaggtatatccatacaatggaatattattcaatcttaaaaaggaaggaaattctgacacaagctataagatgggtgaactttgagaacattatgctgagtggaataagccagtggccaaagcacaaatactgtatggttctacgtacatgaggcatctggaatggtcaaattgatggagacagaaagtagaatggcggttgccagggtctggggaaggagaaggggaatttgtttaatgggtawaaagtttcagttttgcaagakgaaaagagttcagcagacggatggtaatgatagctgcagaataatatgaatgtcttaatgctactgaaccgaacacttaaaaatagctaagatggtaaattgcatgttatgtgtattttcccacaattgaaacacacacgcgcgcaagcagccagaagagtgcctggcaggtgctcgggacacactgacttattttaagagcacagttgtgattttcaacaaagcaacatcaatgtgggtattacttaattttaaaaataatacaggaccaaaaagcagatacaggggaaatggagggagaaaaggggggaggtgtggctatagacacagaattagaaaaatacaaatcatcactttgttgtatgtttggatacacaagctggaggtggcccaaatacccaacatctgggatttaggattgtggaaagtgcaagcatacttttgtgtggccactctgaattcttgttggctgccctgcccatctaagtttagtggaggggcccataaggttttgccaaagcctaagttgcaaggagggcccagagtgatgggggagagaggccaagacagtccagaccccctccctcccagacgcagcttccagaagtccctttctttatcacctgcctacgggtggcctctaaactgtttctggctcaagggtgaacctgaaaagaaaagagtccgagatactgatcccaagatttggctcctgctgagctgggaagaggtagggcacagctgtctcttcccttttaggctctctataataccacaggaaggagcaagtgaggtggattccaggaggcttgagatgccaaagccagttctcagacttgagagagcatcacaatcacctcgaggatttgttaaaaacagaacgctggacacctcctggagtttctgtttccacaggcctggggcagggcctgagaatttgcatctctaacaggttccaggtgatgctgacactgctggcccatttcaggaccacactttgagaaccagtgagctagagccttgtcactcggtgtggtcctcagaccagcaacatggacatcatctggatgtttggtagaaatgtagtgtctcaggccctcctccaaaccctagacctgccgaatctgaatccgctcagtaacaagcccccaggtgaagtgtatgcacactttgctgggggaatgattggtttccctgccttctrcagagcgcctgccctaagcagtgaccttggcccatcacaccaggggtagcctgtcagtgtagctccactgcccatcacagagtcagcctagagggacctccaaatggatatcagaaaaatgaataatgattcttggccaggcacagtggctcatgcctgtaatcccagcactttgggaggcagaggtgagtagatcacttgagcccaggagttcgagaccagtctgggcaacatggcgaaacccatctctacaaaaatacaaaaattagctgggcgtggtggtgtgcgcctgtaatctcagctactcaggaggctgaagcaggaggatcacttgaacctgggaggcggaggttgcagtgagtcaagatgtcaccattacactccagcctgggcatcaagaatgaaaccctgtctcaaaaaaaaaaaaaagaaaagaaaaaaaaaaacactacaaagaaaaatgaataatgattcttattacagccactggttggattcctgagtgtatgccaggagctttttatacattgtttcacacatttattataaaacccctgcaacacccattttacggacaagtaaactgagactcagatagagtgactgcttaggaaacagaaaaagaacttaaactgtgtggcgatctagctggctgttttccaaggtgccaggggtttagcctttagccattagcatatttctcttcctttgtcctcccaaatgaggcctgaggcataagatgaggagagcagagatcttaaccgagggttgaagtgatttattacataagtccaaggaggatacagtgtgtccagaaacaggcttgacccggtgctggagcacttgaaggaaatttctagagaaactggacagcaaagcgctcatcagctgtgtcattaagccctccaatgagcttggctgggatgcgatctttcacacagcacagggccccacttcacagttggcgtatgcagtcacagttccctagagttctgggggttcctgagtggatctggtggcctgcccagcctgcggtccagttccaaactgcactctcagttataaaaagcaggrgaatggagagggaaggcctctaggggtgatggaaggcaagtctaggggagccttttaaaaccaatctgctcttccagataaagaaagtctccaagcaggctggaagccaagaatttaattgtatttatttttgctattaccttctatttagggcaagggatattggtattctatctatggtagtggtataaagattccttttgtgataaattcatttaagtttttaagtgagtcaatttaaaggaaagtattaagtcartaaagtctagttagcaaaacgcatgaaggtagacccggaaaatgtttgaagtttatgcaatgacatcccagcctttcttctccccgatagtcattatctgccctggatggcagcaaactcatgactactccttgcaaaacttctctccagagtgactgagttaatccttcagaaagtacctacttacagaaaccatttataactgtgtctggaaacggcccagcacacaacaaaagaatccttgaataaaacaaccttatgaatgattcaaacagtgtccaacaaccctcctccaagagagggtggtcccaccgagaggggaggatgccttaggcccaagaagacctttcacccctgcaacaccactagattagaccctcatctcaccatcctctgaagctccctrcctctctctggcacatctccccacaccatgtttgttgcatggtttcttgcctgcttgttagcttgtagctccttgaaggctaggaccgtttcagatgtgtgccccgttgtacttccagctcctgctacagtgcctggtggaaagtaggtgctcttttggagaaagaagggaaggaaggagggaagggatgaaggggagggagtaagttccttgagggaggctgagataggccccagttactgatattctaggatcacttacatatttctctctatggccaaaggagaaaaaaatgtggtaggggctatattagctccctgtgcaattgtctgatttgaaatccactgagttccattttttttatttatttatttatttatttatttatttatttatttatttattgagatggagtctcactctgtcgcccaggctggagtacaatggcgtgatctcagctcactgcaacctccacctcctgggttcaagcaattctcctgcctcagcctcctgaatagctgggattacaggtgtgcgccaccatgcccggctaatttttgtattttgggtagaggcggggtttcaccatgttggtcaggctggtcttgagttcctgacctcatgatccgcccgccttggcctcccaaaatgctgggattacaggcatgagctaccatgcccagctgagtaccgtcttatttagagaagacacccactttcatttttgcccctcatttcatgrggaaagaccagcccacagtttaagtaagtattcctaacaggcgaatccgcagttctatatgggctctgaggtctcgtgcacagaagccaaaggactggagggatgtgaccagatttgggaatcaggcaagctggctccaggcaggctgagatcaagctgataacaaggagattaatgagggcctgcaacctcctcagtcttgtattagggaggagggttttcaaatcaatgctggtctggctggcttaatggtacctaatcttaccttttgaagctcacgcatttgggagttgagatcaattgagataaaataaagtaaaatgtgttgactttgggatttgtrgtcttcatcagagtcccattgtgtagtgttgtttttattttctgtcttggaaataggcagagattagctgccggagagggttgttctgtctggactaggtggtctatttacttttgttctgcttttttcattttccgctcgatgattcttcatgagggaagggcccatttctttcctgttcatttctgtatagcgagtgcatgacacctggtacatrctcagtaactatttctcaaatgcagcattgcagcatcaccagcacagactgtgtgccacgagccaccctgctggaaaagccaatctgctcctgattaggtgcaaaaacagcagccttataaggcactcacagtgcccctggaaaaaggcgtcaggacggtttcctggtacctggtttctgtgatggttaccatgagctttgtgcagtcattgcaaagctgtgtgtgagcaaagtgcatccgatccattttacaggtgcttacaagccctgtgctgagtgctggcgactgaaaagatgagtacagcatagggaaggtgctcatggagtttgtgatctggtgggggagcgagttgtgtaatgacgaggaatgtgtctggaggtgagagtttcggggtctgggctttggttgtggatttgccaccaccaggccattgccctaagggcaggccctaacrtctttgggcctcagttttcgcatttataaaaagtggactcaatggacctacaggtcttcacttgctctagagcaacaaaactggagagctgtctcaaggagttttcctgtgcagtggagttcagcctcactggaaatagcaaatccatttgctgctacacccctaaattccttgccctgaaattttagagcagggcaataaataggtgttggtctattttcacctaccacctgctctacattaaaaagaaaagaaagctgctatatggcaagaggaagacaagctaatatactgggtatctgctctttgccaggcactgcatttgacattttcacatctcaatggaacgtcctgataaacttgcaggacggggagcaacagcatcgtcactgctgcacccttcagtccacttagaggaccrttgygtcacagcaggattggtgttcccgtcaaatgacatcctgtataccgagttttagaaaagcacatgagtgcacgtaacgggatgtagaaaagctattttcaagcatagttaaatgtggtgattttggaagccttcttcacttaactatgaggaaaattcattatcaccaacaaacatcttatgagagtagtatatcagcctaattgccatccctgacctcccatggtgagctgacgtgtaataaaaacaaaaataacaatagcgtgctcatagtactgctgattcctaccgtaggagctccaaagagggggttccctaccaaggactagggatgagagaaggcaggatttggggacttgaaggaagagcccaaggacttgagctggaaaaagaatgacattggtgacctagatggagagaatggccaggaccaagaaagtttcccatgtgcaaggaggagctgttctcacatttgtgacgcggctgccacagactctggcagtgcctagaggtggaggaaagtaggggaggacagagggcttggagccaggctgtcaagggctgaagaactcagacttgattctttgagggtttctttggtttaacatggggtccggagacctctaaagaatctgtgatggggttcagatccacgaaccccttgaaattgtaggcatttttctgagcagatggttcaaacatttcaaaggattcccaaagggacccacaaaagcttaagaggagccgctgtggacagttgggacccttgaagtgctttgaccaaaggtatgtgcagacgatgcatcagttgcttggagggggcaggtgccgggaagaccacccatgggagtagcattgagggtcgggcgggggtgttgaaaaggaagagggagttaggaagccatggttatgaagaagaaatgacagctctgcagcactctcgggacagtcagtaacagctgcatgaacaactgagcccactgtgggtgcaggacatcagaggggaagctgtgtgttatggtcctatagtgagtttggttttaaacatgatcattttaagaggctgagtttatctatgtggaaatgaagacaatttaaaaattattaagccaccacttactggagcaactaggggataagagggcagcagaaccacccctctttcattttataggtacagccactgaggccctgagataggaagtgacttgtccacagtcacctcaatggtgggcagctggggaccaattcgtaagagaataacaggagagaagttaggctggaggtyaggctagatctgaagccctctgggggagatggcagttgaagctcttagtgtagataaaatctctaaagtagaaaagaccccagaattaagcttgggtctttgctctgatttagagaattggaaacagaaaccaaggtagcaaaggccatgcagaagggcagtgagggaagtacgaggcaaccaagaggaagaagcaaggcaagacaggcaggtgctcccggtgggagggtccttacagacgagggcctcaggccaggttgtcggcagatccccagtggcatttgagagatacctccttccttggaattgtggggtgaagcgagattccaaagagaggtctctgataaaggggccagagagggcatactggccttgccggaggtgtgaaaaggaaggagaagtgggtgaggggtggaggcaggcaggagaataatattttaaaaataaaagagtgcatctgtaaaaataactaaagaaatgagaggagggaaggaaggggggagaggttcaatgatagggtcacagtcaggtgaaaatgagaccaaatggcagaggtggggaggggaagaggagggatgaaggttcagaggagagatgaaggggtgagcagggcctggaaacatggtaaattttaaaggagggaagattgggatcctctaacccattaggctcttcttgcctttcaagttgtggcccatgcagacctctctgcctgatattcttcccacagccctttgcaaggctggttccccatcttccttcagagttctgacagatgccatctcttgaaacagcccttcctgtccactccccagtatccatgcagtctggtatgcaccaccatttgcctctgtgtttttgtttttgttttgtttgtttgtttgttttgagacagggtcttgctctgtcacccaggctggagtgcagtggtgcgatcttggctcactgcaaccactgcctcccaggttcaagcaagtctcatgcctcagcctcccaagcagctgggattacaggcgcatgccaccacacccagctaattttttgtatttttagtaggaatgggctttcaccatgtttgccagctggtatcaaactcttggcctcaagtgattcgcccacctcggcctcccaaagtgctgggattacaggcgtgagccactgcacccagcccttgcctctgttttcttctcagcattgcccagtaatgggtaggtgtttatagctctgttcctttgctggctggtggggggtgtagggtggggaggggggtgagtgtgcgtttgtttcatgtccccaaatttctattttaagcaccttcaaactggagacaatttgtctccattcccactgcaaccctagagccctgctcagtgcccgttgcagagtaggtgctccatgatgctcgaaaaagaaaggcatgttaattgaaacaaagagaagggaaggtagaactcagccataacctatcctcctctcagaaaacttttaatcagaacagtaattacattaaaatgaaaatagcatctgccagctgttgatatgttttcattaccttttttactcttcacagttcacccttctgaaggagtgaggaaactcagtctgaatattctgcgagttaaggtggagctagggaccataccgaagactgtgttctcatttgccacctcattttatttttatagtgttgtatcaaagaggtatgtttgtcaagaaaacagggaagccatgtcccatttccctcctcctcccggccagtgggtgggtagtttccgcgcatcctcactgcacacttactgaagtactgccctattccagatgtgtcccgggaagccctttgtgtgccagggtgcttgacacgtgcatgtgatctgcctaggacaaaagggttaaatctcctgtccacttgtcaggcccctgcggtcatgtggagaagtcagcagggaagaattctctctgcctttggattcttctaatccctagagagcggcagacaatcccttttcactccggccctctttcttgcagttttctataagaaattgatggcaggagtgtggggagagggtgaggctctgaggcagcccccggtgtgatgccctcaatgacaccttcagccattgccctcagggcaccgtctataggcaccagcccagaccctgggggctaataggctgtgactttcatgtcccctccaggcccagcccaaagtgggagtctgtgctgatactcagggcaatgggaaaagcaaagaggaaaggacccattgattcttctttgtacctctcttctgtgggtgttcagaacacaagccagcctccccgccttctgcacagcctgaacgtcctgatggaatctgctggaaatattcaaagcacaggcccagaactgccaagaaggaaggcataggaataaaatcacaggggacaaccccaggtccctgcacacactccccttgccctgacctggcttcgtacctctgcctctcggatctgactgggtgaagctctggcgtctgtctggagtcaggtgtagtgacccaggtacattggctgcttggccctgtcctctggcttcccttgtcagtttgttcctgtgagactacattccagttttgactcatctcaggttctgacaagcccctaccccaacctcacctttgcacctactccccaatttggagacaatctgtcagacagaggtgtattcaaatcccgcctagagctccctcctcactgtcaatcttggcatgcgatgcttaacatctctaagtcarttggaggaagaaaaatgccgaactcatagggttgggacagggatgaaaagagtaaatccacagcagggactgccatgtggcaagggcccaggcagcattaactctggtaatgattactcttctcaacatccatccatccgagcaaggttcttctcatgcttgcatccagtcacctgattctagcatcaagctggtcacatccctggggccaccatcctctctatgacccgtcaccaccccacccgtacccaccacaagctatcgtggcattagttggacgcagccatttcccatgccctaartcaacatggctggagttaatttcttccaccctgaacacatatttgggctttcccctagccaatcaggaagtggctcacagggaggacccaagaggcagaacctctcctccgccccctttcctccccagagccctgggctcctaaaagagcatggctgggaaaagtggggacggaggtcatggctgatgcctgaagacacctggggctgttacccttccagaggccagggctggcttcctcttcctattctatctgttggtcctcagcaagcccaggaagcagcctcatcaagtgtcttaggaagcatagaactcctgaatttccttctcctaagcttttgtttctgaacattacagggagaaaatgaccatgcccctgggtgttcctcctactgcttctgcttgattttatcaataaggatctggtcagctgagactgagaagaggcaagaaactagcacctctgccatttccttagggcctgcagtcctaatgtacctggcacgggaggggtttctgagtcagggaagtttgtggagaaagtgacatgagctgaattttgctaattgataggacgagtctagggatcttaaacccaaatgcctttagggtccaggcaagtcacagatataagtgatgacgctcagtgtaagacagtagggagtagtgtgggctgtagaaaaatgtagcatatacaccccccaccccgcccccacaacaagaggacacagatacttcccaactccagcaatgactatggttcactgttaccagatcttctgactgtttagaaggagccagaaatgaggatattttataacgactagtctcttgagttttaaacagtagcctctgattttaaaaaggtcgaacatgcaagcccctgaacacatgtttaggctagatatgacccagggctggcagtgtataaactctgaagtcagcaaatgaaaaatagaacaagggattccagagagagggcacgatatttaaagacacaggcttgtgaactgagtcacgcattccagaaactgccccttggtaggaggtggatgtgtggaaaagaagatgaggctgaaggggcagttcagaaagggtctctgtgccatgctaagggatctgaacctcattctgaaagctgcaggggtcggtaagagagactgaagagtttaaaggagagagaggcatgtggcacactgcatttcggaaagctgtgtctgtgtagggagggctggcagatcagcagtctctgcacatcgcagataagacggaggcacaggagagattcatggcagagggatgagggcactggcactcaccctcaggtggacgagctcaaatctggaggctgggggacacttgaagggggggtgggggtgtggtgagggagagtggggagtgtggacatcaccctggttctgaatgaactaggggtggctgccattccctgagaggacaccgggagagacaggtggaaggggtggaggtgggtgggaggtgtgtggaggcagccaggttgtgctgtgactggagccgggagtgaggtgtccagaggcagatcagacaccgagggacaatggaagcagggtttggaaaaccggcgcgtgcaaagggcacactcacaccaaccccagcatcctgaggggctgggaaagagaaggtcaaagaaaacccggagaaagtgttgccagaggatgaaggaggcgggaagtctatggcctaaggggtacttcagggtcatgctcaggtcactgacagagcagagagaacgtgccgttggacccgctccaggagacatggggacatactgcaagggtctccctgccagggtcccgtcgggattcagtcctgcacagccccgtggattgtgggcaggccttgcccacctcctggccatgtgatcttcggatgtgcctcttgtgctgaagaaaaaaaaatgcacatgtccactccccagcaggccccgctctgaacgggcccccagcactccatccatgaaagctgcaggggcaacagcaggtgcctgttctaccacgctagcacgctccactttctctcctccactgattcttatttctccctaatggactgcactcttcaaaaccaacttacccaaggacagcttttccaaggggacttgtcaaactccacaggcagcaactggtttgttcctttccaaagggcagtagccatcaccttcaacaatactgcaactaacatccacctctgtccagtccttcttattttaatcctacagcaggaaccccaattgacagaggaggacatcaaaactgagagaggtctagggctgcaaaactagaacccatcaggaaccagaactccagtcccctctgccggtggtcccatccatcctccttccrtctgacaccaaggcttcctgagtggtaaccaccatggctgctggagcagaggaagtggccgttgccttagaaccaggcaggtggggaaggggacacatcaaatacccagaagaaaagtgacttcaaagtcctccccaaattgagtgccctccagaaattctctcacgaagaggctgcagctgacattcacagggatgttgtgtctgaatgcgggtacatcaggaagggaacaaaagagagggaagaaagcctggttgaaggcaggggtmtttcaagtcccctcgaggcagactcaagagcaaagcatggcacactggatgggcgttctgcttctctttaaagagcatggatttatccataccatgtgacatgaatgaaatgaggagttttcagggctgccaacctcttggttaaggttctgtgtagtatatttctcctacaatagaaaaggaaaaatgacatctgaggttaacaatgtatctgcagtgcaaggcccagtgactgtcaataatggacgctgartaactaagcaatggyggattgcatgaattttcatataaaactgctcctatacatcgctttgagtgtctgggtcacgccttatccttatagtgtaatgtgagcggagagtctagcttgaatattttcccacttagctaacttgccatctcacaactatttgctgagtaacccttgcttcctcttaattctctggggcctcctcgacatatatttaggcaggaggtgaagggcaggackcagggggccactttctgcaggcataggaggttgggcttcatgcagaccacaatcaaatccttgctctgctgctttgcttgctgggtggccctgggcaaatcacttaacctttttgagcctgggtgtcctatttccaaaaccaagtcagaaataagaaagttactatgggcctggcatggtggctcacgcctataatcccagcagtttgggaggctgagcccagaagatcacttgagcccaggagatcaacaccaacctgagcaacatggcaaaacccaaactctactaaaaataacaaacaaaaaaaaaatatggggcatggtggcacacgcctgtagtctcagctacttgggaggctgaggtgggagaatcagctgagcccrggaagtcgaggctatggtgagccatgatcacgccactgcactctagtctgggygacaggagtgagaccctacctcaaaaaaaaaaaaaaaaaaaaaggcttcggtagagtgcctggcacatggaggggctcaagggaatgaagttcttaatatttttaattgatgtcttggaatctgcatccatgtctaaggaagagacaggcaagagaatttttgtcctgtctgggacaagaatgatcatttgggatggtggaggcatcactcttacagagtgaactttgattgagggggagagaagctgtttagtttgaaaatatatatgtatatattcaaacggtatagaaaaactgtagaaagtaatgctgaacaaaatcttgttgggtgtaaatacagagaaaaatcacaatttttaattgtggcacctctgccaggggaacagtaggatcaaggaggaattttatgccattttaaatgaagtcgtaaagtgttgtgaggggatgacgtaaaataaaggattttctgggccagaaggctcttaaagatgccctggggactctaacccatcccttcatttgggatcctttgtcatgtctcttagccgcagcatgtttcctccagggggtgcccaaggggacatttgcctccccactcccagagagaaggtctctccggggccacgtgtgagccaggcagaaggtgggaaccagacccagggagccccagttcacctctccaggaaggagggagtggccaccctcatccaacaccgatgcggttccagccatctgggggctgaagaatgtcattgcaaggtggccatatcagagctctcttggtacagggacaggaacacaaaccaggcaggctcagaagaagcagggggtggagtgaggaaacagagacaactagtgtagacggacctgagaaagtttgcaaagagctggcgagagagaaatcgctgaggggaatatggacttctctgaatcctgttttctacaggagagggtcatcttcggtgatttgggctcatctctccattgagtggtcctctctagaacacactgggtgtgcgggaaatacaccctcccacagcaacgcagagatgagcaggacccgcatcctgtgcctggccatggtctggggasggggtgctgaagccgaacgcatagagataatggtggctgaatatagggggcacccttctgcaggtatgtccaggacgccgaggcagggtgagaggcccaggctcgttgtatagtagggagctccaaaattgggatgggggaaccagcaaaggctctatagccatgagcaccatagagaagtagtcctctctgcccacaacttttcactaggtccagttcaaccaacagcatacatatatgtattgccctgggttttaattgctttggtttctgggattttgagtgttaaggatttcagaatgcagcattatcttagaagtctgttttttgttgttgctttgtttgtttstttgagatagagtctcgctctgtcgccaggctggagtgcagtggcgcgatctcggctcactgcaacctccgcctcctgagttcaagcgattctcctgcctcagcctccggagtagctaggattacaggcgtgcaccaccacgcccagctaattttttgtattttgattagagayggggtttcaccatgttggccaggatggtctcgatctattgacttcgtgatctgcstgccttggcctcccaaagtgctgggattacaagtatgagccactgcacccagccagaagtctgtattttaaaggctgtctcctttataagatgggtgcagatcagaggacgagtcctgcttcagttggtagtccctgtttatgaatcctttctggttggcgtttctgttcacttggatgataagttatattgtccccccgccggttataggtgacccacagtttcattatgagaaagaggaaggatcaggaacgattgcagtgagaaatgcttggcatccaggtgacttgtttacttgcattttgatgtgcagatgcctctaagtacctttatgtaaagactagggaaattggctggaacataatgaaagcccaaagttctcagggatgttttctgaagttgagcaaaggagagagccaagggtgagctggtacctttttgtacaccaataaaagctgattaacaagcaaaagtttgctggaatcgaagcaaaaagataaatccaatcaagctaatrtttaaattgaaggcagaagggatggcaagaaaagaactgagcagtcaataaggagagctcaggagtcatcataaaaagagagacacccaaaattctccccattggcccctgcaacaccctcagacgcccaataccagagatggcaactgtcatggaaacaacactatcaaggctgaaaccagcataggtctccagagctgctgtgcccagcggtgtctcagtatctatgaggttcaagagcttcagtacaaggctaagacttgctgtataggaaaagtatctcaaaggctgttgagcacctcaataaagctattccgcccgtcttggtgagcaagaagctgtgtgtgtgaaattgggggacagtaacaaactggaagaaggcatgaatttaaatctaactgggaacacatctaaattgggtgcaaagaccttactagaagtgctgcttgctgtctgtgatgttgaagctgctgcaaggagccacctatactgtcacaatgggtcctggctggcaatccaaaagtatctagccaatgccagctttcagcaaggtccatggtagttttcacagtggtaatgggccggcagtgcaggagttcatggttctccctgctagaaccgtaacctcaggaaagccgtgctttaccagaaggatgtcatcaggcagaaatatggcaaagattcctcctagtgaggacaaggggtgttttgcttttcacatcgtagagcaggaattagcaaatattggctcacaggtgaaatccagccagctccttgttattacatggcttgtcctccagccaaaaatagaaaaattcaaaagaagaataacatcagtatcaaatgatttacaataaatcaaacactgttcttactctttgcattcattagctcatgtgatctttacaatgaacccatgaagtagatactattactctatagatgagaaaacagatggaagcttctagataggttaagtaatactcaaagatcatacagataatgatttgttcagctataattacagacccagcgagtgttagctccgagcttactctcttaacgtgcttccttgtatgaaaagttccccagtgctttaaaggtagaaggtaagttcctaaagagagattcaggtatcacattctggtgtgttcacaagagggaagataacagtgtctcagagaaccaaggaaaggctttgtagaagaacgaggctacctttccgtcatgatggctggaataataactttgaatcctaattaagcaaaatcatgtgccctcccccacaaaattacattattctcattaccaggcctagtgaagttttttatgacaaaaacgtggtctcaattatgactatagcttaaattttgtcaataaattattggtagaaacttattttctctcttgttacttaagtacctgcatagtaccatctgtttttcctcttgtcccatacagcctaaaatatttacatttggcctctttggaaaaagtttgctgactcatatcctagagaatacagaacactggagctgctatggaatgtgattagaaagcctgrctgtattataagtagtgaatggcatggacaatagcctctagttcttacagttcaggaaatatgaccttgatgttcaagcctccagatgtccttagcagttacatcacttctgaccagctggtaggcaggtacaagtccttcatcaaggactactcrgtggtgtctactgaagatgccttggaccaggatgaccgagaaacttggcagaagctctctgctagtgcaggttatatccatgtgacagggaatcatctccctgtgcccagccggaaaggaactaccaagactacagacaaggactcgggcaactgcctcctactcaaggtgaatcagacagaccccatgatggaatctcttcaggagtgcaaagtggcccaggccgaaggatagggcgctatttcccactgtgttggggtgactgaagattcttgcattgccaaactcatggtgaggatctgtactaggtcaaccaaggctgcggccccttgcccatctaagcacttggccaagtacagccacctcctcaggtggaaaagaagatgggtagcacctttggttgttctgcagacaacaaattcaaaaagctcctagccaagtaagttctggggcaggcgagtgcctgagccagtcaagcacttgtcagctggtgggacctctactgctattctaatcatctgtgctcaagactctagacactaccactttggaggggtctttccttgctcatctctgtgatgttctgcctccttagaactgccgtatcaacttctgcatcaaatgccacatcttctgatacgtgctgtgtgtcagatgagaccttgaaaacatatgctaagtgacagaagccagacacaaaagaacaaatagtgtgtggttctacttacataaaatagctaaaataggcaaattcataaagataggaagtagatagtagttatggggaaaagatgtaaagagggagagtttttgcccaaagagtgcagagtttctctttagatgatgcaaaagttctggagacagatgatgcttgcacattatgaatgtatttaacaccacccaactgtacacttaaaaatggttaagatgggccaggcgcagtggctcatgtaatcccaggtactcaggaggctgagacaggagaatcacttaaacctgggaagtggagggtgcagtgagctgagatcacgcccctatactccagcctgggctatggagcaagactccatcttaaaaacaaatggttaagatgttgtcttagtccattttgttttgctatgacagagtatcacaggctaggcaacttagacagaacaaatttatttctcatagttccggaggctgagaagtccaagagcaaggcaccagcagggcagggcccagtctctttgcttgcaagatggcacgktgagcactgcctcctccaaaggggaggaccactgtgtcctcacgtgacagaatggcagaaaaaagtgaacccactcccaaaagtcctctttatagtggcattaacccattcatatgggcagagcccttagacctaaacacctgccattaggccccacctcctaacactgttgcattggaggttaattttcctattcgaccataaattttgaagggaacgaaacattcaagcatagcagatggtaaatttcatgttatacgtattttaccacgattttaaaaattgggattcaggggaagaattcttaaaagccttcgaccactgttgacagccctggttgtagtcatgtgactgaccccaagtcatcctgttcctcacttttctcctgtccatgtgtccttggagtttgttcctgggctgtcaacaggcataaacctcagtggctttaatgtgcaaattgaaaaaaagcattcattagtctcccaaaaatgtgaaggaagaaccatctgcaaattcatgaattgtgctttagtttcatcttctattctcaagactaatcacctgtttaagttggctctagactcttaattaaaattgtcagctcctgaaagttcattctgagcctgactctcccatgagaaactgtaaacgtgggaaattctaacacagctaggagattccaacatactggaccttaccttacctataaataactgggcttggtgyatatatcaaaatatcatgatgtaccccataaatatacacagttacgaattttcaattaaaaaattattaaaaatgaaataaaataaacaattgggcttggatgaagaggctaagcaaaaatgcagttttcaggttttgctacttgcttttcactagaatagatccagctgtgtgtggtgtgattttgttttacatttttttaacataccatttttatttactatcatcgtttactgtgtacattctactaggagagaatataatgtccatagtgtgaaaaaaagtttgacattctttttttttttttttgagacagagtcttgctctgtcacccaggctggagtgcagtggcaatctcagctcactgcaacctctgcctcctgggttccagtgattctcctgcctcagcctcttgagtagctgggactacaggcgcacgccatcacacctggctaatttttgtatttttagtacagatgggattccaccatgttggccaggctggtctcaaactcctgacctcaggtgatccacccgcctcagcctcccaaagtaaaaattgacattctaaaatgtagacctttaaagtcgtcaacctctacccttacaatggttgagaatattgcagcagggtcaaatggacagttgttattactagtattataccttattctatagagttctttatagtgtgcaaaaagtatccccatatgttttctcatttggatgatctaagcatctctgtttctacaatttcagcactctataaattatctttagcaaatgtttcttacccgatcatcttctatcaatcaaccaggcaggtatcagcagttccccatcgcaaggaatataagcttattttaataacatttgaggcaaaacctaattagaaaaaacaaatccctcatcaattcctgtgatttattctagagccaaacatctgcagcccagtttctttgaatgatggtcttccctgttctatgaacaactgagaggtgaagcagtgtcttgtacaagtgtaaataatgtgcrggaacacagcacataaactgcagggacgacttcagaagaaaacccccacttaactcttgaagcctgatttgcttcactgagtcccaatggggcaaagcactgtgcaaggctaagaaagtgaacaagacaggcttctattctgttttactgtaggttctgttattatttaggtatgtcaaggccaacagatgaagcaatgactgccacgaagaagatagtttgttatactcacatcacggggctctacacaaggagatactggggttggtctggaggcaggaggagggggaaactggtaagagcctttattgtggtttgcacaggaaagaatgggcacggtggggccagagcgggtctaggattggctagtttgagtaacttcagcaggttctgcagggtgggagctgtcgctagttgcatggtacctagcctagggtacttagggtaggggaatacctggccctacaacagggcaggggaatactggcccccagtaaatgagacagtaggggtgtggattcaagattgcaatttgacaggagcgttcccaggaagagtcgtttgctgtctctagaaatcagctaaccctgagaggggcagtttctccagcgtcagaaaagccccagatgtcaaagcattggaatacagaaaataaaagacatggttaacacgccccctcgaggacttacactttattgtggcccgcaggaggaagccgaacctggcacacaaatccccaggccttggtctctttgactgtatgaggaggagttcgaattgtgtaaatgacaagattttgtaaagcctcccatctgtgattccatgaagtaattaaatatgagaagaaggtggcaaatgctataatagaattgagtgctttgggaaaaaaggaaatggcagctgagaattgaaaattgggatggtttggaagggaggcaccgatgctgggttagggggtttgcatggaaagatgatgtggatgggcgggctggtggaaccgggggtgaggcatgggggactcctcttctgagaggcaccaggcagaaaacaagagttcaccggcaaagaaatatctccaccaaaatatcgagtgccgaggttgagaacccctgagtttgagtaagaactggcatggaaaagtgcatggatttgtagtatcccaaatcagcgagatttgagttctccaggacctggctggaagcaggaaaagagaaaggctggagccagctatttcaaggcatttggtctcctccaagcctggctctcagggactgggggtggggctgtgaggaggggaggtattgggcaaagtgtacaaagtttcagacagaagaaataagttctagaggtctgtacagcataactacagttaataatactgtattgtgtacttgaaattgctaagaaagtagatcttatatgttcttaacacaaaaaatggtaagtgtgggctgggcgtgatggctcacgcttgtaatcccagcactttgggaagccaaggcaggcagatcatctgaggtcagggggtcaggagttgatcaacctggccaacatggtgaaaccccatctctactaaaaatacaaaaattagccgggcgtgatggcaggcgcctgtaactccaactactcgggatgctgaagcaggagaattgcttgaacccaggaggtggaggttgtagtgagccgagatcaggccactgcactgtccagcctgggtgacagagcgagactccatctcaaagagaaaaagtaagtgtatgaggtgatggatatgttagttagcttcatttaattatttcacaatgtatacagatatcaaaacatcatgttacgcatagtatatatacacagtttgtttgtctattatgtcttaataaagctggtgggaggttgggcacttggcaaaaaaaaaaaaaaaaaaaagcaaagattaatgcatccctactgtctcttaagctatactccatgagcacggggactatatatatctagcttggccaaagcctgaaatataatattactcaaaatatttttgttgaatgaataagaaaaaaataacttagatatattggtatcctcatccagagccaccttagatttcatgaaagaaactgggtttgggtttgttgaggtttgcttttagtacaagccaaattttggatttttataaagttaaatctgtcgacatttttttttgtaatttcttctttttcttctaaatttaaaaagtccctcccatacactcctcagccctcatcaaagatttgatgaatatcctcttccctgttcttaccagtttcttgtgggtttctttcttyaaatattcaactgttttggccaggctggctgggtgcagtagctcctccctgtaatcccagcactttgggaggccgaggtgggcagatcacctgaagccgagagtttgagattagcctgatcaacatggcaaaaccctgtctctactaaaaatacaaaaattacctgggcgtaatggcaggtgcctgtaatcccagctatttggaggctgaggcacgagaatcacttgaacccaggaggcggagtttgcagtgatgcacaatcacgccactgcactccagcctgggcaatgaagggagactcggtctcaaaaaaacaaacaaacaaacaaacaaaaattaactgtttcattctgtctttctcagagggtggtgcaggtactcctggtactcgtcgtgataatgtaagattatcttaggaattctattgataaatattcttgtgttaatggtagtgtagggtttttttaaataactttgtaatcaagacatgaaacctgatttcacagaggatattgcttagggtaagggtaagtttttaaagatgggtctgttttaaaatttaagtggataatagtgtgtgcagttgataaatatgaaaaactggtgatagggatctgaaaattactaaagtttgggaaacatttgttaaatccgtgatgttttttctgtctagagtaaggtgacactcaactgtttttctcccaactcaaccaccagatcattaaccaactattccaaactatttatagaattaactctgcttgacttaatgtctggccaagcaggtctcccctctccccaaggagggctgattttgagggttagggtccagctggtggcatgtgagcagacagtgacccacgggccatagcacatccagcaatgcccttgggacccaacccaggkgaatgtgggttacaggacaggagctgacccgacattcccggaccccaacatggaagtacaagaacactgttatcccaaggagatatttccaaggggaaatggggagggacaaaaataaatattaggcatcaaattaaaatgagaagacccaacgttactctttgtaattgagaactagatttgtagtgatgaaatctggaaccttaagggagaactaaagtgagacactgggtaggtcataataccctttctgttgtctaattatctgcctatgaaatgggtaaatatagcctgttgccaaataatgttgaaaagacaatttatctggaaaagacatgtacatataagcatgcacacacatgtgtgtgcacatacaatgtgatatatncaartatgtgaatcctaaggaaatcagatacaaaatccagacttaaaaccagtgtgtggataggcaataactccccccgcagtgttctcatttaatgacaagrttcctttcaatacacagcttccccagtgattttcattatttatttggagtctgccaacaccttgactgaaaggctaaatggaactttaaaaactgagaaaagcacccagtacctccccacaccgcataccccatcattttttaattaataaaaataatgaatctcacatacaacttttctaaaacatgcagggcaaaaagtcgggggtactcgaggcacatgtatttatccatccaccaacctaacgtgtcagtgaagcgggatgaaaccgtgtggccagacagaatgggatttggcagaaccgaatagagtgtagggctggaaagggccttagagtgcttttacttcaaaagcctatcctacagaggaagaaacaagggatctcatgactcacatacacccttctcacttcccagtagagtgacaccacttaatactatttcttttgccaccaaagagcaaattatgatcacatttgaatggaggcactgttgagttaaccttgctgcctctgttgaatttctggtgtctcaaagttggagagaatgcaatggacaacagctcactacatgtgagtgaaagcaagagaagacagccagcaggtgctgagtcatgctagagcagatgctgagtcatgttgaattatgctatcctgtgggattcaccaggggagactaatccccagggagtttatttgccgtcttaaatgagggactcaagtgagaacctggctacttactaattggaacaatattcaagtggggagaggggcaggggaggatccaggaggtccacaccctataaaatgtttgggctgtgtctggggccaggactttgcccattctgcagagtccagaatgaggtctcttccaccctctrtagttttccaggtgggctatgggatctcctggcaattgaagagggctttgcaaagatgagctgggtttataaataatgcatttcctttgtcttgcaggaattcgggaggcagaggtacaatcagatcagctgtgaacagcttacatagcaaatctaataggtttgtaaattagattttgtgttcatttgtttttgctgtaaggcagctattaatctgcttctcttctttgctggatggtgcccttcttacttagcaaatagatctgtttcgtttcactttggctttgcatttccctaatcacttttggggggagctgtcaatggaagatcacatgaaatggcccaaggtctagaggctgcagagatggaaaatgcagatgggtaagagtcactttctggaaaacagcccacccactttgtaatgcctgggacaccaatgagcttactcaaacttgcatgtttgctgagcaatggagaccctgaagggaaccagcattttcactcaatttcattgtggtaaatggctcgtccaggaggttaagatggaaaataaagcattcgggaactttgctgagacctcttaaaatatttagggagtcaacacagtaatgttaaccctgattattgaacgtacgctccaaattctgaaagagtgtttctacttcatgtaatggtgcagaacagtcattgccaggggacagcttgatgcargacagcgtgcaaacccaggcttgcccctggctgtggctacaccatgcttctgagtccccattctccatcaatracaagtgccccatagctatggcctgtagtcttataagcttgagcttaaggagcggtggaaggaagtgccaagttatatgatgtaaacaaaggctactactcaaaatcagggccttgtttttctttctaaatatcctattttggtcattgtgggaataagaggtccatatgatgcagaggattgtctattatttgcccttccatatttttttagatctcttttctgtatgagacctgtgaagtacatctgtccctgaccctgcatgactgactcgagaaactgttccctctgtccctgacatcattgcttctagctctctaatgacctcttagccaccttggagctatgaatgaagcccgtgttatgccaggtgaaatgtgaatatggcagaaagaaagaaggccatgtgctcctaagtctctctctgttctattatgaaatgatgccccatttcggagaaagaagatcctgcccctgaagcccaagtcctcgtggtagcttgaggggccacagtctcatatgaatcaagtatgagaagtggaaaaaaacagtcctgggagccaggcagccctggcctcagccccagtgtttgttagccaggaccttaggcaagtgattttacccctctgagccttggcttccccatttaattagaataatactgcagtgtmttctttgaggagtgtttaaggattagaaccaccaaatgtaagaatctatctaacccaacacctgatatgttaaaggtacttatttgatgcttgttactactactgtggatatatctgtggcatgaaaagaaggtcactgggagtgaagttcaggagtcgggaggtgaagcaacttaagcctgaaatgtacctctagtgtcattttggaaatgggggaggggactggaaacaggagaacacattcattgaaaaggaatatctcaactcaccaatccaacgtgtttgtgcagcacacagcatgtaaaacctgtgaaccgaggtggaccctggagttttctaatccaycccctttattttacagataagaaggcagagtctagaaatctgaagtgacttttccaagtcccccaggtagactgcaactgagccagggttaaaatcccttaagaccatgatgggctatgcaggatgccatccaaattcaccctggaaagtggagagagaaatggaattttaccattacccacaccagcatttatctctctccctttccagcctttgccatcttgtgtccaggagaagtctggaaacctttcctggaggtttccaagcaggtctcctctccaggcatccaygggagaattcctctgcagctccttctttcctgagcctagtgccatccagtgtgccccmgtctctgagaagcatcaccctagactgaacccaccttaagccatgagacaccagagcccagtcactgatttctgatgagtacatcagctagcctcttagtgcgatractcctcatcaccaacattaaagcatttctgttgtgcgtgcctactgaggtaggcttcaacaaagctggggtgaagccgctaattctgtgtcgctgaggtcagtgcccctgcctgtgttctgcatagaagttggtggtatcaaaaggatgcagcaatgccagctcctgctagagcctcatgaggtggcagccagtggggcatgccagaaacatcggtgctcctttgaaaattccagaacctcacgagatggatatctgtctcttctacaccttgtttctataaatgggcaatctgtggctcagagaagtaaagctatcgacccacagtcacacagcttatgaaatctttccactgtacccaatgcgtcttgcatgaaaacagtaaaaattccaaagggttaggtcttgtgtaccctctcggaagctcccttaagcctgcatgctaggaagagttcctctgccttactcaaaactcgtcaattctctatcctctgcgaagttacagatatttgaattcaagagaagtgatatcagccagaaggagtcagaaatattgaggaatggaggtgggtgcatgaagggaatgtgtgagacaacatgcacccctaarcgaagtccttctctacctgcaaaagtcaaactagggccaagcatggtggctcatgcctgtaatctcagcactttgggagaccgaggcaggcaaatctcctgaggtcaggagttcaagaccagcctggacaacgggcgaaaccccatctytactaaaatacaaaaattagccgggtgtggtggcattcgcctgtaatcccagctactcaggaggctgaggcaggagaattgcttgagcctgggtggtggaggttgcagtgagctgagatcatgccactgcaccccagcctgggtgacagagcccgcctctgtctccaaaaaaaaaaaaagaaaaaagtcaaagtggagcgtcaggtttagaactcactaacaggatttcatcttttttaacttggctgtttcaagataaatggagaggacacagatgtttggtttgaactctttaaagcttcagaatgtgtcatcacaaatccacttattctaactgggagaatctgctgtcagcacagacaaaaagaactttggatgtgacccacatatatctgtgtgcatccrgcagcaaggcggctaactcttacactgcctttaaagatagaattgtaacctagtttatagaaacctactagcatagatttcaagcctctgaattcaagccagtcctataatacctggtgttcctgagtcagatggaaagggggtgtttacccagaatcgtgatccacccagggagtataaagccagccagttctttcattcactccaggctcccccgggatcgatttcaacctaaattcaacaatacttatttattgagcacccgctatgttagaccattagggaatataaaatgaatgtgggagatcccttgcgtacagtctcctatgagggacagacacagcacagatgactgtgtaacaaggtccatgtttcaaggagcatatctcagaattaccctcaagagagtgatggggctgccagggaggagggtgaagccacaggctacaatgacattgtcctggtatgagttcttgttttctcttttaagtttgtaagmccatcatttgatactttgttgctcatatacctgctccttgtagagtttcttatcaatagcttgaataagaaatattactcttctgacagtgactgccaggttttaccaggaaaaaaaaaawcactaggggcaggggragaagaataagtttatcaccctccttcctgtctccaacaatgtatgtaggttataccttagggacagagtttctgcrttactggaagataaatagacttccttctcttctcaggtaataactgcaattttgctcttctggagaagtttacattcaagcccgtgcaaaaacaaaactattagacttgtcgtcggcttgctaacacatcatgtctaccctctttctttttttttcccttccagagctgaagttgtaataaacggctcctcatcaccagctgttgttgacagaagtaatgaaagcatcaagcacaacatccagccagcctcgtccaaatggagacataaccagacgctctctctgaggatcaggtactggtaattacctacaggacaagaggtagacttggtcttgagcatacacgggcaaattgctkctcttcgtcatctaaagaagtcaggatagaaataaaatgtttacctcccactgaggcaggtttcatctgtaagtgatcaatcggaaataaaaacccgagacaagcctagcggcccagcctgtgtatgtggcgactggggccaggcggtggcaggaacacccgctgaggttctgggcttagaagcagcaaaccttgagtctcgggtcagcagcagagggaatctgggcagtggaggccacaggtggctgcttcttcccaggcataaagagtccttacttgttggggtctgcctgggagtcacatcccctttcagtgacagtcctccagtttgttcctggagagctgctccctcyctcagcccttgggcttgtataggctgctcctccctaacaacgtgaaaatgaaaacctagagccataggggcatccggagaacccaggaactgacatgacacccgaccagaaagcagaggtctgtttarccagagagcagctctcgtcctgatctgtgcagagtgatgttttcagagcactgcagccatcatcgggtagtggcaatggggaaccgtagagaaggaattacaacttcggcattttggacacttagcttagatatagccatgattgacccagcaaatatttgtaagtataatccaactattcagttccaggcatcgtgctggggccccaggagtgctagcatgaatcagacatgctagctggggacatgaatataagcaaagacaagacagcgtggtatgacatacacatgaggtggtgctgcatcttacacatagatggaaataaacaggccatactgagcaaagagtcattcattttgtaagaggactaagaagactggccaggaaaggctggccaggagcagtgggttttgaaggataattaggagttcaccaagctgcttcccacatgcacagagtctgtgatctggtgcttgtggacagtgctgcaggagcaggaagcaggaggcaaggaataggggggtaaggttgggacgataggcaggaccagacggggaatgattgatgaccatcccaggccataccatggggagagaggagagcagccatcagcaatgtcaccacgcagagcagggagttgccccctccacaaggctcactgtcaaaatggaaatgcctctgcaccctagttcttgaagcttagttttgggacctgtgcagggctggggaattgaaaggcatgagctctggggacctagcagctgagaaaccatctgaagtagctgactccctgccaccctgcactccttacttaccgcctcttcagaggcctcctggtggccctccatccccctcacgaagccctaacaaccgccccctttgatcagggacaccgtggagtcagcaaccccaactgcattagctccctagggctgctgtaacaaattaccaacaacgcggcggcggcctaaaacaacagaaatgtattcttgcaccgctctggatgccacaattctgagcacccccttgcaggctccaagggagaacccatcctctcrccgcttccagcctctggtggccgcagaactccaacccctgcctccatcttcacgtggccctctcctctgtgcttctatcttcttctcttctgtctcctataaggacacctgtcattgtatttarggcccacccgggtaatccaggatctaatctccagatccttaagttaattacatccgcaaagatgttcttttgacatgtggtcacattcacaggttccaggggttaggaggtggrcatatattttagagggggtcaccattctccccactacaccaccgtgaatgaaatcctcctgccagtatgagctacccatggtccccaatgtccctttctccaaccattggatagagaaatagctcccccaccccttgtgaagacgagactgtgtccttcataaagaccctgcaaacacagtcccttcagcagcaacaatgtacctttacccagagggaaaaagaatttcctccagcttcaattaatcaccaagattattcataataaaagattctgcaagtgatttggaatgatgtttaataattgatggtaatttctcctaattagttagaaattaattcactcacagaggtgtttatttatgggctttctaggggctctctttgtttttaaatgctttggggtaagtaattgcaaaggtttcagcaatttcccaactatattagtttgtcaagtcatataatccttggtaaagcacagtaaataaaaacagtgcctctgttttccatcaacagatacgaattattctacaagggtggtttcccctacatgatagcaagagaggcaggtcatcaataaggaaagacaatggatgagamgcgccgagcttaccaagtgttctagctgccccctggctgccccggaggctcttgaacctggacacacattaaagtcacccggggagcttttgagagcaatgctgagaactgggccactctcagaatcaagatttctcacatgtcagcctggaaatttgaaatacttaaaggttccccaagtgactgaatgtgcagcctactggaacgtaccataggttgtgaacatctcaaatccagcaggctttcaggcctcagtgttactatctgcgagatgggacagccatcctgcagcgtctaacatttgcaaagtgcatgaaaattctgcacctccaggactctgaaaacaaagaacagcatctttgtatctgttctagataggaatttgcagcagaatatgaaattaatttcagcttatctaggtactcaattcctttctctttatgactggaatcatttcttaaaatctcaggtgatttaaacagttctttaagtaaaacgcccagctaggattttcaggttccttggcagaaggctgtgtgtttcaggtaaagcttttctggcaaggctaagaggacacccatccctttcctgaccccactccatcctttctttgtgctttgctagatgattcgattcgagaactttctctaaatcaaagctaccccagagcctagagagctgtgcttcgttctgaaacaatgcaaaggagcccttctccgtggaactgggaggggtccatgtttacaatccccccataaacactagagagcaactagagggggcagcaaggggacgtgcaccagcttgcaggatggcaggccatcctctcggtgtctcaaaggcagaaagtgtccatacacgtcacagtatccatccccccagaaagcccctttgcaatgtgcccagagaaaccttccgtggaagaaaatgggccggtaaggagtgagaggcgcctgtcatctggctttctgctcctagacaaatttattatccttttttcaaaatctaggaagtgtgrgagtagcagagaaacttagattttatacctagccattcattttcatccccgtcagaggatggccctaaatccccctaagacagtgagggtaatgtaagctcaccaaatgtctgggtgtgccccagactgkggggctttcagggacatggggctttcagtgcccgagccaggcagtcctggggaaactggggtggtgggccacccttccttctggggcccgctgtgaggagctcactccagccctaatggagtgattccacagggcagttttcacctagcaaaggaagagggtgtmaccctggcaacccccatattggccaccaccgtagttgcttctgggccacttctggccatccctgsctggaacctgttctcgagggcatctgaactctcatcatactctgcgtgtttgctgggctgcagccaccgtgcagggcgaccctggataggaaaagctgggctggcaaagggcagctggcaccctggagaatttcctcacgcatgtttggttttcacaggaagcagattttaaagttcttggatgctgaaaaggacatttctgtcctaaagggaaccctgaagcctggagatattattcattacatcttcgatcgagacagcaccatgaatgtgtcccagaacctctacgagctcctccccaggacttcgccactgaagaataagcactttgggacttgtgccatcgtgggcaactcgggggtcttgctgaacagcggctgtgggcaggagattgacgcccacagcttcgtcatcaggtaacatgccccagcaggcactctggggccagagcggcgggcaggctgtgtttcagtggagcattgccagctgtcccaagagattgaaacaagaggccctggtggagttagcccctgctctcaaccatgactgctcatcagaatcacttggggagcttcgcctccaatgtccagaatgtacctcaaaccaattaaatcaatggaggagaggggaagagaggcgtggcaggggtgcrggcaacccagggagcccagktcattctgatttacagccaaggttgagaatcactgatccacagcaaagatgggcagatgctggcctgcagcctaaagtttggttggaacacagccatgccacccgttttcatatcattgatggctgttgtctcactacaaggagagtggagtcactgggcacggttaartcattgggtgaaattgcagagtcagaacagagagatcatatcacctgcaaagccaaaaatgtcattatctggcgctttatagaaaaagtttgctgatcccctgaggtagagcctggtacaaaaggttggtaagaaaatctcctgggctggccagttgttggttcaagtttgcaaaactctttgtaagtrtcttgggagggggtgccctactagtgactttattaccctgttctcaaaatctgggaagtgcgggagtaacagagaaacttgaattttgtacctgactataattttctctaaaatatcagctctcattttccagttgcctgggacatttgcacacaaggttgcccatggccctgccacctgacccccaacccactrcagtcatggaaacaaggctttgctgtctccaggtcaaaattagggcacgcggagcctcgagtttcattccagccggctccccagccctggcagaaccgcaaacgttctcatatttctgtggggaccaactcgaggcaaagacagccttgtcctggggctttgggaagccgccctattgtagagttccctaaaccttgggacatgggaagaaaccgtgtctttactcttgcatcctctgggattgaaacgctaccacagcctggcagccagagttttgtcatcctctgccaggtctgtctgggcctggcatatccaacagctcagtccctgtttttcaaagccctttagcctaaagactggtggagggagggtgaggggaggggaaaggaagaaggaagagtggctggtctgtctgcttggaagccagagaaggagtgacgggtgggtgttaaaggtgagtgtgtgggggccaaggcctcctcccaaggggtcggatcctctccaggagtgcccagcagtatccgggggaggcgggggggtggctgtctgacctaaagccacacatgtaagccatgcctcttccattgtcacaagtcatgagtccccacagtgagctttacacatcccatgaagtcctgacccaggaattttgagaggcagattttggccacagtttccttttgggaccctttcacatagtcagcagcgcacagtccaaagctgtgccttggctctgctacccatttgtcacatgacttggagtgtatctctctgcctttctgggcctcagttttatcatctgtaaaacgggctgggtggactggctggccttgaggttctttcattatgaatacagtctgtactccagcccagtgcttctcagactttaccatggacaggagtcacctgggcctattgacatgcagagttttggggtctagggtacagccggcaactcagcatttctaacaagcaccccaggggacgccactgctggtgtgtgactgcacgtggacaggtgcagccggggtgtgctctgcctcactcctgggagtcacgtccacacccatccrcacatacttggaaaatatgggtcaaaaatgccaaggagcaagttacttcaaaaagtgcagttgttctttgtcccttaggcctatgtccatggctctgaaactcccacgtgtctctggggtggacctgtggggtgttttaggacaagattatgcagccccactgggtacagacttacgtttgacatcagggatacgatacccagcagtggcactagctcctccaccccactgggactattcctctgggttcttcccatctaggagtttattccgtgccctgcacttggtaatatcctacaggccaaagccccacactaacagtaaagagagcatgatgttgcaagcattaaatgagacggcatatgtgaatacgcctgggatggtttctcccacacaacagggacactaagtgttaattccccatggactctgtctccactccacccacctcacccccaggtggtgagctcctccagagcagagtggctgtgtccatctctgggcctcccgtacaaggctgtgccaggccagaggagggcctccatgtggctttactagaatggcagacgctgtgaagctcctgatggaggtttctgtctctgccaatccaagtcttcaatccattcaccctacctcctctgtgggagaaacacaaagacacgcaagacctcaccccctctcagaaaactctgtgtggggaacacaagcttgtaagtcctggtgggacacatggcacgcaaaatgcaactatcttgcaaaacctagtgcctcctagggagtccarggcaggcttccggcagaagcggcattggagtgtggcttgcctttgaccagtaaaagtggtgaggaggaggaaacagcatgaagaggggtgtggaagcaagaaggcagatgcatggatccggcagggcactgctcgagcaagcgtcagctgcacaaagtgctgctgggaatgtctgaggggctgggcccaggagagccccacgatcctgcagtgccaggctgaggacactgtgtctatctgggatcgtgtgtgcagagtataagttcccagatgtttggggaacagaacttcactgtgcatgcacacacacacacacacacacacacacacacacacacacacacgcacttcttccatagggagaatctgatgaacaaatgcccttccatggataaaccacatcatcatcactgttatcccttaccattttttggccactttgaacgtaccaggtgctattctatgtacttcatgtttattaacttatttaattatcacarctattctgtatggagcactctgtttttatcctggctttgcagtgaggaaattgaggcagagagaggcaaatgccacacagctagtgagggctggagccaggcagtggaccaggtagttggcctccagagcctgcccaagctgcctctctcaccctgcagagtactcttcaatgtgtacctgtaggtgtggtggtttctggaagggagtgactcctctcctgcccggagccaagcccattcagaagtcactttgggaggcctggcctactgttggacaaaagagagcctagatcagattgaaccccttcctaacgcctccttctcaactaaatgaagcaattcacatctggtggggaaggaagacatctagacagtccacttagggcagagctcccccaacccagcatcctcactgaggcacagtcattggaaaagcttggacttcacagcccatccctgcctgcctcttcttgtgtctctgcaggtaaggtatggagcccttactgtgagccgagtcctatactgaatgagggctggggcctgcctgcaaggagctcacagcccctgttcccattacccacagcatcttccaggaggtggcatcccagactggccaacattgcagttgggagtatatttcctgcttcacccctcgtgagccgccagggtcaggtgccacatcsccttcattctccttgcctctttcacagcccctcctgccccatggttgatcccaatccatctgaactgcatggagtccacttggccctgctctcaggacccagagcttggcctagaattggccccaggaccctcaggaaggccttggaagcctggctcagccgggtttcaaggcaataaaagtaactgagacctgagcagccccacactggctgatgtgctgcagtgacacctcagtctctgaggcctgtggcaagggctcctgaaggtgaattgacccagggcaatcctatctgcttacaatgtttagccacagtcaaagatagcaaggcctaggggcagggatgggaagacgcgatattttagggggttcagtctgaaatcacaaacaggctctttgagtcaaatatacctgatcttgactcctggtggttccctttctagctctgggcctttgagcaagttgattctcacacactgggcctccatttcctcctgtgtgacaggagggtgattaaaactgggtcacaaaaaaaaagagctgacctatgttaaaggaccagtcagtgcctggcacacaccaggggctcaaaaaatattagttttctttctgattaacccactttttctccccagttgttgaaaaaggaaagtccttgcttaaagggaggataaatggtacgttcctggatttcttcgtttgatgatgacctgtgatcccttgtcttcatgtctccagcctctatttttacactcttaactggatttctcagacttattttcactggtcaaagggcttttccaccattaaatcctctgtgccagacagcagccagacctcccctgcagtgccctctgctgccatcccagtcctaggcacaggcaggaaacccaggtgtgcacacccaggccgggtctcccacaaggaagtcatcaggttaaatagcagaggctgctcacccaggcagcctgattgtcagcatgagtttgcagtggcctcttagtttgccctccagtacccaaatccatcccctccaatccatactgcaacttcatctcattgctttctaatcgtggccaaaaattctaaaccgtccctgtcactctcctgctccagaaccctcagtggctccctattgcccccagaaccaagtccctggcacacaggtccttygatatctcmctctgcttgcctccccaagcccatctcctccacacaatatgctccrgtcggaccagatcacttgcctttccctaaacacccatgctgtttctcacctctctgcccttggatgcctttcttgtgcctacagtgctctagcatggtattcctaacctgcttggctataacactacctgaagagaaagagcttgtgaaaaataggtatcgawgcttaggctcacctgctgaatcagaatctccagccgaggaacccgggartctatatttttaacgagcgcctggggtgattcttctgacttggcaaactggagaagcactcttttcgtgtaccttgtccactaacagacttctgcttagtggtcaccacctcagggaagtccacctgacactcctccttcccataagagcgatgacaacagttagcatttatcaagctcttattatatccagtagtgttctaagtactgggcatatagcaattcttttaatccttgggagggatgctgttgtgatctctatcaaagctaaagtaatggaaggtctcaggaagcacagagaggttgagcaagtttcccagactcacacaggtagaaagtgtccaagccagtttagagcctgggagtctgccttcagatccctcactctgtcacctaatgggccagatcactcttggcaacagcatcatcatcttgyggactgaggactggcttacttgcttctttcctcctctcctagatcctgaactccagaagacaggcatttacatccacagggtctagcaaagttctaggtacacgatatgagctcagtaaacctttgtggcagaaaaaggaggagaaaggatgatgggaggggcctgtgagtgtggagagatgccctgggtctttgtttggggatgagaaagaagcaaggagaggcaaaggatgggatcgagttaaacagaggaaggggtctcagctttcccaaaaggatcatgttgcctttttctccggcaggtgcaacctggccccagtacaggagtatgcccgggatgtggggctcaagacagacctggtaaccatgaacccstcggtcatccagcgggcctttgaggacttggtcaatgccacgtggcgggagaagctgctgcaacggctgcacagcctcaatggcagcatcctgtggatccctgccttcatggcccggggcggcaaggagcgtgttgagtgggtcaacgagcttatcctgaagcaccacgtcaacgtgcgcactgcatacccctcgctgcgcctgctgcacgccgttcgcgggtgagyggcctccctacaggccagtaggaccgtcactaagtgtgggagattcttggtaggcagtatccctttcccaggtgcatttccatcccagctccaccactcatttgctggatggcctcagcaagtcacctggcctttctgagcctccattccttgagagatgagggggtttggcaagtgggtttcatctggcatgccaattttgaccaatgggtagtgcctgcctagggaactgagttgagaatgatcttgggggtggggctgtcttgaggctcaatgggaacagacgccatgaacatgggaggagagatggcggctggcaagtcacataccatcccaggtgtgtgattttcaagaaaatcaggatcagatgcacttgacttcaagtaattcaccttaatctctttaaactttagttgcctcttcagggaaatatgagtgggaatggtaacattggaggatgtgaagactaaatgagataatgtaygtgaaatgcstagtaaaattgcggtagaaacatttaatgttatcatcaatcatcgctatctttatgtctcagtgcaatattctctaactctrcagagcacatcttactgattgggctgagatcttcaaaggagcgtctcttaggatatgtttttgtccacaaggtcttctctctaagatggaggggaactttacctaggcaatatgaaagagatagggagagttaaagcaatggaatccactctctttaagaagagttttgatgtaactaattaggtaaggattttcctggttaggcctggatctctaattccaggaaagagattccaagaattaaggaaaacaaataggaaatgttgaggagggtctgaactattcctatcaagaagtccatgtcaacctggatggcattcttaaacagccccagccaaacaagtagtagttcccaatctcctccttgtttcctcccattcatgtgacctggcatagatctccctggcacttggatcagtaaattggctaggaatttactagtgcccatgatagcagccacaagaaaaatagtttaatattaatcattcattcactctcttccagttatctattgcagtaaaaatcatctcataacttagtggcttaaaaaaacaacaacatccattttatattgtttacaatttctgttggctaagaatctgagaagggctcacctggatggttcttaggtcaggtgcagtcagactggctagaagtaaaacagtggggggctgaagcagctggggttgaccatgcgtctctctctctttatgttatattagggtttctcyaaatgatctctccgcatgggctagattgggcttcctcacagcatagtagccttagagtggtcagacgtgtacatggtggcccaggctctagcacaagtggcccagagaccaaggcagaagctgcatcacatttttagaccacatagtgtcacttctattatcatctactagtcayctagtcattaaattagcttagaatcaaggggagtagacatagatcctgcctctcaatgggaaagtgccaatttgtgtacatgttttaaaacttacacacattcattctgcatatatttattgagtgcttactatgcgctaggctctgttctatacactaagacacagtagtgaataaaataaagatctcagatctcattaacaattaagttttcttatagggaaagataaattacaggtaaacaaataaataagatacttttaaatggtgctatcaggaaactcttctctagaaagaagttggtttgagctaagtctcaagggacaaaacagcaccagccatgtgcagatctggggtaggaaccttccaggtggagggaaccttaagtgcaaaggccttgaggtaggagggtgtgttcaaggttcaaccaagagacaaatgtggttgaaacagagtgagcaaggagaaaggggaaggagatgatgttggtgagagaggcaggtgcyagaatgcacatatgtttgtgggccatggtaaagagtttgggtttgattctaagtttgaggggcagtgaaggaggtgagggagaagacctgagttgtgtctttaaaagatccctccagcaagaatgaaagctggaatatttgttgggaagctgctgcaatagctctggcaggaaataatgatggcttagrctaggattatggcatgggatatctaagagttggtcagatttgctataaaattttgaggtaaaggcagcaggatttgccggtggattctatttaaggaccataatgggggagagaaagagaaaaatccaggatgactcttagaattagagtttgagcaaacaagcccaagcaaacaagcacaatgtggcagtgccatagtctgtgatagcagagcttagagaagcccatgcatgtttgggggcattgtggaagggagttctttcttgagcatacgaagtgtgagatgcctgttacaaatgtatatcctaccacactcctgacctcccagcttggggtcaggccctatacccaattgcccatccaaccacatggcagatcaccagggatgtgagggagcccagtgtacagactccccactgactgaggggcatcaggatgctcttcactggggacttagcataactcagtgtgaccctgggaagccctctgagccacccacaaaggattcttgtcctcatggtgactgtggtcacccaagcctgtgaccaacactggtctcattaagatgggtatcaacagggaaaacccattgcccccaagaaagcccgagagagacattcgataaggagcagccacatgtgtgtctgatggagccagaatgatccccatatggacacggggctcaatggggctacatactttatcctagaggttggtctctcaggaccatgttttcacttcatccctgtcagagtaggtctgcagtggcaaccctcatctcgtggactgtttaaatattaaatatcgttccttcctagaaggaggaaactcttgagatggttctggagtccttggggataagaggagaaacactgccctttgttaaggagagaaaatgtcccttgaatggggaatgggcaaccacctggaagaaactgatgcagccagatctatttccagctataactgactcactttcatctgtcaaaacagcattaagcaccagtaataagccctttaaacaaacaggctgttcatcctgagactgcaacatcttcagctgcaggaccaccccaggaggaaatactgcaggagattagcctcttcttttagcagggggagaagaaggggaaaaggaggcttggaatggaattctgccaatgatcctctccctccgtggggccattggactctgcagggtgctgggtctaataggacaccaatgaaaagttagggagcatgttcattagcccttgccttggtgggaccttacctggtgttcactgcaagtggaggaatgggctggggagggatgcagtacaaagtcacacgagaaaagaccaagggattgtagagaggaaggctgaggaggaatccggccaagaggcactgtggcctagcatcaaaaccatgggctttggcagtagcgacacctccaaagggtccagaccccagctccgtgactggcttggttgtatcacctgccttcccccagagccccgcagaagacacatgtaattaatcaatcgtgcctactgtgattgtggcagctgccacctgccacttggagagctacaatgtgggaaagacataagacttgtcctatggactcaagagttccagaggctggagccacaaggaggagagtgcaataggctgaatttaagacaggactctgtagtagtcagagcagtggactaagttaaaccagtcactcatgagttcttcaccttgaagtcccaataatggactgcagtttgcaaaataatcttgtttccttatgttaagatgtgttacccaataaaccccctgtttatagggtatgtgggggggggtgtgaatgaacttttattgtgataaaatatacataacataaaatttatgattttaatgatttttttctttttcaacttttattttagattcagggggtacctctgcaagtttgttacctgggtatattgcatgatgctgaggtttgtgatacaaacgatcccaccacccaggcactaaacttagtacccaacagtttttcaaccctttccccattcccttcttctccagtgtctactgttgccatctttatgtccatgaatacccaatgtttagctcccacttataagtgagaacatgtggcatttggttttctattcctgtgttaattcacttaggattacggcctctagttattagatcatcagggacagttacttgtgaatgggtattgtttatacaccatgcgtccatgatgtattccatggtgtatatgtaccacattttctttatccaatccaccactkctgggcacctagtttgattccatgtccttgctattrtgaatagtgctgctatgaacatgccagtgcatgtgtcttttggtagaatgatttgttttcttttggatactcatccagtaatgggattgctgggtggaatagtagttctactttccttgcaaaatctccaaacagcttttcacagtggctgaactaatttacaatcccaacaatatataagcattctcttttctccacatcctcaccaacatctgttgttttttgactttttaataatagccattctgactggtataagatggtatctcgttgtggttttgatttgcatttctctgatgattcatggtgagcagcattttttcatgtatttgttggccacttatttgtcttcttttgagaagtggctgttcatgtcttttgccgattttttaatggggttgtcttttgcttgttgagttgtttaagttccctatagattctggatattagacctttgtcggatgcatagtttgtgaatattttctcccattctgtaggttgtctgcattttaagcattgttaattgtacatttcacttagaagaaattcactcttagaagaaaacttaggagaaggttttcatcaccttgtgtttggcaatggtcttttaagtatgacaccaaaagcacaggcaatgaaagaaaaaatagataaattggactacctagaaatgtaaaacatttgtgcatcaaaggacaatctatcaaggcactcatataattagagaaaagatttacaaatactatacctgataagggattaacatccaggatatgtgaagaactcttacagctcaacaacaaaaaacccaaataactcaattcgaaaatgggcaaaagacttggaatagacatttctccaaagaaaatatacaaatggccaataagtacgtggcaagatgctccgctgatcatgagggaaatacaaattaaatacatgaatgtattagtctgttttcacactgctataaagaaatcctgagattgggtaatttataaagaaaagaggtttaattggctgacagttctgcaggctcgccaggaatcatagcggcttcagcttctggggagaccttaggaagcttccagttctgacagaaggcaaagggagagtgaggcgtctcacatggcaggagcaagagagagagggaggtgctgcacacttttcaacaaccagatcttatgagaactcactcattatcatgaggacagtatccaccgcatggtgctaacccattcacaagaaactgtccctgatgatctaatcacctcccaccaggtcccacctccaacattaggggttacaaaattcaacatgagatttggtggggacacagatccaaaccatatcaatgagatatcacttcataccctctagcatggctattagtaaacacacatacacacacacagaaaataacaagtgttggtgaggatgtggagaaataggaacccttctgctttgctggtgggaatttcaaatgagaattcacttttagggcagtgaccagggatcagtataatcatttcacatctggacataagtcagctaccttgacaaagcatttcatgggcaacttggacttgacggacagtttagggaattgaaggggacaaacgttaacttgttaccttcatcttgttaccttcattttgcaaaagaggaacttgatgctcagacaagttaggtcatttgtatgaggccacccagcatctaagtggcacaaccaggaactgaactgcattctctcgctctaatgtggtgcaccaggtgcagcagaaatttgcactcatttagggacagggatggcaatgagctgagtgggccaggagctgccacactggagaagaggtgttagaagaccacggcaggcagcaacgcatcaaggctacacgtgcacacactgcagttgttcagagcctggggcagcaccttatcggggagaacaagctgaaaggtcagagctcctcagcatcccctcaaacaccagccagcacctgggcatgacacagttgtgctgaaaccccagttgaggttgcccttgcccttgaatgtgcctttggtttcgctcttctcaatttgtttggctgccccttcacaacaaaggcatttttcagaaggaaagcagacatccttgggtggtgactcagaaaggctcagaaatacagtcacacattctgcatgctgctctcgatggcttgccacaggacatgtaggaaaacagctgaggggcrcatactaccatagtgaacgcttacatgccgcacgccatgccaagtagcattatctcatgtcatgagaggactactgccattatccccattttaaagataggaaaactgagcctcaaggagtaacttgcacaagatcccacggctggttagggacagatccaggtctcctccctgctcctgatcaccatccatttgcccctattacacataactaggaaatagtgatggcaccctagagaatcatgtcaggaaggccaaggccaggatgggtttgagtttatgaaaatattaagaaaaacagaaaagtctttttatgtttcaagtaagaaccaaagggctaggagcagatggcataggggctacaaagggcaaatgtgtaatgaactcctcaacccctatatctgtcttttcagcaaagatgagtcttttacttggataggggaacggggcctttgggttctttactgacagtcccactttactgctctaaagcagtggttctttacattcatggtccccagaccagcagcatcagcatcactgggaacttgttagagacgcacattctcaggcccaccccagacctggtgaatcagaaactctaggagtggggcccaccaatctgtgtctcagcagtgctccaagtaatttgcatgcacagcgttatgtttgagaaccactgctacccacaaagtcaaaaccaatgaacctcccaggggcaaacttgcrgtcagaccactgagcagctggccatgatcttctccaaatcatgcagaattagagaagggaatcagggacaggcaatctctgtcccaattttctaaacaggaggaaaggatggacaatggtgagcttaatgtcaacaccaagctagagtttcaaataggttaccaatcccatggctgatgaatgcttaaagatggagaagtagaactggaagatacctgggcacactgttctgatgttcctttgtgaggcaggcagcagacaggtagaccagggattagtatagtcatttcacatctggacgtaagtcagctaccttgacaaagcaacttgacggacagtttagggaatcgaaggggacaaatgttracttctcagaacaacctgataagatagatattattttcctctcctttctactcataaggaaattaaggctcagaaatgcaaagtaaattgcccaattggaatttacagaacatcaacatatgagtctgggggaaagggaaaattcaacccgtaacagctgrgttagatggcctcccttcccacgctgagattctctcattcaacacatctgagtctctgctcgcacggtgtacttatgaaatttctgcctatctgaggcagtgagcagagaaaggggagcatgtttctgaaacccaagcagaaggcctgcccttctgtaaattgcagatgaggagaggaaggaagctgggattcaaatccacgtatataggcatcagtgatctctactatctccactgtgacctccttgtatccttgacagatagtttaaccactatgtgctgaccattgacacccaaaggatgctaattagattaatgtggaccacagagagacctctctgaaccagccacggggcttggtgtctgtccccatttttaccaataacttaaatgacagcatcagtggtctgcttagcacattcmctggtgatgtgacttttgggggattctccatatttggggtctcagaattagaaccaactcaaccaaagaggaaaaagtttgacatggacaaatgcaagattctgtacttaggttcaaatcatgtatacaagtgcagagagatgaacagcaccaaccatcagtgggtgtgtggttgctcaaaaggataacatggtcttgggtcacagcaatgaatggatagcatctctgagagtcagggaggttggcgatggccttgcttttctctgcctggccagatcccacttagagaatcacatttttctttaggtgccaggccagagaggggccacagtggcagagaaatttggaagctgagaggttttgagagagaaggttccaaggaacaagagagttttatttactcagcaaatactctttaggcaccagtaggctccagccctgtgctgggggaataaaaaagtcaatagaacaaggctcctgccctccattggctcatagatttgctctgtgaggctccaggtgtagaactagggttgggggaggaagccagattccttccggacrctgggaagaatattccaacaaataagatcatctgaaatgggcttggctgcctcttaagaggtggtgaattcagcatctttggagatattcaggcagcagcgaaccccccattactgaggtggtggagaggaaatccctgtcatacagagttggcagattagctcgctaatcagggctaccgtaacagcgtctcacagactgggtggcttaaccgacagaatgtattatctagcagttctgggggctggaagttcaaaactcagggttcagcgtggttggtcccatctgagggctgtgagggaaggatctgcaccaggcctctcaccttggcttgcagatcgccatcttcttkttcccatggccttctacctgtatgcctgtttccaaatcccccctctttgcaaggacatcagtcatattggattaaggcccaccctagtgacctaattttaacttcattacttccgtgaataccctccctccaaatacagtcacattccaaggtactgggggttaaaacatcaacatatgagtttgggggaaatgagaaattcaacccataacagctgggttagatggcctcccttcccactctgagattctctcattcaacacatctgagtctctgcccccacagtggacttacaaaatttctgcccatctgaggcagtgagtagggagaggggagcatgtttctgaaacccaagcagaaggcctgcccttccgctctcaccagcagctggcagggcccggcctctggtgccaacaaggcgggcttcagctgccccaacctgagcagctcacccaggggcccctggctctgctggcctgtggggtggcacggagccctggctggctgttggctaggaaggtgagcaatggagtggaaggacactgaggcaattgagtatggcctcaggcagctggtggtgaatggctctaatttaattacaacatcgaaggaggctgcgacccacagagacggtggcccctcaggcaggaaagcagccctgggtgcagacaaggcctgtgaattggtgcttaattaggcaccaggagcctaattaaggctttaggatggcactgattcagcttgcctctggccagggccagaggggccaggtcagcaaagccagccctgctgcagagacttgagggcccaaggtgagagaagagtawgcaaggtgcaaaaagatagggagagaccagcacaggttgctggtggctcctcccagacaggaccatggcaatccagagagtgtgtccctagggctggtcccttccctgtgctggtcccagtctcctccggttgacagagggtgaggtgaactatcacctttttggaagcgtgctccatgaaagagaaaaggagggacgtctgtgatattaaggcataggtggctcccggcatttgtgtgtaatggattctctctctctccaattttttttttaaatagcaatgcagatagtgaaaagacatccaaattggattaaaggatttaaagtaaaaagccaactccgctccgcaccccctgtcctcctccacagaagcaagctgttaaacctgctttctgtgtgtggatccttccaaaaataacccctttttacacctacggaacgtggtttaagtactgcaccttgttaaattctggaaagtattccctattgacacacaccacctcattctccttcacagctgactggcagtccactgtgtgtctggaccataatttatgtaagcagaagccattggcgggcattgagggtgtttccaattttttgccagtataatcaatgctacatcgatcacccttgtgctgatatctgcaaacatatgcacatctataggttttgcttttcagaagtctttgccaatttgcattgttaatttttatagttactgccaattaccctccctagaggtaggtatcgattcatatcctcacctacaattatggaaaatacctgttttctcttaacctcaccaatgggtgtattatcaacattagttatatttaccaatccaatgaaaagtggtatctgattgttgtttgaaattggattcctttgattatgaatgagattgaatataattttgtttctttggagtggcatcgattgaaactccagaatccagccagaaggcttaagcccccaagaaatggtcttgctggacctcctsctgggccacaggggacagagatgatacctgggcatgagcagtagtctcaccactcctggcggggcccgccatgtagcaggaaaaacccccagtgccatacctttctcctttcttttggtaacttgctgtctaggatggtgtgagcctgcctttcccatgtgcagtcctggcagctgcctaaaagggcttgcagtgaagctggggtcatttatctctcctgataatgtccccagaatgaacctctagcctctgcttgctgcttttcattcactgctctattaaagatttgtgaggtgcccactttatatatgtgccatgctaggatctggagttatacagaagcaggaagtcagtacatttgcttatagaatttaaaactgtagggaaggaaaagaaaagtaaacaagtaattccagtgtagcgtgataggtgcttgataggggaagaacaacataccggacacaaaaccatccagggaggtccaggaggcttcctgcaggaagtggcttcaaagccaagaccataagaagggactgctagccaggaccacataggacgtgtcatggaagaaactaagatgttcctcgtggcagtgtggctgtgcacactgggtactgggagagatgtgcaggcccagatcccaagggcctcacaagcccgatggaggctatcaggttttatgctgtggactccaggagtcactggagagttttcagtggcatgtccatatttgaggctagcctggcttacttgagcaagagtgttggcttaggcaggcagggaggcctggggatctggaattagactcagcatccccatgccttgatcagcctttcccaacagccccaaattctaagacgaagtcctcagctctccaatactgcagagatggtgtctcattctgagatatcctgcagcacaccagaggcctcaacastgttcccaaagaaaggacagccgtgggctgtagggcccctggatcacggctgaggctgccaatgcagaggacaggagagcaggagcccgaaagttctgttcccagctttgctgctgatcgttcacaaagcatcactgagtctcccttgatgaccacctgtgaggcawtcctgctccttagggacatcatcagctttatcccacagtgcttttagcttcttggaggaagcccttttggtccccttttccaacagtgacagccactattctttccacatacccagcccaggaacccagggaaaaagacaaatgtgctttggagatgattttggcaatcctcattgattgctgtccgtgctcataaaatacggtgcttaattgtcatggcatttggggtagccaatttgaaaaataattactgccttctttgagattactttggcttctaattaaaatctcaagactgggatattaaaggtgcactgtcaatacaacgtcccggatgcacccagctaacctcatttgggaaggcaaaattaattagtttgtgttttaacacccagctgttatcctaaggaaaggaatagtcttcaagtcggccatgcacacagtctctaaattggccagagcaacggaggagagataaaggaaatcgagagtgatttgttcctgtataactcagtcagcttctattacaagctgctcgttaagtggcgctcccgtgtccctgtcagacatcgctcaggagttcttgtttacccgtggaggcagaatcggaaataagtgggtccctctgtgccactgagctctggattcattccggagcctcatttgctgttaacaccttttccagttagcaattctgggtgaaaagcctggccccagatctgagaggttgggcatttctattcctgtcccagctggccgcagttacaaagctgtgtgcactgctggcttcctcctttcttcttacctacatcttcccatttttcaattccatttgagtcaaatgtttgctgagtgcaacggaagtcaggataatcaatcctaggctatgctacagtaacacaccctgagactccagcactttagcacaacagaagtttatttctcactcactcgcaaactgtgatgtgagctggcaggggctctcttccaatcagggattcggggatctaggattcttccatcttaggctgacatcttctgaccaggagactttgaagttctccaaggcaggggaagaaraagtgggagagcctgctcttgaacaccaaccaagaaagtacacattgtctttgtcgcaggctatcgggccagaactagtcacttgaccccagcccagttaccagagatgccaggagatgtttgttgagtgctgccgtctctgcaacagtgctttggacccagcatgcactgagcaagatgcctttgaatcctactacaaaggggtgtaaggtgtggtccctgcgcttggggagaccacagtacagtttcatgttccccttctggaaagcatcccttccgtctctaaaatgaccattcacttcttccgcagtcatagttcttgaggccctcagcacagaggcagcaggaccaacgaccttcccaggagcccacagatcagcgggaaaggcaggtgtgcacaatgcataagactggagccagggaaggacactggtgcacgggtgaccacagctgcccagagacagggcaaaagtgcaaaggagtgttgatctgagccttgataggaggaggtgccatgaaacagcatagtaatgaattttcagcctgggctgctaagcacrataagagaagtagaaacaaagctgatggtaatcatctggaggtggttaacagtctgactggggagatgacagtagaacaaaggcaatatttccaggaagayaggatgcacgtgcttagtttctggaggtgggaaagagagttcaccacagggatcagtggggaaaggcatctaggcgagcacccagcacgtgtggaggcccagcacacgcctgagtaacctcagaagcacctatgggccacttggacgtttcatcgctgattcgattcctctctccccctttctggtcataacattgatggcctgaaaagaaattcatttctgaaagccttcccctactaagaccttgctatcagaaaataarcaaaccattgtttatctggcctgtgttagggcttgagttcacttaggaagtaaacatcggggtgatgtttcatgcagggacaccgtggtggctcgacgatccctgggtaacgtcagcccacagctgcagccagctcattcccagcctggggagttgccatggggtgaaaaatgctcaagaaccaggagcctcagatgcctgtgttttatccaaactctgtctaaccagctgtttgagaagcttgtctcttctcaagcaagtcacactggactcccgcgttttcctttctaaaatgacagaaggggacaagttcagtctaggaggcccatgcgttcaccacacagacatggcctgtgggatcacccagtaaggcctcacatggtgttgttttgttttgtttttgagatggagtctcgctcttgtcacccagactggagggcaatggcgcagtcttgtttcactgcaacctctgcctcccaggtcaagcgattctcctgcctcagcatcctgagtagctgggattacaggtgcatgcctccacgcccaactaatttttgtatttttagtagagacggggtttcaccatgttggccaggccaactcctgacctcaggtgatccgcccgcctcagcctctcaaagtaaaattttaattagttgccaacatttaaaaatttggagaatttgcataaaaatcctgatttctaatacagaaaaaatctgaagatctgggaccaccatactcaacaacagtaagactggctacccgtcacgatgccccagtcctcaccattccccactgccttcacaacactgaggctgggtgttcgtttttcttacacatgtcccaaatcccagcttgctcagtcacgtgccctgcaaggctgctgagctaactgagctccccagtcccaatcacctttaaaactctatgactatattcctgacacttcttctttttctctaaatatatctcattcttgggtccttttggcagaaccacccaccagtcatcacaggagttcttaggcgtagctgcacatttgaattactggaggaggctgtgagaatcccagtgtctaggccacacatggtagtgagatccaggcagcttttaaagctccagatgattccagtatgtggcgtaggttgagaacttctgcattagagctgaaaatgcaatgggctagtttaggagggggtgagctccctgttatgggacgtagttaagccaaggtgcatgaatactttgcagggatctgtgagaggatctcagcatcagctgctgctcttctgagattcttctcctctttacagtcctcctgcctttgcccctcaaagcctcccaagcttagctccgttgagcgtagatgctgccgaggtggtctaggcaagggctccttatccaacaaaccccaagctcagcatcaaacatccccgagccagcaccattcctcctgcctcctacatattagctgatgactaagcaaagggccgtgtggggtagtcccaggacaatcacattagaccaaccacattcctagccacccacctatctgttgggtctgcttcatgaaggtgaaagaacaaggacttggggtcagaaggcctgaaaggaggacctggctcttccccttgccatctgagtgtgttgctcaatcctcgtgccctgtgtggagcctgggtctgaagtgtgggcctgagtcgaggacacgctgtaaagtggtaggtgagggtaagatgctgagagagggccagatctcagctgggtgatacagagggaagggaggagctgtgcagtgtggttaggaaggtttggagagmgagaaaggggcatgaaatgggcctttcaaaygagacatttagcccagagctcagagcaaagtggagacatgggccagttatctaataaccctgatcacaacgcagcctcctaaaaattccaaggcatcttgggagttcttgagagtggcaccagttctgtacgtggccagtgggacaccccacccatagtctgcccctcacattcccagaacttcttggggactggtaccaccccgccccagccctctaccccaccccatagaaaattggctgtgttcccctggaatcacaaatataagaggaaaaagccccaaaaatatatatctcttctgggaagcatcctttcccattctgaaataaccatccacttcttcagccgtcatgagccatagcacagagacagcaggaragataaccttccaggacsccagagctcagtgtgtaaggcaggcatggacactgcagcccctggcgcacaggtctccatgggtgcccagagggacaaacttagcacagctcagagatgggcaaaagctcaaaggaatctcaatctgagccttggtagcaggaggcacaaggaaatagcgcagtgccatggtagctgtgggccagaccttctggggagggtgcaagtgttggtgggagctgaagctggagggtggcacgggccaggtcttgcagagtttctgaactatggaacttggattgtatgtggagcagggagagatttcggagaaatgcctggggggctactaggtggaggacagatcacggtgatgggctgccactgcagagacttctgagagagagcacagggaagaaatgacgaagatctcagtgtccacaaacacttgctcctgttatttttcaattgcactgtgtttgcagttaccagccagagccattgccctgttctgtgtctgcctttgtccctcccttgggtttccagttgaaaaattcagctgcaaggaagtttcttggcccagacaggatgaaatcagagaaagtgcgaggaaaggggtcttcgaaagacaggcttatgaaacaaccgcggttgtctaggggccacccaaggaggctcctgtcgtgcccgggagaatcgtgttcactccgattctggccacctaggaccacagccttcatcagcaatgtcgaaggggagattcaagtcaccccagccccatagtcgggatggggggtgtgagaatgaggattctcaaaatgcattttatttcatcaattgttacatgattaggtgactcactgaacttacataggttattgataatctataacctcatctgattcacaggctaacacctcctacaaacacacaaacaaaaaggatttaaggtcgacactgtgggatgttttatgggtttccttttatgagctgcaaaaggaacaattttgcaaaaataaagaagtatttgggcttctagaaaacctgtccctcccaccccaacctttcagctaaaagcactaaatcatrttaaacagtttcatctttcagcaatatgtaaatgttttctctgacatgtctttacttctggcctgaatttaatgggtgtgtttgattatacagtcacatgcatctctgtggagatgtcaacagaaaccatgctggccttcactttagttagggagggcaaaccatggagtttgcttgaggacagaaagatgtgaattgtgtctggtctagagacacaatggtaagaaatttgtggtaaggaaaatgtcttcccaccaagccataagcattgccttttaagggattcagcctagggtaagtggaagcttttactagaaataaagacattrgaccacacatcagcatgcgttctgagtcccagagggagaataactgtgatggaacgtaagaggatgacaaatagaatggatgttttcccactttgggagaaagttctagattttcttggaatgttgagacctggaggatatcttggagatcacctagactgtgactcatcattgcataaatgtgaaacattaggttcagcagagagatgtgacttgctcaaaggcacacagatagttggtgaccaaactgtcactaaaactcaggtcttgagttacttcccccctctgagcatgtttcttagtctgtggaatgcacatagtctcttcctcactgcattcttggctaaggtgcaccctgcacccttctctcttcacttctctttgtttcctctcgtaaccctttaacagacgacttgaggcmggaagcggggactctgtttcagaggtggatacaccaagatgtagtgagcagtctttagaagaaagagagtgggcagaacccagccttgcatggcaaaccagtgtccagggcccccagggtagtcacccttggtcagagatgggtatcagagagggggtcctgcagcagggacagcaaggaaatctgaagacgctcaggaggcaaggatggaatcaggaatgcagatccgcraggggacgccctgtgggactcttggaaaggcagcaggcaccacacaagagccagtggtttctcagaggtcagcaaactgctgctcaagggccaagtctggccacacccatgtgtgttgtctgtggccctttcatgctacagctacacaacggtcaagtagtattgggattgttgtggcccaaaagccaaaamtattgatcatctagccccttacagaaaaaggttgccagctcctgcttgagctgtccacgggcctgagttcaagtcaagtgctgcccctttctacccaggtaaccttgggcaagccatttttcacctcagagccccatttctgcatctgtacccacaacaggtttgttttgagaatttcataaactcgtgtctgtgaccgcatccaggctaaggagcagttcagttgcttcatgtgcttgtcactcctctgtggagggaaccagggatgtgtagcttgatcggtccctggagtggcagaaggcaggctgctgggcaggataaaatttttgtcttcctggaaaggatgactcacagacccatgtttcttttctttttttttttttttttttttttccagatactggctgaccaacaaagtccacatcaaaagacccaccaccggcctcttgatgtataccctggccacacgtttctgcaaacaaatctacctctacggcttctggccctttccgctggatcagaaccagaacccagtcaagtaccactattatgacagcctcaagtatggctacacctcccaggccagcccgcataccatgcccttggagtttaaggccctcaagagcctacatgagcagggggctttgaaactgactgtcggccagtgcgatggggccacgtagggtgggcaccccatgggactcagtggctcacatttcctgccagctacaccacaggcagatgggagtcggggtggcacaaacaatagaacaagcaggctagtggttttctttgttaaagtgtaaaacagtgaccagaatatatatatctatacctgcatatatatattgacctgagtatttataactgtgtggtgttcatctagcattaggcagataggccacaggaagaaggtgtggagaacccacctgaaccagattgagactcaatccatctttgggggtggaaggacttgacatgaaaagaagccagtcccatgactttggatgacaaactgcctcctggcttggagggatctttrggctcatggatgaatggcgagccacctgttgtcagctgccccaagcctctgggatatgtggattcggagaaagctgaggcccagaggggacactcgacccagtctaaagtgggtgccattcacggaggagagggaggttggagacttcaaccgggcaaaggagcacaaggaaaccaagcagcagaggccccatsagcacagagggcctcgttccacgaacgtagagtttgactgcctaagggacagcacgaatgactcacatgtttcagacaggcctccacggctatggagagaaggctggaggagacacaatggatggttcatgttctggcttagcaagagccaccaagaactttgggtgaagcaagcagatgacaatgaagaggagtaatgttccgaatcatgtttttgaaaaatcaagacctcctgttaagggcccacttgaccctagaataaggcaggagagtgtctaaaatctagctgctttgggtgttttttaaagcaatgtgagtccactgaggaggaagagaccctgggatttcaccctctgggttagtctctgtctcaccctgttagaatgtcacgagggactgtactgtcccctctgtcaccagggaagccacaatgagagcttgaaagggtgctgtcaagataaatgtcatccttcttaaaatacatatgattgcctttttgggtgcctcacagagccccagagtgtgagacctgaaagaatgttcagcatctagctccatgtccctgcaaccactctctgtttgccttctgcattctgcactctgcggggcctttgcagccagactgctgtgtcaatgttactttcttgtcactttcctaccctgatggtcacactagcccaccccaagctccgacattgaggttttcatctctgcagggagaggttccaatgtccaccccacccccaggtacccgcctcttcccacagaagcaattttagaattttgcaaaattcttttccccttattgagattaatatttaagattaaaaaaaaaatacccaaagccaaatgcagttccaaatagtggacataatctcccagggaaatctgggctcgaggcctacaacttaggggctggaatcacaggtctcacatagagaaatagccagcttgaatttgttagtcgtattccttcacctgatgaataacagtgttttaaaacatatttgaaaggtaagtaaaaaactaccatcttgaaggtgaagggagttaagaaaagtaatcaagacctgctcctaagcatatgagaccagatgtaattaatcaatggcaatgcagaacaggaccttggctctaaattaatggttgaccggaagggattggaggcggcagaaccattaaccctacacaagaacactccagcccaaaaccgtgaggaaggtgatatatctctgcattttcccttgttgttgcttgaagtctgtgattggggatttgcgttataaaatgaatattttaaaaagcaacagccctaatagcctctgtgggaactgagtggtttcggactcctcacaggcggtggaaataattaataccatattttatacatctccagagcctttcatcttgaggatctcaaagaccgtagaagacatttaatttctaaagcttgaagtgccccgaggagcaggtagaatttccagcagggccttggtggattaaccaaggccttggattccagaatgtttcatggtaagcactgtggagaacctacatgtcaggttctggagttggccctgagctctatccaccaagccagcaccccaccatccctttgcaggggagtcaaagggccagaactccttgggggaccagaacatggttttccttctgcctatcttagtcatggctcctaaaattgaagctgatatgagctggagtgcaaggagtccttccaccctgccttcaggttctctctggagaaaggttagagaccccaggacaatcaacatgtgcaccgttcccctcctcggcttgagtcctgcactaccaaaatggcctggccatttgatggcggagctccaggggccttggctttctctggctcattgtccttctccatctgggccaattgtccttccctgcccattcagagttcaatttgagcctccactgcagttcctggtgtgggccagctggtgttgggtggccccagggagtcacacagyctgtacccggccccgagatcctctgctgtaactgcagggtcacaggcatcccgggagaatgggcctccaccctcagccagccctcactgctgacaggcacccctctgtcacctcctgccacctgtcagatacccagcctgcccgccatcagccacccgagtggttccgacctccattcacctcaagccccaacaggcccctgtcattccacttcatggaagagacggagccttctgaaatgagatctaccctgaaaatctcttctccttcccctttctgagaaacgtcatccccaccagttaacgtttcctgtacaccctcaccctctctcgtccatctctgttgcctctgcacatcagcacacactgactccacctgggctggctcctgccgcctcttccctacctcctccactagccgcaggaagggcctccagcacccacaactgcccttcctcttgatgcccctcggcttccccccagcctggcagcagcgtcccagcgcctccacattgcccctctcacctcccagctctccacgccacttggctctgcagcgacccctcctagacgctccctggcccctcggcacccagaatgccacattcttgtgtttttttcctccttctttcccaatccctctcaaccatgtatttatttatatatgtatgtatttttttatttattatttatttattgaaacccctactttgattgacaaaggaatcaaggtagatctgaccagtattcccctctcttctccttgtcccaccacatggacatgccttacactggcgtcctctcctgagtccctccgcactctccatcagcaacctcacacctgccttcagacccggctgcaacttcctaagctgcccctgccccagctcctctctgcaacccagccctctcctgagctctaggctgggattacacccgctggagggacactcaccccrtctgctcccacggcagcaccatcaactcaacaagtcagaagccaagtggatcatctgtgtccccttcccccacaatccctcctttttctagtaaaagacccgtgatcccgtcagccacccagtctgagatgctgacgttatcttcgactattcttccctgtcctgccttgctaattcttcccactagcactaatctcgactctttgtcacttggactatttcagcaacagtctcatctcccagattacctctgtgcacactgacacgtggtcccgtccatcctgaacatgcacagtgattttcctctcccgttgcacacaaacctttaaaagttccccggcccgtgaacaaatgtacaattctctattctgacattacagaccaccggataaggccccattcttcctttacaccctcccctggtcagcctaggagagttgtttttcctggaaagggtgcctgcgttttactgtctctgtgcctttggtcttgctatccccatcccctggaatgctcccttttcttcccttcaaagcccatgcggaaaccacgtccttcatgaagccctccctgatgtaccaaccactgggatctctccctctgctgaaccaccgtagcactttatttgtacctttctcatggcacttaccatattctgccttgtattatagttatttgtgcacttgtcctttgactgttcttagactgtaagcttgccaagggcagggactgtgttttattcatctgtatccatcacagcactaggcgtggtgcatagcacacagcagttgctcaataaatgtttgttggattaaatccttaatacctgtagagggctttatacttaaggaagtcattttgcatctataatatcacaagaacctctgaaaaatcatgtgggttggaccaaagcagaaatcattatccccgttgtataggtcataaaactgaggccaaaaacctgcatgaagcctcacggcttcctggtagaatgttcatccaggtcttctcatcctcacttcagggcttttcctgttcatctttgtggttggatcactgtaaactgaaaactagccctatgcagaggcctagacacagagacccaacaaacctcagcatgaaccccatcagcacaggcaaaatctcactcctttctgggaaggacgaaagccatttgggttttacgagtcctgggaggtggagttataggaccccrtcagtcattcccactgctgttgttgagggtaggaaaccatccttccagatggcagggagactaacaactccagggggctgctttttgataaatctcttcatgcctaattaaggctccctctccagaatgaatggaagaggatgtttactgatgccagtcagatgggactccagacatgtgtactgcctcatgaatgtccttaatgctatccccaatgacactgacagcctgccccagcctctgtctctcaccaacactgccgaatgtcrtctcttstcatctttatctctattctttgcttcctgtcttcagggctcttcccttggcattcaccaggagcagagtgagcccagagagctgagtggtatcccttcttcttgggtccctgagccctgacctggagcaatgctgtgagacagcaggaaaggaggggagtgtggagtggggagcactatatgccactcctcatggaagcagaaaaaaaaacaggcttttgttctggtggcaggtcatccacaacaatgggatgtttccatggttaccatctagaagcaatatcttagttgtttggggctttatgatgggggtaatgtaatttctgttcttagcaatccaggtgacagggcaatttccatatatagtccactgagccatccagccccagatcatagtttctctagaatcgtcctagctgtctgcagccaaagcccaatagaaccacccaacaaagagcactaaaggtcccytgtggcctttctcagtcttcctcaccatttcctcagccacctttccctagaacctgggggatgggaaatggggctactgtgggcttccaagaaccatgccaacaaagacctcaagttctccagtcatgacaacatttttaaatatttaaaagcattctccaaaactgacccagaaccagctatgagcggccatcccttaaggaattaatagaaaatgaggatccaatggccaaaaagtggaggactgccatgcaacccacatggaccctagagtgatgggtccaggcagtcatggggggagtgcagccctccattcagcatgctgaggcaagtcaaatggggttggtgcaggaaaacgccctttcaatttgtttccaagtgtctttattttctaaaatgagactgtaatggtggagctgctggacaaagtcaatgaagggatgactggcccgtcagaatcatgartgcttaacagaagctgtgtgttccagggaagaccactctgaggcaagctgttttactgcattctcattccagtggcctaggtgggcaagaatataactcactgtaataacaacagcgggacaggttgcttggctgtatcttgtgttcacaaatgccccatctctggtcaggagctctggaaggagtaccagatgatctgaaagcctgccactcaagaacctagagggcatgaatgagacttggctctggtatttttccatctgtaaaatggagaagacacctaccgacctcctttatgcagttattgcaaaaatgcaaatacaggacaaggtagatagagaaattgggtagagggagtggggatgctcagtggtataaagcaagtgaaatgtatgcagctgtgagttttcaggattctgcttgtccaacatcagatcacaccattgccctgcttaaaccctcagtggctttccttcatccttgcaagaaaattccaagcatcttaccatggcttacaagaccttgagccctcctccctctggctccctgttattctagtgtcagggcctttgcacttgttgcgccctctgcctggaaatctgcttcccagctccttgccttccctctctgtctcatctttcatgcttcaaattgaatgtcacctcctggggagcctgctccttgtctccctcagctaattactttctattacacgacacattatcctgctaggtggtcttcataaactaaattatctcatttattttgtagttctcaaccccaaggaccctcctaaaagatcccagtgctcaggccacactccacacaagtttaaacatctctggaagctgatcacggacatcttcctggctcacggtcagaactgagaaacaatgacatatctgctcactagtttatggtcyacctccacttctaggatgttccaggggtacttgttttccacaggggtcacctatgccctggaaggtggaagtggccctcctccaaagtaattgttgatgactctgcctggggtgctggcaacaggcttgcaatgtgaccatatccctggtgctctcagcaggtacaggccagctttgaatttcccarggatgacactttaccccctgcagctccagataaatgtccagcatttttacccattagctgagctagtgggtggaatttttccagtccccatttgacccactcagagaatttcatgagccttgccttacccaggaggctctttcctggcttgtgcaggctttagaactccaccccctagccccaccccaaagacctttatgagctcagctggacattggaaccackggaggagctttaaaacctcctgaaacctaggtctggccttcagggaatctgattccttggtctggggtatggcccgggcatctcctgaagctcaccaggtcacacagaggtgtagccccagctgggaaccactgacccagactcagttcctgaatttctgtgaccgcttccatggcagcccctctcaggcccctggtgtgaggtctttcttttgcttctggcttctgagagtttcctttcctgattccaggctgggctcggttttgtctggtgggtttttttgccactgccgttgtgttagtggcatccaggtctcyggattactrcatgcttgmagtgggaggaaaggcctgtctaccatgttctctgcctccccttcatgytctgtgaggagaggggccttgtctggcatgttcaccgaggcaktcctgaccactagaactgtgcttggcacagagtaggcacttaataaactcctgctgcatgaacaaaagaacaagtgtggatgcttcaaaggaagacttgcacccgrctgacccccagagtggggaaggggtcccacctaataggaagaacaccaagacttccccaagaggagaaggaacggctccccctttctcggcgaggccatgtgtctggaccctgtgtgagatgctttctatactagcccttgttggggtgttgcacccattttacagatcaaacaaccaagtttatcagaaattaaagactcatttaagatgccaaagctcacgagtggatggtttgatgctgaagccaacattgttaacaccatctcagctcaaaagccctgaaggccacttaattctaccaaccttcaaccatcttgtcataaggtgagcctgcactcaggagtgacaggaagacagaactcaccttcctatagcccagactcctcacaggctactgctccaccctggctcttcccactggcaaagcagatacagacccagagcacacctgtatagcaatgtcaattgttcaaatgcttccttgccaggtggtcaagagccacagctctgagcaccccctgtgccctgtgctccagcactgtggccaaggtccattctgattggtcaggggccctctgtattggtaaatactttgcatatcacccctgctcccaggttctccaggcaagaaactaggggccaggtggccgatttgggcgtttagaccactgggcaagacaccagagcctcactgcactgytgtttctgtggcagctactttgggtgactggctttcctctcttgttttccacagacacatcctcgacccaaagcagatattctgtgtagctgatgtgtgtacagattgcaaattcaattgcggaagcatagagaggcaccagaagaggcatcttatgagagtcagccaggactggtaatgagcaaaccatcaccttgaatagcctctgagaggtacacagtgaagggccagaggatgacagaaacagaaagagggtctgaggaccagaaragaacaggaaatgttcactgagcactaactagacgctttacatgggctagatcatttaattctcatagctacccatttgaggttgacattattattattctcactctgcagaggaggaaactgaaccaagaggttgataaacttccccaaggccaaaaaactgggaaatggttgagcaggaatttaaactgaagccctcaggttccagagtggtgcaggaagcctctaagcttgaccttgatctgcagccactgaagctgatgaaggtcataaaatggggataaataacaccagcttcagagggggtgatggaggaaggagcagtctagtcaaagtgctcagtgcagtggctgacacacggcagacactcagctaatggaaggtagctagctactcgactcagggtgttgcagaaagacaaagccatgccaacattaaatgaggtgctgacattaatttaggggtgtggtctgttctatcactatgatcctaactgcagctttcaggtacaggragacagagaaatgtacctattttgctcaggcctagaaactgaggcctgagatcaagccaaacccacagcattagacttcgtaggtgagtgatccagccagttcccacagttgctgtccccacacctggctcagccgccagcgcctctccgaccccagctgtcacccgggtccacccagtggaaatgctcctagtgcagaaccagcgacaggctcaggctacatagccctgggcccatggctgctgcggctgcctttcgaatttgccagggaagctgagcatccttctttgcacataccgggccacttggctcagtgtctgaggatgagatgggaggcagccaggctgctgggaaaatgtggaatcactctctggcagaggccagcctggaagcgagaagtgaaatcaacaaagcagaggacagagcaaacgaatgaagagctggagagcgaaatgggctgctaaagtgcagggcattgtccttgaatgctacaagacgctaccagctcacctaatcggctcccttgctccaacagcttgccttgaaattaagtgtttgcatcaggctgggttactgcagggaaggggtatcaggccctcctttgcagcatcagggaaaataggggacctcagatggcccaggccctacccctgcctcctcagcttcctgactgagcagagtggatccagccactcaatgatcagtaaagtggaaattaaaagcttgccgggctgggttgctcttgtgattaaactagatatacagccttaagttcttcacccactcagagcattagatgcttggcaactcattgcttctcctctggggctgctttctcaggccaagggggcaaggactagttggtggcaagttctactcagtttgtacctagctcagcctaccttcttcactgttgaagcaagcaggcatggcctggcatgcagtaggtgcccaataatgaatgaatccctgttgaatgaatggatgaatgctttccagtttactgaaatctttcatctttggctactcaacaagtaggctccccagacctcagtttctaggcctgaacaactgagggaacagaaatctctgtctccctctacctgagagccacagttaggagcacagggatagaacagacagcaccctcaatctaatgtcagcacctcattgaatgttggaatggctttgtgttcctgcagcaccctaaatgagtcaagtaaccagccatcataccttccacttgttgagtgtctgctgtgtgccagctatggcatcgagcactttgattaggccactcattcctccaycaccccctgtgaggctggtgttatttatctctattttatggacaaggcccatggcttgtcccatagctagtaagtggcagaacagggatcaaactcaggttgaaacttgcttctaggaatctctgcctccctaatctgtatagcaattgaagcctattcattcgttcattcattcctctctatcttagtcagtttaggctactataacaaatataacattgacttggtggcttaaacaacaaacatttatttctcacagttctggaggctggaaagtccaacatcaaagtaccagcaggttcagttcttggtgagagcttgtttcttggcttgcagatggccgtcttcttgccatattctcccayggcagaaagcagagagacagaggcaagctctggtgtctcatgtctcttcttataaggtcaccaatctcattcaagaacgycccaccctcatgacataattatctccccacctcctaatacctcctaatactatcacctgggggctaggatttcaacctatgaatttcgaggggatttcttcacccattcatttaagaaacatcagggagtgtccactagacgtcctggcatatgaacaccctgtgtttgctcctatggggacttgccatgcagtggtaggagggggagagagagcagacacaggagagcactgtaagagctgttgtagaacaatgagcatactgctgtgtagagagagggagcacagagggaaaggagccyggaactctacttgcaggaggttacaccagagagggcacttcaggggaagcttcacagaggagagggtagcctttgaatacttgctgctgtttccccaactcacccatttcaatgccttcctccttaacttatccattctctctaggaccatctttactgccgaatggaagcagaactttgaaataagccttaggaacgtagttcatgtgcccatgaagggagctctcctttcctctacagacacaggctgcaggggaagagtgaaggctgggacactctgaccctcatacccccacatccaaagcttcgcacccttctagctgcagggctgtgaggtttagyacacatgcatagtacacaacctacactgatgcgccacccaatagatctcaacaagaataggtcaagaagaggtctccatgtgtgtgccaaagagtatgtgcttccattcattcatccagcttcacagacaccactgagagccagcaatgaactacgcctgctgtggacgttgtaggacacacagtccctgcctcaggaagctcaagtctaaggggggaacaattatgcacagccaatggcagaatgaaataaagaggaaatgccaatccaaccaactgagggggttcagaggattcacagagaaggtgatagataagctggaccttgaagaatgagtgggattttgatagtgggatgttgactctctggtctacccttctgggaaacctccaccctcttcagtggcagcaaggaacagaagaagcattcaagacgctagctatcacactgctgccaaccctggccaatttacaaaagccaccaggggaataagccctgccaccattgcccagcctccctactaggtcgtgatgatgccccaggtgaggccagctcgattcacgaggcccttgatttgtggataatggtctcagcgatgccagaggagggagaggcaggtgcccacacagtcaacattgagacctgcagcctcaccttgtttttgtccaacccaagtccaccccttcatgccttcattctctttcctctgcaccctcccccaaggtataatgagacctcaatgctccacttctaatcatagttttcatggtttgtttatggatcttctgattgtaataccagtcaccaggccagccattgagggaatgctatagtttcctaggcttactgtcaattgcakaagcaattgagatgcagatcagttttctcctggtgtttctgggggaggatggatgtttccaactaccctcctgtgggagtcaaagtggaaagaaatggggagctgaggatgaaagtggtggctgctccacagatcactgagctgggcaagtggggcccagtactgtctctaaccacagccaccagcatggggtgggggctgcctggcatgttctcagctgcaccctctgttcgactttcaacgtccacctgtgctttgggtcaccccacacgtggccttgctaagtggctctcccctcttcatcacatcactttctcctagtccttatagaatgagacccactctcttgatttacttaacacttttaattcyaccaacataacagaactatgcccacacacatataaaaataacactattcctttacaagccgcctaaatcatttctaaacaaatacatgttcattacttgtcctaatatacacgcttcctccaaaataatagcttttctcatcaaatctacccaacagtagatttgggtaaaactaaatttgcctacagaaaaagtaggcattagagggagctggatgcccttaagtcatgactggcaggctggcatgggaatccaaggtcactaataaaaggcacacaaaagtcagagcccaacccagcaaccacaagctcctctgactacgtccaagatggccctctcatcttcccgggcgcgaagtctgctccctctcatttcctcagccatgggcttcactgtgcccaggcttcaggtatagcggcttcatttgcctgtccatcttgggctcaccctgccataacctcccctagctcaagtctgcttgtgattcttctctctgaccccacacaccragtagaccccagagtggctgacscctgactcttcctggggagcctccaaagaaatcattcctggggcagtccagatgggtaaagacaggaatttcctgggccccaacccccaggcactccattccagctggtgttagtgccgaaggaagtgcattcaagactccaaggaaaataaaatctcagatatgaggaaccatcttgatagtatgtaacactgaaattgcttctctcaaccccaatctgagtagccatcaactgataatggaagagacacatccctgttacttgatgaagtctctcttcatatttgctcccttatcttgattgattttgtgtagaaaataagataaagactcagagtttaaaataaggctttgtcctttacctaaaacctgcatggaagaaggaggcgaagggaacattcgcaagcaggagctgattgacaatcacattgctgaatgtatcaaaattatgggctttctattatgccagggtacagcctaagaccctctctgagaagtgccttgtggtctggacaggaggaggggcttcatgcttctctgcagataaggggaagacaaattgtataatttagcaaactccaaaaaggctagttgaatgggatttggataacattcatttaaaaggggtcaggatgtttgtccagcaaaacattaaaaagctatcgttttgttgagattatagatttcttcctctccccgcaggtcatatgggtgcacatctattatggagtaaatctctttatttcaatcatctcttctccggctacagtctcatgtgcatcagcactaggaagatgatttttccatttgggttacatttttctttgttaaatttattcttcttgagatcattccactgttaagaatcccttgtccagcagcagggaaagataaatatttctttaattatcttatttataaataagattataaataagataaagataatatagataatatctacagatattttgaaatctcacttcttactgcgatgcctatgatttcccatcctctcttcctcgagctctactggctaaacctgagccaagtcttcccaattcttagagcaacctcagttgttccaattagagtccccggagtctatccttcagatattcaaatgtttctctttcttactaagaaaatataagactactcattctcaccttctttttgcatttttttgcactttattctgcagatatgttagtaagattyggtcaggaaaacagaaacttctccaagcatttcaaataaagaaggatttaatgcagataatttgaggcttaccacactgttggatgaactaagagaatgaaagtcagaaaaaactaccactaatttcaggaaattagaacatacaggaacctcaggaagctgccaccagaacctgtgtctctcaccacccmaaagagggtaaactgtagcaggaggtcccgtaagccactggcgaaacctccggcaggtctactgtttcctgactcccaggtgattctgtcttgttgcaggaataagaatgacctctgttgttcttctgcttttcaaatcatgcatgggtgcctcccattggtggagtcccagtcagagtcttgctggtatgggatgccaggaaatgcaacagttcccagaattccaaccacacaaatatggcaaagagctttgaagggagtggcaatgaatgttagtttcctaaatccagtacatcggaggtccacaattctctaagaactatgttaacagccatatatatatataatttgcttttttaaaaaaattatactttaagttctgggatacatgtacagaacgtgcaggtttgttgcataggtagacacgtgccatggtggtttgctgcamgcatcaacccatcatctacattaggtatttctcctaatgctatctctcccctagccccccacccccttacaggccctggtgtgtgatgttcccctctctgtgtccatgtgttctcattgttcaactcccacttatgagtgagaacatgtgtgcttggttttctgttcatgtgttagtttgctgagaatgttggtttccagcttcatccatgtccctgaaaaggacgtagactcatccttttttatggctgcatagtattccatggtgtatatgtgccacattttctttatccagtctatcattgatgggcgtttgggttggctccaaggctttcctattgtgaacagtgagcagctttatatatatcacccacatttttcacatgaggcaatagagctcagacttcttaggtaattttgtccagggacacacaaccaaccagggatcacgagtcagatttctgagcccatgctctttccacaacactgccctgcttcatacaataatctaggaaatttctacaacctatcatgtccttcctgcagtgcatctgcagtgcactgccaaggacaagtttctcccaatccaggggcctcagtttaggtgtccttatttctcagcatttccatgcagctatgtctcccactctctagatgttctttcccagatggtcctgatgctggcactgcatgtctcccccaccaacttcaactgagccctagttgtctggtgctgtctgtgagcatgacattttttgcctactctcaacttgacattgttaatcttcaagctagagcacagaggaggagtcctggcaagcctctgctctaacttcccaggtgcctcttcagaagttctgcagatggcctttgaaagtcggctagtcgccagtccagtctttcaggaaatactatggggtttcccaggattatgatcaactgcacaggccactgaggtgcagatcagctttctccttgtctttctcgggracaatagaagtctctcgccattgtctcatggagtaaaactagacagagaagagaggctgagaagaaaagcagtagtagcttcatagataaccaagccaggtaaacatgacccagtatttttttaytctggcctggaaagagaaggacttttctttgacacgaagagcagagtctaagcacctcatgatgtcttcagccagaatcccaccaaagttcttacaatctccaggagacttggttttccattccaaacaaaggaataattcttactcaccctgtccatgggaattaaggatgtgtgatgaagtcctaagtcagagctcactcccaactacaggaagagatgaatgacaggaagaaatgcagcactctaaacagtaaggtgctccacaatttgcctctctgttaaaaagaaatgtgagggtttggaggggggtacgaacaggagtatccacccagggtctgccaccactatttggaggtcatggaagaggacaacagagaaggccattctacaaagtgatgacttttcaaaagtgtttagtaagttggcatgacagtcattaagactcatgaaagatgaagccaggtgatcacttcttggccttttggctaagatcaagtgtgaaagatgaagccagatgaaatcaaacataatgacacataacgacatggtagtgttttatcagtgcttataacctcacacccaacagcatagatgccaacagagctcatctctgggttcactcctccataggactctctagccatgcttctggctgtaccgggtcttgactttgaactcagcctattttaaaatagcatgcacaatgtgagggtctagaagctggggcacaaagaggtgccctgcctgcttttgactcaggcattgcccttaccagttctgagagagaattttgagaacaacatgatttctattctggaattgctatgaggtttcccagggaaacactcagtcataggctagactcaaaaatggatgttctaaaggcaggaaacatttagatagcaaggagaactgttctggatttataattctggcccttgattcctatgcatgacactaggcattgccaccagggcttaactcaaaaggccttggctctataccagaggattaaataatgtcaaatgttckcacatatgtgtttatagggggtaggtccaagatgcctaacatacatccagagtagacttaacatcagtgtacgttaactgagtcccaataatcttctcaacattataccagggttcagaagccaaatcccaagcgcaaagcattgtgtttgtcctccctttggaaagtaaaacaataacacacttctactggggacgcaatgaagcccgtgagagcctatcccaggctacaatctccacatactgtccctgtgtcccaatacactcccctgacctctccatttattctgccgtattctccatgcaaaatattagctacattgcaatgtgtttctggaatggggtctcttatgactctttataaggaggacaaacttggctttcatcaagctttaaataaatcacagcatctaaattggaaaggaagaagtcaaattatccttgttcatagatgacatagcatcatatttagaaaaatttaaagactccaccaaaaaactgttagagtggataaacaagttcagtaaagtgatttttcaagttacaaaatcagcatacaaaaataagtagcatttctataccccaacagtgaacaacctgaaaaataaatcaagaaagcaatcccatttacaatagctacaaaaatagtataataaaatacttaggaataaatttaacaaaggtagtaaaagatctctataatgaaaagtataacacatgatttaaaaaaaggtggaagagggcactcacaagaattgaaagatattccatgctcatggattgcaagaattaatattgttaaaaagttcatacttctaaagtgatctacagattcagtatagtctctactaagatgccaatgacattctttacagaaatagaaaaaacaatcctaatattcatatggaaccacaaaagacctgaatagccaaagcatcctgagcaaaaagaacaargctggaaacactacttgactttaaaatttaccacaaactacagtaaccaaaacagcatggtactaacataaaaacaagcatatagaccaatggagtaaaatagagaattcagaaataaatccacacatttacagccaatccattttttacaaaggtgccaagactatacactagggaaaaagacagtctcttcaataaatggtgctgagaaaactggatatccatatgcaaaagaatgaaactagatccctatttctcaccatatacaaaaatcaaatcaaaatggattaaaaacttaaatataagacctgaaagtatgaaactactagaagaaaagattggggaaacacttcaggacattggccaggaaaaaatatttttgtgtggataagaccttgaaagcacaggcaaccaaaacaaatgggattatatcaagctaagaagtttctggcctggtgcggtggctcacatctgaaatttcagcactttggaaggctgaggcgagaggattacctgagcccaggagttcaagaccagcccaggctacatagtgagactcccatctctaccaaaaaacagaaaaaattagctgggtatggtggcatatgcttgtagtcctagttacttgggaggctgaggtgagagaagagcttgagccggggaagtcaaggctgctgcagtgagccatgatcgtgccactgtactccagcctgggcaacagagcaaagctctgtctcaaaaaataaaaataaaattaaaaagtaaataaatttttaaaaagcttctgcacagcaaaggaaacaataaacagggtgaagagatagcctgcagaatgggagaaaatatttgcaaactatccatccaacaagaatatataaagaatttatatataccagaatatatgaggaatgcacacaactcaatagttaataataattctattaaaacgtggtatatgtacacagtggaatgttagctgaatacagatttttcaaaataagacatccatgtggctgacgagcatatgaaaaaatgtttagccaggcatggtggtgcacacctatagtcctagccacttgggaggctgaggcaggaagatcacttgagcccaggagttcaaggttacaagtgagctgtaactgcaccactacactccagcctgggcaacagagtgagaacctctctcaaaaagaaaaagaagaaagaaaaatgctcaatatcactaaataagggaaatgcaaatcaaaaccataatgagatattgtctcaccccaattaacacagctattatcaaaaatacaaaaaaataacaaaagctggtgaggatgcagagaaaggggaatgctagtacactgttggtgggaatgtaaattagtacatccattatggaaaacggtatggaggttcctcaaaaaaccaaaaatagacctaccatatgatccagcaatcccactgctgggtacatatcaaaaagaaaggaaattagtatgtcaaagagatagctgcacacccatgtttattgcagcactattcacaatagctaagatatggcatcaacctaagtgtctatcaacatatgaatggataaagaaaatgtggtatgtatacacaatgaaatgtcattcagctataaaaaagaatgaaatcttgtcatttgcagcaacatggatggaamtgaaggtcatgtgttaaagtaaaataagccaggcacagaaagataaatatcacatgttcttactcatatgtgggaactaaaaaagtggaggtagagtgtaaaatgatggttacctgaggctgggaagggtggagaggagggaggaatgaagagaggttgattaaagggtatgaaaatgcagtwagatagaagaaaccagttctagtgttcaatagcacagtagggtgactacagttaataataatttattatatatttcaaaacagctaggagagaagatttggaatgttcccaacacaaagaaataataaatgtttgaggtgatagacatcctaattacttgatttgatcattacgcattacatgtatatagcaaaatatcacatgtaccctataaatatgtacaattatgtcttgattcaaaaaaatacacatacacacacacacacacacacacacacacacatatgaaacaaggcaggttctaccactgttcttggattggctaaatcatagtaactatacagatattaaacatctaaaaaaataattttttttaaaattaaagaaactcttaaacattaagcaacatgatgacttttctgagttgaaaaagtccatgataaggccacggtagactattctttcacattctaaggcttatggtaccagagtaacagtacaacagttttaggtgttgaggggatatttgatggataaatttttgttctggatggtgagaaagaaaactacctttctactttcaacactcctcttcgaggaagcttcctccaactgaccatgatctgtcatctacaaaaatgcttcaaasctaagaaatatgcttatcaccctccctaatgaggaggaatagagggtgaattaaaaaatgctttttatttttgcttcatgaatagcagtggtacagaactgttccaagttccaagtaaaaacaatttaaaatgataagatatatgtaggattccagtcatagtcatccaacaaaaaagcccatttcctaagaattgtgggaataggactgtataaagatggggatggaaagcatccatttaactctacttcctccagaacccccattaaaatgataaaaaggaatacaaatccactggcacataaataattggagagaaaacaagaagagacatttggaagaaaaaaagcagatggatgagtgggaattgacttggctacgctgtaagctggcttcaggaaaggaggcaccaggtgcccatgaatgtgaggatgaagatgagactgaaaacagaaaaactgattaaaagactttaaaggagcaattaggccttcaggttgcctctcccctctgggaaactggaaggtggcttctcaaacacccaacactggaaaggctggagccaaaaaactgtgaacaccagggacaggtatagaacaagggcaccaactaaaaacaggggctgaatgactatgtccgtactgaatgctgatagagcccccacctccaacccagattctatccttctttcccatctcagcttccagaacattggtttccaggactcaccttcttggtaggcaattagaaaagattttttttaaggcttctgagcagttcaagaggaaaaaccattaagatactgataccagaagccagccagatcactgtatactgaagctcatagaaaaaaaagaaagaaagaaaaaaaaaaaaaaaaaaagcttgtgtcaaaggcagcagtggttaataagcattccatttgcaactccacattttccaacccacttccagttaggtggagttaggtggagcctaactgtgacttgatatgaccaattgactataggcagaagtggcatggactgaaacatataagaaccagtatacaattgtctggctgtccctgctgaggtacccaaagagactgcatggtccggatgaagcaactataaaatgatggaatctccatgaacctggtcccctgagtgtggagtagagttctatagaaaacatcactagatatgctgtgtgagaatctaaactttctttttctaaaccactgagaactgtttgttgtttatttcaaaacataagtctagtctctcctagytaacacaaaaccacacacacagaatttttaatcaccattttggtgcataatgttaaatgagtactcaaggatcaccagagtwctgagaaaagtctctaatataaaaaatagaggctagagcatgaagggttgttgaattttgtcaaaggccttttctgcatctattgagataatcatatggtttttgtcattggttctgtttatatgctggattacgtttattggtttgcgtatgttgaaccagccttgmatcccagggatgaagcccacttgatcatggtggataagcttcttgatgtgctgctggattcggtttgccagtattttattgaggatttttgcatcgatgttcatcagggatattggtctaaaattaaaaactctcaataaattaggtattgatgggacgtatctcaaaataataagagctatctatgacaaacccacagccaatatcatactgaatgggtaaaaactggaagcattccctttgaaaactggcacaagacagggatgccctctctcactactcctattcaacacagtgttggaagttctggccagggcagtcaggcaggagaaggaaataaagggtattcaattaggaaaagaggaagtcaaattgtccccgtttgcagatgacatgattgtatatctagaaaaccccatcgtctcagcccaaaatctccttaagctgataagcaactccagcaaagtctcaggatacaaaatcaatgtgcaaaaatcgcaagcattcttatacaccaataacagacagagacccaaatcatgaatgaactcccattcacaattgcttcaaagataataaaatacctaggattccagcttaggagggacgtgaaggacctcttcaaggagaactacaaaccactgctcagtgaaataaaagaggatacaaacaaatggaagaacattccatgctcatgggtaggaagaaccaatatcatgaaaatggccatactgcccaaggtaatttatagattcaatgccatccccatcaagctaccaatgactttcttcacagaattggaaraaactactttaaagttcagatggaaccaaaaagagcccgcattgccaagtcaatcctaagccaaaagaacaaagctggaggcatcacactacctgacttcaaactatactacaaggctacagtaaccaaaacagcatggtactggtaccaaaacagagatatagaccaatggaacagaacagagccctcagaaataatgccgcatatctamaaccatctgatctttgacaaacctgacaaaaacaagaaatggggaaatgattccctatttaataartggtgctgggaaaactggctagccatatgttgaaagctgaaactggatcccttcctcacaccttatacaaaaattaattcaagatgcattaaagacttaaatgttagacctaaaaccataaaaaccctagaagaaaacctaggcaataccattcaggacataggcatgggcaagggacttcatgtctaaaacaccagaagcaatggcaacaaaagccaaaattgacaaatgggatctaattaaactaaagagcttctgcacagcaaaagaaactaccatcagagtgaacaggcaamctacagaatgggagaaaatttttgcaatctactcgtctgacaaagggctaatatccagaatctacaatgaactcaaacaaatctacaagaaaaaaacaaacagccccatcaaaaagtgggcgaaggatatgaacagacacttctcaaaagaacacatttatgcagccaaaagacacatgaaaaaatgctcatcatcactggccgtcagagaaatgcaaatcaaaaccacaatgagataccatctcacaccagttagaatgccggtcattaaaaagtcaggaaacaacaggtgctggagaggatgtggagaaacaggaacacttttacactgttggtgggactgtaaactagttcaaccattgtggaagtcagtgtggtgattcctcagggatctagaactagaaataccatttgtcccagcaatcccattactgggtatgtacccaaaggattataaatcatgttgctataaagacacatgcacacgtatgtttattgtggcactattcacaatagcaaagacttggaaccaagccaaatgtccaacaatgatagactggattaagaaaatgtggcacatatataccacagaatactatgcagccataaaaaaggatgagttcatgtcctttgtagggacatggatgaagctggaaaccatcattctcagcaaactatcaccaaggacaaaaaaaccaaacaccgcatgttctcactcataggtgggaattgaacagtgagaacacatggacacaggaaggggaacatcacactctggggactgttgtggggtggggggagcggggagggacagcattaggagatatacctaatgttaaatgacgagttgatgggtgcagcacaccaacatggcacatgtatacatatgtaactaacctgcacattgtgcacatgtaccctaaaacttaaagtataataaaaaaaaaaaatagaggctagaacaagtcaaagatggcagcttggaagaacaaagattaatcaagagaagatgaagcattgagattaatcatttcaatgaagtaaaataaagtatttcactcaaaagatatgaccaaaaatgctataaaaaagaaaactgcattcacagaacaaaaaagagctcttataattaaaaatataagagcaaaaaataaaattccatagaagcacttgaaaaacattgaaggattctcccagaaaacagggcaaaaagactaacatcaatataggaggtctatcatccaaataattgtagttccaaagtaagtggagaaaacttaaaggcgaaaaataagtatcaaataaataactaaaaaaaattattaacaacagaaataaatttttaatttttaaaaaaaaactcacaaaatgtccagcaaaatggatgaaaatagactgatataccttttatctgggaatataccttttatctggagaagttttctgaaggcaaccaaaaatgctagataaaatatttaaaataccttacaaacataaaaacactaatggaagtataatgaatgtcccatccaaaacctaaatgaaagcagaaatctagggaggtaaattgagcactgaggtctgttttgataaaaggcattgccaaactgagtgaaattaagttttccttttgtgagataacaaacattacactaccaggataacagaggactaggaagaaatccattccataaagcttccatttatacccaggggtctgcaaggacaggtgctctggcactcaacaaagcaggggataaaaatcaagaagtcctcttggaacaatcatgaccaaaagctggcatttatgtaaattttcagcccagatgttcatcacacggatagtccaaaataaacttccagccctaaatgtagttgaaagtgatcctgggctgctaaggccccttgcaaaagccaaagtgaacattctccagaggaagacactttcatcctagcccaaaaaagacttctcacaaataagttttccagaaaatgagcagcacacagtcaaaaataaccaagcagtgctcactttgtcagcatatgtactgaaatgaaacaatacagaaaaaaaacagcatgttccttgtattaataagttaacatacagttactctgtcagccatcagttctcctcctaggtatttaatcaagagaaatgaaaatatatgttctcacaatgacttgtacatgaacattcttagcagtgttattcctaatggccccaaactggaaacgatccacatcattatcaacagaaggatgaataatcaaattgcaaaatagcaatagaataaaatattactcagcaataaaaaggaacaaactattaatagatgaatgaatttagattgttttycatccttgaaatctttgctgctttcatgcctgattgtgagagagtggaaaaggaaaggaagactcaatttttctctctcctagctccaccttctcctcctaygcctctagccatggcagatgcctcctctaactggccacttaacaattccagttgttggyttctgggaactctgaagacccttcagagatgctctctgctagggtctcattatctttccagttgaatttcttgggcaaagtcccttttaaggcatctccaggccaagtctccccctcatgaccattcaactcagaggaaattcacaacatggcctcccagcagccccagttctcccagccctggtgcctcagcctgaaaaactgtctgtagatctgagatgtgtcggactccaggccagactgtgccctcaattccatggatgcctctctagctttccaggtggcccttccaatggcttctctcacttcttttacctcccctcccctacagtgcatagattagggctatgttttaatagcaaatcataccacatactggcaactctctccccaaatatcctctctttccagtagccaattttgatggttttacactgagatgggtgacagtctaagggtcaggacactggttttaggtcatccccattggcaagtcctgaatagatgcttagcaagctttgaaatgtgagggtacgtacctgcagtgttttagatttgggccttagtcatcttgcataaaagagaagcagagagtctcgttttaacatgctgttacagtgacagtttataaaggtcgggcaatctcagaagccaaatgtcttacagcacaatctctaaggtcccagaaaatagatatttggtaacttaagagccatgataatagctgattaaaacttaagagaactgcaagaaatgtgaggcacatcttggcaatctgaaactagatgaaattccattatctgccccttgcctctggtttacaaccgcattaaaatcagaattccagattagcagcgtctgtgttttcatgacattgaatagtctgttactagaactcttccctagccaggaagtaaaacttcacagcaatggacagatgtttataggagttttttttacagaggctctcctagtgtgatagagtgatgtggaagctgaaatgcccttcttcagtcattaagaggtttccaaatagtgcccaggcttcttaaggtcaattgctgaagtaactgaatcatagtttgaaaaatggtgttgccggaagggaccttggacacattctattctgttctgaattggataagtggagagcacattcgttctcagactacatattcatggcaagtattaattcatctcaccaccctgcctctgagcctagcctcggcagtacccaccagtgcaagatggcatgagggataaaatctatttgccattaccagttctacctagtttctttattttattggtaaggaacatcattagatcatgttcctatcatatcatagcagtgtgctcaaggtcacgctgctggtcaacaacaaagaccagactcccagttcagtgctctttcaaccaccccaccycgaattaatgggagaaggagcccttgcctcttacttacctttggcccatccctcccatcaagtcctttcaaaaactgaaggcttattctagttgtatatgtgaccagatgccatttttaccagagtatctcctgagccacaatgctcctgctcttccatcctgagatcttccccaaaaatatcaaatcaagttcaaatgcctttgcatggactacttaactcacaacttctagagcctccagagccatagcaaaaagtcaaatattatgctttcaagttaaaaggccaaacatattcctggaaaagtgaaaatggaatacttacaaataccatatcatagagcactaaacttttggagctgattacatttaaggtcttgagtctaaaaggaaccagagttaacaaaaaccatccgttcagatgctcggcatctttctgaatctttttctgactaatttgcctacttctgtccagaatggaaagtgcttgtgggttggaggtgaccgggaatgcagatgtaaagaaatagcgcattctattcctggattgcatattactattccatatgggggggcgagccaaaacatatggtgttccatctgcaggatgaggctggctgggtcccatgaatggcttttaatgcaagtagattcagcctgatttggtctgcctccaaaggagaagaaaagccagtgattcaaatattgtgtaaaaccattgaaattaatggcacaaaacaagactcatttgtattctgcctaatttaaaagatgtctgcttggtgcaaagtaatgaattagttacgggggtgtttggactgagtatttgacagtctccttgaaggaacaaaatgccttttttccatctttcaagccaccctctgttaagttattttgagccattccccccaggaaatccactaagcatttcgacttctttaacaagccagacttcaaggggttcacaacaccagacacagctgatcctgctttgacaccccaagtctaggacgggagggagaattcaaggagatgctctttttaaaactgcctcatgtcgttatcttgtgagtggaagaccagttcatgcccttccagttaatctccaagggacacttgacatcagcaggcccagcgggcaggagacctggcccttcccaaatgaagaaagaactagagaatttggagttaatcctggaatgactgtactgtgcctccatgccacatgttgcactggaatatcacaaagggcacacgtgcagccccagctactgctcagtcactgaactacaccctacccactcccgagttcctggtgatgatgatggtgatagagatgttgaaaagcrgtaagcgcctgctctgtgccatgcatcacactacacgtgacgcaccagttgtccgagttcattcytacagtcccttcatgagattggcactgtcctccctacttcacagatgaagaagctggagttcaaagagtaagctgtcaaggtcaygaagacagaaagtggcagcccaggatataaacgccagtgttcctgccccacagcccaggcggagattaaagaggaaaagttggcatggctgtccctctgaacacccatctgagctgtggcatctctggataagatggcctcgcctgctgtttgaagtactagtgagcccaaagtggggcttccaggaaaagcaactactccccaggcatgacccttattcaaagaagagggcaaggccctgcatggaccttgacgtcatcattcccacctggataggaccaagcttcaaatgatgatcttcacactggttttcttaacattttattacataactccgatcaagacagcagtgattaagtccaaaatgtacaaaaatcccatactgcccatttttccatatggagtgaaggctttgtgcttcttacgatccattcttggttgtcttagttccatggttttcaagactattttggcaacctattttatttttccccaratgaaattagcaaacagaattccttcatttgaagaaagcatggggtggggaggtggcggtgggggagactcatggctcttcttctccccataaggagaaaccctgaaaagtctaagaaatttaaggaatccaaccaccattgttggaaatccgctgttttagacccatttttcaccttccatctgtaaatgtcctgccagactcagagtcatggatgcgtatttcttgcttggaagcagatctgtggaaagctaccaggcttattggttacaagagccatttttataattgcacacattaagcaaactatrccaacctagataatcacatatggtgcaggtcaaggggacccaagcctgaatcacttccaagagraagaattagtggagcccttcagacagaagtggcctttcttttgtagcagaccacaaggcatgtgcacagggactgtgccttgtttgttgcttgattggaaggaggtcatggaagttgtcacatccgcttgttttgtgcctgctgccgctttcaagatggggatgaaacatatcaggaaattaaaagaagatgctatttagttttctattatctattctaagtaaaacaataacatatggatttcttgaaaaggtaaatcaggggcatttttgaagattctttctgtttgtttgttttcctttggtttcttctctgtcttcattttgacacccagtgtgaggcttagcacaatttctttctggtttcctgatctcagagcacacacatcagagctcttcactgaggagctatttgtcagcggctggcccagcaggtgccaatgtgggcaagttccagggtgcataagtaaagagctatgtgaagtcgaggataccctgctgggctgagtgtggtcccagggagaggggcctgcttgcccaggctgggagccagctcttgcttctaaaagaaaattggcaacagagcccatgtcctggaaaacttactctatgctcagacattcatccctgcctcctcactcccttccttgggaaaagaggccaaacaatgtcgtcctgccacatgattcctccccacccccactctgcccttgccccctgtaagcctgttttcatcgcccccgaccccaatatacacacttccagattcggaactggcccctcccctctttcccacatccattctgcaaacaagcccagcattctcctgcctgaagaaagggcctttaaatcttttaacatgtgtggctgacatgaatcatagtccccagttctgtgtgtgggtaataagacttgcctcctctttccataactcmagtttatttctatttggggccatctccacagggctagaaaaagtcttcctcggtcaaygcaggattctctcgcctcccagtgactgcacctaaactttgagacttacgtggtgccagtgcaggrgcaccatctggtccttgatgtcagctgtcaacttagacatttaccaacacccccttcattccattcctttatgccctgcaggctgctctcccctgcttctgtgccttgatggaaggttcttactctgctcttctggggtttggggtggggctggctgttgtctcacccagattccaggttccactcttgatgcttgcctgggattcttgccctttcctgaaacacagtcaccagtggtgactcaggcagaggctcagtcaggcttccccamtcattggttttgttttgttggatatgattttttgctgctgtgggatgcaggataatcatggtggtgtatgggaggcaaagacaggaattatcaagggacaaacacagttaacgccttttaaaaacatgacaccagtctcccagtgaccaccttgcagcagcccaaggtggtgtgatctgttgtccaccttctttggaaggtgagccgagcttgagagggctggagacagggaagcccatggtcatggtggggacagcacaggatccttccttagaaagcagcaggtgacctggaggaagagcaggtacttttggaaagaataccctccccatgcaggcagggctggccttccccagagctcccggccatttctgtgctgagctcctaaggagcttgccatccttacagctgcaagctctttttaccatgtactcaggaggggagccccgagaattctagggtccttccagcgactcagagagttgagtttgctgctactgatgatataaagacttctaaaatattttttcagtcatcacctctcaggtatgagcttttcaaaaccacacaggagcaccatctccccaggactctgcctactaggagagagagtggtaaagaagtgggagtcatcgagasgtgaggtttggagtcaggagatctgggttcaaattctagccatgattcaatctggcagtgtgatctgggcctcacagaagctcccgttgatctatttgtaaactcacaggtgcccataagacctggatggaaacattcgtgtggaatccctagtgtagtgcctagcacacagtgagaaagagtgacgtggacaattcagcctgttccatcaccacaggtaccagcttcacctcagcccagttcctcagccctctttccaagcaggcaagcctaggggagggagaggcatgggcttccaytgcccccgtccccggggaagccctgtctttctggcctgacccagcagcgctgattttatcccaggtttgtggagtgaagggaaggggatgggaagtgtactgaccacctggggctgactctggaaccctctctttctccctactccacttagcctatcagtgggcttctcagcacrtgtgctgggtcacccagatgagcatcagagactgatgccattcctgtgccagccactcctcactgagcaatcttaccaccctttgccaagtcactgtccgctaatgtctcagagtgtcaccttggtcccaggctatggataaggagagctacaatacaggcatctctggcaccgaacgcggtatttctgacgctccagtacgtgaagccaaagaccagggaatttctttccagaggctctgggggagatgctgtggttttccttgggggcaggctccctcccttgcggtgggtagaggccactctggtggttctcttacagggcaaggactaagcccccatgcaggtgtcctgaggcaggcatgctgagcctgatgggcaactagatgtgcatgctgtatggggacagggacctcggggtataatcaaggcaaaggcggtcactcccacagggtcagggacgtctctccaaaaaggattttgaggctagctgatttttgctagctccaacctggcccagacaagcccacaggggctcgggggctctagaataggggtgaggtgtgtgggagtgggggtgagggcatgagaacacaaaactgactcagttgtggagggcaagacctcataacttggactcaggcaaaagactgctatgaggatgatggcaggtgagaagcgctgtgggcccacagcagagatgggctttgatggaaaggaaaccccagtgccagttttaaggtctcattttcttttgtgtaatttcttcaaaccttggtgaggttttgtaaacagatcagtgtttgtgctggtcctttagaaaactgggggaaggaaacaacattacagctaggtagaaggagtaggtccaagggctctgtaccactgcaggatgatgagagctaacaataatatactacataggttcaaatagctagaaggaggatagcaaacgttcccaacacagacaaatggtaaatgtttcagatgatggataagctgattaccctgatctgatcacccactgtacattatrtgtactgaaatatcattatttcaatacgtggggtacagtaacgacaccccatgaatatgtacacttattattttccaattaaaaaataacatgaaatgaaactttttaaactagaaatgaaaaaagggaagaaccagtgtttagctctggggtcagagcagactgctggatgagatggactccccctcaactgaaggcccctttggtgcttgtgggtatcttccagatatgtgtggaagctggacactgacttgtcaaaaaagtgtctgatgcaagtggtcattcattccctcctagaggaaaaaataagaatgcatatcactccattgatccaccacgtacctttgagcacccactatgtaccaggccctgtgaaaggggatccaaatacagggtgagaaaaacaggcctggatgttgcctggatgaagcttctaatcaagtggaacaataacctaatcattctacaagcactgtattatgggtctggggartcagcagaagagaagaacagagggctaggagatactataacaagtgatctaactgasaacttttattattttattagaatattatattttattatatttttaacagcagattattgtattagttgaacatcaaatgttattggcattccgtcaagacagcagccgacatctcgtaaatgtgaagtcccagacactgtttggttttgcacaatgctgaagcatgcttgcagaacagacttctggctattcccctcaaatacagcatggggccaagagtggcccagaacagagggctgggcagaagcagttaagaattacaggcagaattgtgtcccaccaaaactctaacctaaccctaactcctaccccacaatatatcagaatagaactgtatttggagactgagtctttaaagagatggttaaggtaaaaatgaagccattagagtagcccctaatccaatctgactggtgactttgtaagaaaggaggttaggaggccaggtgcagtgggtcacgcctgtaatcccagcactttgggaggctgaggcaggcagatcacaaggtcaggagttcaagaccagcctggccaatatggtgaaaccctgtctctgctaaaaaatacaaaaattagccaggtgtggtggcgggcacctgtagtcccagctactcgggaggctgaagcaggagaatcacttgaacctgggaggcagaggttgcagtgagctgaaatcgtgccactgtactccagcctgggcaacagagcgagactccatctcaaaaaaaagaaaggagataaggacatgggcatgcccgggaaagcccatgtgggacacagggagaagacggcctcctacaagccagggagagaggggccccagaaggaaccaaccctgctgataccgtgatcccagacttgcagtctccagaactgagagacaataaattcccattgttgtggctctcagactgcaatgttattaaggcagccccagcagacaaatacagtggggaccaccttccagaaggaggtaaggcccccacccagcaaagccccctcctcctctgcctcccctgcaccctccacttctctgtgcactggccagaaggtcaggcctcccctccacccggagcagatgtggggctctgcctctagaggccaaggccactgacgtgcccaaggactgaccgcagcccctaacctttccaatagtggctttatcctccctgatacccgatcatccctttcaccaggctgaccgtcaccaaaggactgaaagccgggtccaccctcccacaaactctgcgggtgcccatattgcctgccttctcctctcttcttttaatcacggagtgaatacaaaataaccttctgaaagccaccagcagcaattgtacattccagctgctctcccagagcaaggagcactgagcttgtagtttaaaggagattatctctcaatttaatgagagtcatggtgaaaacagcgtccccaggaaaagagagaaaatgccacaataaaaagaagraaagcatatccatccatccaatcggcctctctaacacgacctcattatgcacccacttctgacatttgccagtggtgttagatttgagctataaaaacgtcttttgaaaggcagattgacatttgccataaccataccccctcccaccccctaaaatttaagcactcaccatgacaactgagattaggaaaaggagaagaggggcaatgactcaactcatggtagaggacaggctggtaattggggagggggagagggtgacagaacattatggctccatgcgaatgacctcgtcttccgtatctcggtgtgatttcctttttagggaacatttaataagatacagaaaccagatttgcttgagctgaatgctggatcgccatggcaaccttcctttggaggttatccaagtcaggtagtgacagcaaagctgagttaaaggtcacccctgctgagaaagatgggcattgataaaggattttaacaagacccagaggagctggtatttggaagctacctacagaggatcgacgaggccctaggaatgggtggcaaacaacatcaggaagaggggggcatcctgcaggggctcccaccagagccccgacctcgcccttcagatcgggagctccagccttcaccagaagctgagattggagctgttcgtaattgttcaatggaagggggaacaaccattttaaccaggcatccagatgggaaagaaatacacttatgccactctacacccaagacacgcattcctgaaaagttctgaacaagccaaatgcttgcaaatggaacgggcttgaccttctttatcactccagaaatgctttatttaatcttttttctattggagcatcactttaaaacctcaaagttgagaaggcttttctttgcatgatgctgaagccagaagccttcaaggaaacaacataaatataaatatctctgtggccagtctctacaaaaatacataaaaatgaattttaagcataataaaatgtgaaaaattgcccaactttcctcacaaatgagtaaaagccaatttaaatgataagaaatgaataaatgcayattaaagcaataatagttttgcttatcagttgagcaaagatctagaagtgtagtaacacccagggttgatgaggtatgggttgtgggaaaacaggaattctcatacattcttggtaggagtgtaaagcagtgccactccactgggggacaatttgcaaatagctatcaaaatagaaaatggaccttcaaatacttatacactgctggtgagagtgtaaattagttcaaccactgtgaaaagcagtttggagattctcagagaacttaaaacagaacaaccctttgacccagcaatcccattaccgggcatatactcaaaaatatataaatacgtctttttaccataatgaaatgtgcatgaatatgttcattgcagcacttttcacaatagcaaagacatggaatcaacctagatgtccacccacagtggactggataaagaaaatgtggtacatatacaccacggaatactacacatccataaaaaagaatgagatcctgtcctgtgcagcaacacagatggtgctggaggccatcatgctaagtgaattaacacgggaacagaaaaccaaatacatgttcttacttacaagtgggaactcaatgttgagtatgcatagacacaaagaggggaacaccagaccccagtgcttacttgaggttggagggtgtgaagagggtgagaattttaaaactacctattgggtaccatgctcactacctgggtgacaaaatcatttgtactccaaacctcagcatcacacaatatatctatgtactataacaaacctgcacatctaccctcaattctaaaataaaagttgaaagaaacataaattaggattaaaatgtcatctggcctttaacttagggatcatttatcctacatagcagacattgttggtacctcccaacaaagtgtgcatttctcccctcctccctgcagaacctcagctgtgtttagctgtccatctcttcctttagcagccggtgtgattcaagagatataaactcactcagctccagcagtgggttctgagccagagagtctcaaacttgagcaggcatcagaaccaccagaagtttctcattcttagtgtttctgattcagcaggtctggggtggggacctgagaattttcatttcaaaatggggctgttgctgctggtctacagactccattttgagagcccctggttcaagccaaatgcagaaatcccctccttttgtccaatgacggcttcagagataagatgccgacaccgtctgagacatggtgagatgtttgatgggagttttttggaagaaaactttcttctcttaaaagagagccacaagacaagctagacttcctctccctcattctacttcccccaaacatgagcaagggggaatggagccctgactgttactggcaggcagccacaagaagaatcagccttaagatgtcaccaatgctccaaaagatgaagcagaaagatggaaagatctgagtcctttgtctgaggcccctgaccgctagagttccttttaaatgagacgacacacttggttatcggttaaacccctccgtgttgccttctgttacctacagacaaatgcatcctgacacaagcataataaacattgtttttaaatatttaaagctaaaacaattttttcctaaatagcacaatgccatacacttaagactgataacagactgggggaaatatttgcagcttgaatctcatgagtctcatccgtctcatgtgccgagttgaatagcccaatccagtgggccttcttgcttctttaaatctggtgccacacagaggtagatactaaagaaatacagttatgaatcaaagttcagaaaaaacaactgtatttaataaacagtttctaaggggcaaagggatgggtcagagtctgcaaatggaagattacattatccagaaaacaaaaattccttagggaaaaaaaaaatgtttaatccatccatcttccccccatcccacagagtggagcagctgctctcaaccttctgtctttacatctgtcctccaaaacatggtcaagtggtcaagttcttctcttatgattcctgctctctgagtaagttgctgttacataagcctcccatttctctaggctgctaccaatactgcctcttccagatctctctggaggggcatagttgagatggggktgggggtggtggtgagaggaaagcagcgaaatttcatattgatgaaatatgcattaacttagagatgaaaaagcgaagacagagtttaagtaactcagtccaaaatcacatctggaaaacccaagctttccaccactacactaatctgccaccaacaaaggattgaggtccctaacgtaaaaatagcttgcacaaatcaaaggagaaggaaaaaccaccctaatggaaaaatttgcaaagaacatgcaaaaggaaattaaagaagaaaaacaaatttaaagagatgttcaacctcactagtaataaaacgaatggaaattaaaacaatatttcagctagcagatgagcaaagatttttttaaaaaacattaattataagcagtgttggctgggtatggaggaagaggaactcccacactgcactgatcagagaataactgaagaaaaattagataatacctctccaaatttaaaattagcttacatttgaccctgcaattctccttctagtaattcatcctaacgagtttatcagagaagcaggaaaaaaatatgtacaagaatgtttacaaagcagcatgttttaacagtaaaacgtggaaacaacttaatgatcacccatagggaattaaacaaatatatgagggagagagagaggaaggaatactatggacttcccaatacagaacctcacaaccgactaccttgcctacccagccacaggcaacatcgaacaaacacaggctccctcaacagtgccacggcctgttcttgaaaaactcacagcagggaaccccaaagcagactgcagatcccagggaggaggagctgcagagcttcacaggcccaccttcttctccaaacccctctagttcagaggattaagtgaggcattagagaaaagctggagtgtaactttaatggaggtcccaccccttggaaacatgaagagaggagagagaaggttcccctaattccaacccttccatagatatatattcacagaagaaattttggagtgatggatatctgtgctggccagtttatctacctagcctgagtgtatataggttgggacactttgtagatatttacccagtgagaaagccaccagaaccctcacactcacttaccactggggagtgcaggatgactgtcagcaggtccaaagtgagacgatagttggaaggggcaaggtgagcccggggaaggccaacattgcaggaaggaaggcctaatccagggaccagaaggaaaatgtgaccaaaggctcaagatctgcaacaataacctagatggagcctagccagcgcaggtaggggaagaactaaatcccaccttcggcaaaagtaagtagcagatgccagtagggtgcccatggagcaggcaggacaaagactttcggcaggaaagtcaacaagaatccaggggcaaaagcgcccctccattaaccaggcactttgccatgaaatcacatagcttcttcactatacccaaacaccatctttcaaaattgaagagagtagagaaaacatttgagagaagaaaaactggcccagtagatgtttgaacattgaatttgaatggatatttatagatgagagttagaactaacttataagaactcttacaagattactagagactgtgcaagagattttttttttatgatatccagtgttggctagggtatgagggaaaaagaactctcacactctgctagtgagagagtacctgaataaaaattaggtaatacctctccaaattttaaatcagcatgcatttcctcctgtgattttgcttccagtaatttatcctaatgaattcatcaggcagcaagaagaaagaagccaagaatgcttacagagcatcgttatagtgaaagagcccccaatctctgtcagtaccggcaagaactgacactccggatgtttgttcacgtcagagttggagtgtgttcatttctgccatatttctaacagtacactaatagtataatagatatactatatatcataatatagtattaacactaattataatatagtttttatattgtaatatattaaatataataatgagaaacttatacattatactatattatatattatgcatatatggttatatgttgtatattgatatattacgatactaatatgaatgttaaatataatatataatatattaatatattctgtattaatataatattgtcatataatatattcatatttataataatataattatgttgacattaataatctataatatatattatatgtagtatatatattctatatatgatacattatatgtattaaatatatgcaatatattatatagtgtatattctatattattagtgtactattagaaatatggcagaaattaacatatacatttatatatgtatttattatgtgtatatatagttttgttttttaaaggagatgaattaaatgctttgctagctgacctctacaggcatactgccaaaagcacaaggaacatttccagaatgagaaaacgttgtctgaatcttaatgcagaaagagatgtgtaaagccttagagtcaactcacaccatgtcttcaggtaaacctgtaaggattttgttcctgttcctttgtccttgctttttacattcattatcttaatgacatgtttatttaagatagtgttttgtagtagacagtgttagttgcctgcccaacccgatttccttcccatatttcctaatagcaaagcgaagttgagggcccctttgaaatgagaagtgtgacaggagacccccaacaaaaagctgggacactaaacgctacacccgccacataaaagtcatctagagccaggcacggtggctcacgcctgtaatcccaacactttgggaggccgaggcgggtggatcacgaggtcaggaaatcgagaccaccctagctaacacggtgaaaccccatctctactaaaaatataaaaaaaaaattagccgggcatggtggtgggcgcctgtagtcccagctactcgggaggctgaggcaggagaattacttgaacccgggaggcggagcttgcagtgagcccagattgcgcca

SEQ ID NO: 95350 - DNA, 50554 bp, Homo sapiens
aaggccaggtacagtggctcaagcttagaatcccatcactttgggaggccaagatgggtgaatcccttgagtccaggagtttgagaccagcccgggcaacatggcaaaaccccatctctacaaataatttaaaaagtatgcagtgagccgagatcatgccactgcactccagtctgggtgacagagcgagactctgccaaaaaaaaaaaaccaaaaaacattagcctggtgtggtggcaggtggctgaagtcccagctacttgggaggctgaggtgagaggatcacctgagcctgggaggtcaaggctgcagtgagctgtgattatgccactgtgctccagcctgggtgacagaaggtgcttaagtgcccacaaggtgctaaaccctgggatctgacggcaaactagtaattctttttaagacagagtcttgctctgtcacccaagctggagtgcagtggtgtgatctcactgcaacctgtctcaaaaaaacaaaacgaaaaaacaaaaacagttgatatttacatggggcatatttgaacatcttttgaatttagcttccattaagaataaacattagtggttcgagctaggaaagtatggattaaaacaagattaagcatgaaattttaaaagaaaatgaatatgtgatttaatttaattwatttatttatttttgagaaagtctcactctgttcccaggctggggtacagtggcacgtgatctcagctcactgcaacctctgcctcccaggttcaagcaattttcctgtctcagccttctgagtagctgggattacaagctactcaggattacaagctggtccaggagtttgagaccagcccgggcaacatggcaaaaccccatctctacaaataatttaaaaagtatgcagtgagccgagatcatgccactgcactctagtctgggtgacagagcgagactctgccaaaaaaaaaaaacaaaaaacattagcctggcacctccatgcctggctaatttttgtatttttagtagagacaggctctcaccgtgttggccaggctggtctcgaacttctgacctcatgatccgcccgccttgacctcccaaagtgctaggattacagtcgtgtccggccgagtatgtgattttaaaaaaaagattttaggcctggtgcagtggcttacacctgtaatcccagcactctgggaggctgaggcgggcggatcacaaggtcacgagatcaagaatatcttgaccaacatggtgaaaccccgtctctactaacaayacaaaaaccagtcaggcgtggtggcgtgcgtctatagtcccagctactctggaggcggaagcaggtgatcgcttaaatccgggaggtggaggtttgcagtgaactgagatagcaccacttgcactccagcctgggcgacaagagcgaaactccaactcaaaaaaaaaaaaaaatttttaattaggcatttggatatgagttagcatagcagctgagaagaacacagcagctgagaagaacatgaactctagtaaactctagtcactcccctggaccacacccacayatataaacacaggataccagtggtttatcaagatcaggccctgaactgataatttgcctggaatctttgtatcatttaaaggcaatttacagtaacacagtatcttaggatctgaaggcttttacaaagttaccatttcatgcataacaaaccaatgtaagttaatcacctgagctgatagttaaggtatttttctacttaattctaaacatgtttagaaaaaagacaagaattacttttttcttggcattagcaccacaaatttcatgtcaattgattctttgtttatgaaacttcaaatttactcaatttctggaggatcaccttgttttcaccttattttttaagtttttatagggctgaaaatttacagtatgcctatcttttaaaaataataatacactcaccatagaaaactggattgtgatctttaaaatgtttacatgaaaaattatttataacaatgacaaagatggaaaatatgtgatattgagacgaaaattatgttgttgactgtcaagtagagtatgggctttggagcaggtcttcaggacgtgattagttgaactaatatgtaattactctaactctttagcttaattttataagataaaggaggaggtatggaagttaatgtgtatttttctcacaacgaaaaaccatttaaaaatctttacagacaaaggagaaagctgagaaatttttccagaaagtttttccagaaaatttcagaagtcactgaaatttttccagtgacttctgtcaatggataaataaacattttatctattcattcagtcaacaaatatttaagtgcccacaaggtgctaaatcctgggatctgatggcaaactggtaatttttttttttttaagtcagagtctcgctctggcacccaagctggagtgcagtggcatgatcttggctcactgcaacctctgcctaccaggttcaagtgattctcctgcctcagcctcccaagtagctggaattacaggtacccaccaccatgcctggctagattttgtattttttgtagaaacagggttttaccacgttgcctgccaccacgcccagctaatttttctattttttgtagaaacagggtttcgccatgttgcccaggctggcttgagatcctcccaccttggcctcccacagtgctgcaattacaggcctgagccaccgcgcccagccgcaaactggtatatcttattcagacatttatagcatttccaatgttatacacatatttgtatacatatataagtagaacacctttagtggaacactcactaattttttttaagaatttactttttagagtagttttaggttcacagcaaaactgagcagaaagtacagaaggttcccatatacccactgccattccctccaccagcctcctccactattaacatcttgcaccagagcaccatattcgttacaactgatggacctacattaacacaccattatcacctaaagtccatagcttacattagggttcactcttggtggtgtattttctacggggtttgccaaatatatgacatgtatacactattataggatcatacagaatagtttcactcacagccctaaaaatcctgtcatctatttgtccctctttcctctgctccatggcaaccacagatctttatactgtcttcatactcttcccttttctaaagctgttttaaaacgaagtttgggtaaacatagtttaactagggtcaagtataatataactgatctttaatctactgattatactcaatttagcaaatttgttaactcttaagaatatctactttcacatttctttggcctctttttttgtgttattggtcatactgtataaaatcctttgttgtaaggttccagaaaacatttttgaaaaaatgcagaatataaaacaatgcttaaattaagcaattggtgttcctcaaatctaagagggcatttaatgataagatgcagcattattttatatatcactaagatgcactattattttatatttgagtaaaagaaaaccacaagccattggctgggcacggtgactcacgcctgtaatcccagcactttgggaggccgaggcaggtggatcacgaggtcaggagttcgagactagcctgaacaatatggtgaaaccccgtctctactaaaaacacaaaaattagccgggtgtggtggtgtgcaaatgtagtcccagctactggggagggtgagacaggagaattgcttgaactcaggaggcggaggttcctgtgagcctagatcacgccactgcactccagccttggcgacagagcgagactccacctcaaaaaaaaaaaaaaaaaaaagaaaaaacgccaattaactctaagatggcattgactgtgagatgcattcccatttcagagaaattaaaatttgttaaagtgtttttttgaagtgtgccttagaattaactacaatcgtaaatttttgtttggaacgttatttcgatgttagaattctattccacttttttttaagacagggactcactgtcacccaggctggagttaagtggcgcgatcacagctcactgcagccgccacttcccaggatcaggtgatcctaccacctcagccttcccggtagctgggactataggtgccataaccatgcctggctaatttttttttttttttttttttgtagagacagggtttcatcatgttgcccaggctggtctcaaactcctggcctcaagcaatcctcctacctgagtctcccaaactgctgggattacaggcatgagccactgcgcctggccctccatcctgctatttttatcagccagtaactctcaacagtgggaatttgattttgaagcattgttctttcccactgattctgcaccagtggagccaaggatgttaatcgaggaatggttcggacattaactcttctagttgtagtttgtcatttaattgcagattgaggtagatcattcagtgactattaactaccataaacagcaataataaacaacttcttttcttttttttaaattcatctattttttttcgagacagagtctcgctctgtcgcccaggctggagtgcagtggcgcgatctcggctcactgcaacctccgcccctccaggtttaagcaattctctgcctcagcctccggagtagctgggattacaggcgcctgccaccacgcccggctaattctttgtatttttagtagagacggggtttcaccatctaggccaggccggtcttgaactcctgacctcatgctccacctgcctccgcctcccaaagtgctgggactacaggtgtgagccaccgcgcccagccacaacttcttttcaaaattgaattcaattctgaaatatctcaagggaggtcatggattatttaaaaggaaatcacttgcaacaataaacataaaacaatgcagaaatagtataaactcatctagattgaagaaacacaaacattgagtactagcatcttcttgggatgacttaaaattaggacaaatacttagttaccttactacccaaagtgacatttcttcccattttagagctgtgctgtccacacgtacaattaaaattttctagtagctagccaaagtatttaaaaagagaaattaacttaataatttacctaatttaatgtagtatgtccaaaatattaccttttcaacatgcaatcaatataaaatttactaacgagatggtcttccacatctggtgtactgtttactccacagagtggcaagctgcctttccaaccctcacttagccacatgtggctaccgtattggatggcagtcttagggaatttcaatatcaactgattctttaattctgagtttgagaatttctttttataatacacacggtcgctaaggcgcttagagatctgtgaggcgcatggagattattttactctccggtcccttttgatccaagatcccacagcattaaaagcagtaagagggaaggcaatgggcatcccttgcgcccaggaacgtggcctggagggcctggctgctccgagcagtagcagtgcccggcggggaggctgcagacgcggcgttggaagttggatttctagacaagctccggcagctgcccggaacccgtgtctttttctggggcacccaggaacagcagggccagacggagagagagcagcctccagccaggcacagggtcccgagctgccaccgacaccgagggagcccggcccagggctgcagcgctttccgcctaggtgggcggcagcgggagcgaggagccggaggaagcccggcctgcgtcctgcgggcagcaggacacgatctccccggcgcgctctcgccggcgccgcagcgggcgcgcgggcgacagggtgggcgtggaccgatgggggcaccgcccctgggagaggcgggcgccgcggttccgggggcgggacgcgccgaggagtggggcgcgagccgccggttttgattagtgcggcggagctgcggcggtggagctgctcggccgggagcccggcggcgagacggagaggcggcggaggtgcccgcgcgcagggtctggtgggcggccgcgaggctcgggagaggcgaaccggagcgcgggaccgcggtcgccccgaccagagccgggagaccgcagcacccgcagccgcccgcgagcgcgccgaagacagcgcgcaggcgagagcgcgcgggcgggggcgcgcaggccctgcccgccccttccgtccccacccccctccgccctttcctctccccaccttcctctcgcctcccgcgcccccgcaccgggcgcccaccctgtcctcctcctgcgggagcgttgtccgtgttggcggccgcagcgggccgggccggtccggcgggccgggggatggcgctgctggacctggccttggagggaatggccgtcttcgggttcgtcctcttcttggtgctgtggctgatgcatttcatggctatcatctacacgtgagtgagggaccgcaggaggggctcggggcaggggtccgggcctcggrgacaggcgagaatgggawacgtttgcgctttgaaggggactgggctcgggcgggggtggagaaagctgatcgtcaggctgttccccccgttccctcgcccctcggaccggcggtggcggtggtctttgcgagggaaaagtgttgggcgtgggaagggtttgctgggttgcaggcgactgcccagccaggctaaaggagactgctcttacgtgtcaggctgaaggtggtggcttggtttgattgtgctggggattcgtgtaatttttcatctgggccgagatgtatggtgtattgtttttttctcccracctgggccacgtttctgttagggtggtgattgtgtccacttttctgggagctgctsacagctatctggacacctctctgtggattttcttcttcctggaagggctctatgcgcttagataggtgtgaagcacctgtccaccctgaaaaatgtccaccaaacctccgagctggcatgatagctttgagtcctgtcagcttgtacatctcagcgtggttttctttccttttttcagttcctcgttttattgttttatgtagatttgtactctccccgtgccggccacatcttttcatttttgtttaacaaatacttcttgaggcctactagataccattcactgttattggccaggggacatggtggtgagcaggacagaattcctgtcctcatgagtcttacattctagaaggaaggagcagataaaatctaaataaggttatgagattgtgacgaagcgtgtaagtaaaatagaactgggtgatggcgtgaatagagacakgggttatgtggctagtttggtatatccactgtttaaggtgaaatctgcctctgtaaagaaatgaaaaaattatatagagcacattactgatatcgattcacttggatttttagtctggggggagaaaagagcaattgtatatagtaatcgttaccatgaactagaatagagtgtatgttagtggaagagactttaagaaattagttacttttagttttttggttttttttttttcctttttactgcggaaaaagtgtgcctttgcttttggaaacactgtattttattagtatagtgtggcatttcctggtactgagaaagatgatgctggtacaggttatactgatatttctttgaaagtgaaagaaaacatgccacttggatattgttgactttagtttttggagttggtgagcttagtcacagcacattctggagttcatttaaaatatgtgagttctttttctttaaaaaaattgttactttttaccgtcataaaaataaaaaatgcttactgtgtaaggaatttatgcaatagagagagatggagaaaattaaaatatgcacacaccaaaactacattaccttgttaaccttttgtgactatccttccaatctgtgtgtgtgtgtgagagagagagaaggagggaggggaagagggaagagagaaaaggactatattatgattattgttctgtaacctgctttaaagttcatctgtttaataaatgtttattgaaaagccgttttgtgcaaggcactgttctagttgctggaagagtgaagaacaaacatacaaggcccctgttcacatggaactgtcctgtaaaatgtcttgaccgttttttgcatgtcaatatctgtatgatctctacatcatttgtaatagatgcatgatattttagtttaccaggtaccaagatttatttattattactgatggatgtttaggttgtttccaatttatctagattacaaagaacactgtgatgaatttatatgcatacatctttgagaaatgatctcatttatatttccgaaagaggaattattgggccagaagtggtgcacattttaaactttgatacatattggccccatggaaatgttatgtatattcacagtcctggtaacattgtatgatggccccattttgccktacaaacactaagtagcaggcatttcactgttttctgtttctattttcattcctttaaagttacattgagcacttttaaaatatgtttatatgctagttacatttagatgtaaattacatactcataatcctttgcctgtgctgcaatctgttgctgaattcatctttctgatataaaggttgttttctgtcacatgtagcattcttttccccagtctgttttttgtcttttaactttgtacatatatttgacatggagaaaagtgtgtgtgcatgtgtgttttaggtagataggtctttccgtttcttttacattttctaactctgttataatttttatatcttccttattcctccaaattattatatatgttagtctctgcttcctcttagtatttttttcttaattttttcacatattaccctgaattcacccagtattttacttcgttatatgagagctagagccctaattatagttycttctaaatatttagagacttgtccagaattacttatcagatgattatttgattattccactgttttgaaatatttttattataaactaaattctgctttatacttgggtatgtttcaaagcttctattgccctttcttaacctattttagatggcagatgtttgtaggatttctgccaacaatgtcaaaggtaacattcagattagagacatttcaaattcaagagtcttattgttgagattgaagatttcctaaaaataactaaagagtatagccttggcaagttaaatagcctttatgggttaattttttttttttttttaatggtaagtgctagtgtggcttgataggttggggcctaaggtgaaattgtataaaagcctagacctgatggtagtgtttctcttctagcccttgggagccacgttgctgcgtgatgaagtgatctaagcagaaaccttgcttcatgctctcttccctatcccatccacctcatattattattatttccctgtgtacataaggtcctaatgtttatcatcaggctttatctttcgactggaggtgctaggctagtgtggaaataatttatgtgtccttaaatattagctaccctcaagtaaaacagaggtccttttttacctggaggtgtatatgtatatgtgtgtgtgtgtgtgtgtgtattytttctttgakacagggtcttgctctgttgcttaggctggagtgcaatggcacgatcttggctgactgcaaccaccgcatcccaggctgaaatgattctcctgcttcagcttcctaagtagctcccaagtagctgggactacaggcatgcctggctaatttttgtgctttttgtagagacagggttctgccatgtttcccaggctggtcttgaactcctggacttaagtgatctacctgtcttggctcccaaagtgctgggattacaggtgtgagccatcatgcctggccccctggagattttttaagttttttttaaagttaattctgctttctacaaacgtatttcctttattttgtttattgttatttttttgagacagtcctctctgttgcccaggctggaatgcagtggctcgatcacggcttcacatcccaggctcgagcaattctcccacctcagcctcccaagtagctgggactaccggtgcatgccatcacgcccagctaatttttgtcacccaggctggtctcaaactcctgggctcaagtgatccccccaccttggcctcctgaagttctgggattacgggcgtgagccactgcgcccaacccaaatatgctatctctaatgtacagcaacttcaatacctgatgcacagtttttgaatggaatttgcatactcattgtgtcaggataactgcgataaactacccgtcaaaaactggttatgtttttcatgtaaattttagcatttgggatattatttttagttagtacgatctttgccttaaattcatgaatacttggtgttccaagccttagtggaatgtaaattgagaacgtcttttttgggtttagtcctgccaatgcccttggactgtggtcaaacgttcatcagtcaggatcattgctacagggctactttcagggaaatgaataaggcagtccagcaattcagcccctttaacctgagcctgggaagatacggaattagactatagtgtgatagctttaaagaacaaagtgaggggcagtgtggggagggagagcatcaagaagaatagttaatagatactgggcttaatacctcggtgatgggatgacctgggcagcaaaccaccatggcacatgtttacctacgtaacaaacctgcacatcctgcacatgtacccctgaacttaaaagttgaagaaaagaaaaagagcaaagtggaaattgcaagattttagtattcagtgatggttctattgattcattatccctgcctttctctctgacattagttagttcagcacaccttcatatctatcctagatgttgaagctatgtctactcgctggtatctctagctgcagccttgtgccccctcgattttatatttcttattgtagcctttatccttctggattactaatcttggatcacagtagcttaaaatcttaccatgaatcctcattgcctccgggttacagttcaaactccttaatgagacaagcacagctctgtaggagctgaaccagcaacgttgtattactggcatttccccaaatgtacaatgtgctttctttggaattgtctttactttctttcttttttctttctcttccttctttccttccaaaaatcttgcttaattaactcctactcgttcaagtcattttagactttagttccttattgggttaggtgccccttatggcacccagccatctcctatttgttttctatggtggtggaatcttctacattctatagtgtagtaagcccattgtccagtgggcagagtttgtgttttcctatagagctaactcactattggttattttaccttctgtgagagaatttgtgttagcaaggttaagcttgcacaagaaggtgtgctttatattgcttatgaagcccattttgaagcaataccatttttgaaataagtgatacaggtagtaaattggtcatgatatactgattataaacaaacagtaatatagtcatgagtgataacaataacaaaggtcattagtcactggaaattgctggcatggactatgtgaagttagggacttgctgatatagcagtgaacctaattttacacgaaatactaacaagctttgtgacttggagcagggaagataaattcctagagtcagataaattggttcagcagaaccacacagcggaattataaaaacaacacattctggggttgttaagcaaggtgaacttttgcccttgtggaattcatattcttccttagaaacctagagtgaaattctctctttttttttttttgagacagagtctcattctgttgcccaggctggatggcagtggtgcgatctcggcttactgcaacctccgccttctgggtttgagtgattcttgtgcctcagcctcccaagcagctgagactacaagcacgtgccaccacaccccgctaatttttgtactttcagtagaggtggggtttcatgatgttggccagtctggtcttgaactcctggcctcaagtgattcccccatctcagcccagcaaagtgctgggattacaggcatgagccactgtacccagccgagtgaaattcttgtgcctcacttgtgaggagctgtattaaggttgctgcagaggctgcttcccgccatctgaaggggaaggagcccaccctccttgtttaacctttacctgtctccagtgggattccctgcatcccaggcttccctcttgcaaaagccaaatttgaaaacagaactgtaaaagaagttatttaaaaatgagacagacagggcgtggtggctcacgcctgtaatcccagcactttgggaggccgaggcaggcagatcacctgaggtcaggagttcaagaccagcctgaccaacgtggcaaaaccccatctctactaaaaatacaaaaattagctgggtgtggtggcaggcgcctgtaatcccagctacttgggaggcagagacaggagaatcgcttgaacccaggaggtggggcttgcagtgagccaagattgtgccactgcactccagtgtgggtgacagagcaagactctgcctcagaaaaaaaagaaaaatgttcccaccttggctttttttcttttctttttgagatagggtctcgctctgttacccaggctggagtgcagtagtgcgatcatggctcaccacagccttgacctcccaggctcaagcagtcctcctacctcagcctcctgggtagctgggactacaggcacatgccaccacgcctggctgatttttgtgttttttgtagagacggggttccgccgtgttggctaggctggtctcgaactcctgagctcaaacaatctgcctgcctcggcctccacaggtgctgggattataggcctttccattcttcagtcacccagtctttctagacctgtggttgtcaagtttgactgcactatggagtcacatcaagggcttaaaaaaaagaaacaactgctgcctgggtctcacccctacagacatggttaaattggttcaggcatcagtattttcaaaactccataggtgacatggatgtgcagcctaggctgagaatgattgcccccaggctgtctgcccacagttgtgtccagcacctgccacctcttggcttcatttaattctccatttagcctagagcccacagttcatcacttcattatcttgcctcttgcctcacctcgtatcagtctgccmtgttatcttgaatccatccaataattatagctgctcaactttgaaaatcctacagagggtaatcacacagccatgtggactaatactactacacattggtagtctcagggctcagctaaacctgcattgcggtgctgcctggcagtgcttttttttctgtgtttagctctgacatccatcacttaaaaaaacctcttctaaatcttcattctaccgcattcttggtagatgaccttagctcctacttcatactgtggatcccatcatgccttaaattagttttttctttttctctctttgcccttcggctagctcttcttgaatttttaaagaatttcaagtagtctttaaaaaattgaactagaggctgggcttggtggctcacacctgtaatcccagcactttgggaggccgaggcaggtggatcacctgaggtcaggagtttgagaccagcctggccaacatggggaaacaccatctctactaaaaatacaaaaaattagccgggtgtggtggtgctcgcctgtaatcccagctactccggaggctgaggcaggagaatcacttgaactcgggaggtggaggttacagtgagccaaggttgtgccattgctctccagcctgggcaacaagagcaaaactttgtcttggaggaaaaaaaattcaactagagagccaaggcggggaggatcgcctgaggccaggagttcaaaaccagcctgagcaatatagcaagaccccatcgccacagaaaaattttaaaaaattagccagaggcagtggtatgcagtgagctatgattgccactgcactccaacctgggtgacagagcaagattgtatctcaaaaaaaactagaaaaattaaactagaagccgtctgttccaccctttggccctttcactcactgtcaggtttcagtagaaactagtgtttgtttactgttatcacatttcaactcccattcatttactttttaaccgatttttagctgtctacccttatcctycatgaactgccccaattcttgccaaaagtgctcagagatagcagcaagtacatatgtaatctactggacattaccattcttaccttggtctctccagcagcattcagtgttattctttcttgaaccctttgagaaagaaaacagcctggccagataaacccttctgtcactttacttgcatcctggctgtctttctgcttctttgatccccacttttagtctccttcatgcattactctttttttttttktgagagggagtttcgatcttgtcatccaggctggagtgcagtggcacaatcttggctcactgcaacctctgcttcccaggttcaagcagttcttctgcctcagcctcccaagttgctgggattacaggcgcaccaccgtgcccggctaatttttgtatttttagtagagacggggtttcaccatattggttgggctggtctcgaactcctgacctcaggtgatccacccgcctcagcctcccaaagtgctgggattacaggcatgagccactgagcccggcctctccttcatgcattactgattcaataataatatattccttcttggccatcttctaagaatgctgtgcctcagagagcttgtgtatttaccttacggtggatggcttctgtatttttatctctaggctaaccttacctgctgagctctctgtatctgttyatttatttactcttcatttattcaaaattatttttaaaaattgagaacatactgtgtattattgctttgctgggctctggagaatttatattctactgtagtgtttctccagttgtagtttactgccagcctgcatcatttggtatgcttgtgaaaaatgcagattcctagtctcttcatctggtttattcacttgtgatctctacctgtgggcattatttatactacaagttgcaaacctctggtctcctagatgagatgtcaccacttgatgtcttgagagtaaattaaagttcgtatgttcaaaagttcattactctttcccatctctcattgtgcccagattttatgaatggcaccactagttaccatagcctgacccaggtatacccctcattatccctcattccccctccagcaataccatcatcagttattgrctaaamtccttgattctgagttctcaccttctcttgactttgcttccttcgcttgtttcttttgtgtgtgtgttttgttttgttttgttttgttttgagacagtctcgctgtgtcgcccaagctggagttcagtggtacggactcggctcaccacaacctctgcctcctgggttcaagtgattctcctgcctcagcctcccgactagctgggattacaggtgtgcgccaccatgcctggctaatttttgtatttttagtagagacggggtttcaccatgttggccaggctggtcttgaactcccaacctcaggtgatccacctgcctcagcctcccaaattggctgggattacaggcatgagccactgcacccrgcctttcacttgtttcttatgcctttctggtttgtgtgcttgtctctttcttttggacctttgcaatatttttcccttgccttccatctcccctgcctgtactttattctcttaacttctataaatacaaaaatgatcctggttgcttccttttagtctttcatggttatttcttgcctagaggatgagctccaggccttttcagccttgtctgtgaagtcacgaagaatttatagcagagatgagtcttaaagcagtgctgctcaagcttgagtgtgcctgtgaatcacctagagatcttgttaaactgaagattgagtttcagtagttttgggggatgaggcctgaaattttgaagctctgaaaagctcccaggtgttgccaatgctgctggtccatgggccacacttggagtatgaaagtctggaaagaccgcctcctaggagtagttggatgcttccatctctcttctctcaaagtgttccaaacatactttgatgatagcctgtatcacactgcatttgcagagtcccgtacagactctacttctgaatgagaggtggcgtgtgcacatgtgagaaccacctctcctattaacacatggaaatgctgtaacgattagacacttacacacccagagcctgaaaatgtgaaaagaaaatctgcatattccagaaaccaagagggaatgcaaagcagtgggttggtctggtctgctaatttgaatcccggtggggttttaatttattgatatttcttctcattggtatattttcctgattctttgcatgcttggaaattttttaatagataccagacattttgaatttcaccgtgttgggtgctggatgtttttgtttttctggactgttgactccagctcttcaattcattttctttcttttttttttttttgagatggaatcttgctctgttgcccaggctggagtgcagtggtgcgatcttggctcactgcaacctccgcctcccggattcaagtgattctcctgcctcagcctccygagtagctgggattacaggcacgtgaggccacacctggctaattattttttgtatttttagaagagatagggtttcaccatgttggccaggctggtctcgaactcctgacctcaaattatcctcccgccttggcctcccaaagtgctgggattacaggcrtgagccaccgcacccagcctaccttattttctgtgtcataggaatcactgtcttcctttgcttgatgtccagtatcttcaaaactgttgtctcctgtatttttttctgattttttggttgtttcaggtgggagagagtaaatccagttagcgtttcttcatcttgtccaaaagttgaaggcttggkgggtgggtggtgggaagagtagggcttttagtactagtgcgaggacagagtcagtgctgcacactagttataataacctcaaactgtaaacaacccaaacatccatcaacagaaagtaaataaagtgtggtatattagtaaaactatcctgtaacaagagtgaatacatgatagctaaatgtaacaacgcggatgattctcacaaacataacgcaacccaaagaggccagacaggaaagatacatcctatgggattccatttatataaaaatttaaagccagcaaaactagtctgaagtcaggacagtgagtacccttgaggggagcatagtacgtggaaggagacacgagaggacttctggggttctgctaatactgttttttgatctgggtactggttacatgagagtttcactttgagaaaattctttgagctgtgtacttacaggtgactttataatatgtacattatgtatcaataaaaagtaccccccacaccacttccccaacaaaaaggtcaaggctgcaagccagatgcattataggaaggtaagaactggattcccagtatagaacctagaaagcaagtcgtctgccctaggctgagggtagaaatggacacccatgagaaagcttgtgcaacgtgtaggaatcataggctcaagttcatactgtctaggaaatgcagaaaccctgatctgagacactaaaagaaaaactagttagaaaccagtaaaacttgtaagaccctgtccgagccacttataatactgccccactttaagggctccaccgtggaggccacttttgaaacactaggcaattgatcacagtgccctccctccctctctccctctctgtcacccaggctggagtgcagtggtgcgatctcggctcactgcaacctctgcctcccaggttcaagtcattcttgtgtctcagcttcccgagtagctggaattataggcgtgtgccaccacgcccagctaatttttctatttttagtagagatgggggttttgccatgttggccaggctggtcttgaactcctgacctcaagtgatccgcctgcctcatcttcccaaagtgctagaattataagcatgagccactgcaccagcccacaaggctacttctgaccttggaaactcttctttattttgaaaaaaaccactgggatttaaaaaatgtttttgaaaaaaaatcactgggatttaaaaaaatttttttgaaaaaaatcactgggattttagagctttttattctgtcatccacatctcaaactctttcatgatttctgtgtagaaatctgtagattggtttccaacacactggtcatggccaaaggcattgtttccacctgtggaacgattctccagagcaaagctttgttgacatctttaagagttttgtaaggagaagagcttctgggcatgtgcaacccaacttccccattaagccacagctccttcacagtagggaattcacctgttgcttgttgcattccagtgcatatgataatgactagtgtacattcggggctgtaaagatgttgtccagtaagtgactgcaaagcagtcatggagtaccactgtgtgctgagcctagtgctagaggtgttttgtttatttggtgacttaatggatattcttctattgttttgacaaacatttcaagtaatttgtaccacatggctttgttggttgcgttatgtaagtcaaaacagtattctgcaaggtaggatctcgtaccctagggggtacacaacaaactgacctgttgggttttggaaagaaaatattagagagagacagggacagaggggaggcacaaatacattttttaaaggccctgtgatatagtctggcttattttgagtagaaatttcagatatagtacttaacaattctctttatccataaacctagagagggctttgtggctgttgrgagagtcagaatgaatctatgataaaatactgcattctcaacatgaaaagttcttcaaaggaggaggtgtatctaatgatatttaaagtaaaacatcttgggagaagggagaagtaggatctactctaaactttaccaaaatgtaatcgcctctagactattcagtacagcttagatgatcttcgttgctactgtttttgatctaaagccttgccacaggcactgagattattagtgggccagttctctctgctacttagccagcacttgacctgcatgttttggtagtttaatagcacttaaggatcacacagtgggaccaacagataaaaatcactgggattttagaccttcttattctgtcatccacatctcaaactttttcatgatttctgtgtctttacctgtccctctctctgggctgcattctggatagcttcttctaatctagatgccaattctttcgtaaattgtgagtacgtaagattctgtattacttgtcttttgagtttctgatgtcagtgattgtaactgtcattcctagaacttgtgtggttcttttcatattatttgtggtcatatataatgatttccctcatttccttctcttctcttgggttttgttcaggtacacagggaggttgcattcttggcccaaacccacgtggtgaggtgttctccaagaagacttttttcttttttgtttttgtttttgtgtgagatggagtctctctctgttgcccacgctgaagtgcagtggcgcgatctctgctcattgcagcctctgcctcccaggttcaagggattctcatgcctcagccttccaagtagctgggaccacaggtgcacaccaccatgcctggccatattttgtattttttagtagagacggagtttcaccatgttgaccaggctggtctcaaactcctgacctcaagtgatccacctgcctccacctttgaaagtgctgggattgcaggcatgagccactgtgcctggccaagacttttttcttttattctatttcactgaggactgaatccaagatagagagcatccgcatcttccctctatggaccaggatttttctgcttgcctttcagggagtccagatttacccaaggctctcagaacagttgtcctgtcattcttatctcaggcttctctccatctccaggtcaccagtagatggtcaggaggcaagcatggactctagcactcagtcactgaagaggtttttttctcatttctgaccttagagactcttctttattgtcctaacggttcaattatgtattttaaaacatgcttttactacacttgtattaaaaaggaagagagacaagtttatgaatatgtacatatataattcatatataccataaatgtgtgtatatattttgacttgtatatgcatttttaaaacctctggaaggacaagaaactagtaatgctggggaagcagtaatggaaacaggcagatggggggccagtggtgacagatttcttttatcagaccctcttaatatttttagtgatttgaaccatatcagtatattaccagttcaggggctgaacgtggtggctcatgcctgtaatcccagcactttgagaagccaaggcaggaggaytctttgagcctaggagttcaagaccagcctgggcaatatagtgagaccccatctccataaaaaaataaaaaaattagcctggtgtggtggagtgtacctgttatcctagctactggggaggctaaggtggcaggatcgcttgagcctgggagatgcagataattacaccactgcatgccagcctgagcaacggagcaagaccctatctcatatgtgtatattcaacaggaggatatatatatattcaacaggatacatatatatattcaacaggatacatatatatattcaacaggatatatatatatatatatatatatatatatcctgttgaatcaattaattgtgtaatataaacttttttccccagcagtctagatgttctttacctggtgggtttcaggcatctagtctgctattttgttagaaatagaatagtgattacttttgtggttatatgcgttttagatcgtggttttacctgtctggtcctccagatgaactctgtagagcaatattttccaaactatctatggcaaagcagttgttctttaaaattatccaatctggctggctgtagtggttcacacctgtaatcccagcactttgggaagccgaggcgggcagatcacttaagatgaagagttcgagaccagcctggccaacatggtgaaaccctgtgtctactaaaaatacaaaaagttagctgggcatggtggtgcatgcctgtaatcccagctacttgggaggctgaggcaggggaatcatttgaacccgggaggcgaaggttgcagtagctgagatcgcaccactgcactccagcctgggtcgcagagcaaaactctgtcttaaaaaaataaaaaaaaaaaaattccaatctgccatgagccaatactttggtaaactacaataaaaataaattgctgatcacatgcttgatgtcatggcaatgttaaattgctatacaagtttctaaaaggtttcactcaattgtttctcacttgcaaaccagtaaaaagcaatgctggaccagaccacactttgagtagcactgcgatagatggtgctccagtattttctggtacttggtgtatcagaaattgataccaccctgttctttaaatttcttgttggttttaaagtttttccattgtaaacctggtgtgtgtgtgtgtgtgcgtgtgtgcacgtgtgtgtaaaactgtatggccttatctaaaacgttagatgtttgctacagcacacacctgccttagttagagaccaagcccatggctaagtggtctgggtggtggtaccggtgtccctccagaagtctttcccagtttaatagtggattttatcaaatcaagatgcattgatgcaagtattttttgatcatctagaagttctcattggttgattttcacagtaagtcagagctgccatctgcctggcagcaattgtaaggtaccattgatgtcagagatgttaaaatgtggaagaacatgtgtcttagaatatcttgcagatggacccatgatgttctagtgcctaattactgtcgaatgcttggagacttgtttatgagaagtacttgtcacatatttactagaagtaggaggaaggcttcagtggcttcctttagaaacttcaccactgtattgaatggcatcttgttgcaacagcctgatgttaactggggcacgttctgtcttctctagcattgcttctttcttttttttgagacggagtctcactctgtcacccaggctggagtgcagcggcacaatcttggctcactgcaacctccacccccgggttcaagtgattcttctgcctcagcctcccgagtagctgggattataggcacccaccaccacgcccagctaatttttttttttttttttttagtagagatggagtttcagtgtgttggccaggctggtctcgaactcctgacctcaagtgatccacccgcctcagcctcccaaagtgctgggattacacaggtgtgagccaccacacctgtgtggcattgcttctttcattaggagccctgctgtgctgcagcatccttgcaatggacaagcagtgagaacgttggccatttggtcacttatctatgaactggtggcactggtatatcttccagtgtcattaatagacatttttctcatcattgagtttttttcttactttcagtttccttctgttctacccctgccattctgaccttattaatattgggagttccagttgtcccattatcttgcttgccatgcagactgcttgacacttcttttaactgtgtattatcccactgcaaagaaatttctcagaaagttctggttatcctttcataattttctgctgcagacggtgttttattttacctgtttttatagttctgtggccacttcagtggcaatttaagaggaagaggagttaatctttgggctaacactgccattcatttcttcaccatgtattttattgaaatgcctgcgctatgcctggcatagttctgtgagtatagcaatagtcagagagtagtacatcatgggtattcaatcttttggcttcccttggtcgtattggaagaagaagaattgtcttgggtcacatataaaatacactaacaatagctgatgagctttaaaaaatcgcaaaaaatctcataatgttttaagaaagtttatgaatttgtgttggaccgcattcaaagccatgcttacctggttctacttcccttcatgtttagatcctcttttagaaagatgtcaagttttaaaaatcttaacttagaatttagggatttattgatagcttgtcagtgctttgatttgacactaatgtattctatagaaataatttttatatcatttgctttttagccgattacacctcaacaagaaggcaactgacaaacagccttatagcaagctcccaggtgtctctcttctgaaaccactgaaaggggtagatcctaacttaatcaacaacctggaaacattctttgaattggattatcccaaagtaagttcagtgttacggttttttgttttgttttgttttgttttgttcccctcatgataaacatttagggattttaacactgtataaggtgaaggtattaaaaattcatgatgatattggcctcataaaatataacctttagtagtagtcatyacagaacagaaataggttgaggaaggggtgtaaattccctttctaaccacctatatgtccgtgtgaagtagagatccctgagtaaaccttctgaaactcagacattgtcaagtgcctggtagtttgaaaataaaaattttcttccataagagctggatatgaacaataggaagaggagacaaggagagggagaaagcagtgttagtggtctgaaatgggttgcagtacagccagaactaaacgtgacttctccggagaaactggctttgagccaagaatagattacagttagtggtactgtagggtttcatcttacctcatttttaatttccttactgttctgattttaatagctaattgtattgcttataccatttatctatataatctgtatatctgtaaactcagtgtactcccttaattggagaccttccagttttcttgagatgaaagtattctttttatcactttgctttagtagtccacctgtagtttcttaggataacttaatattctttgatttttgtacttagctttacagcagctttgtattaaattgcttgagactgcttttgaaagggcattttggtggtaacagatcacttgtgagaagaatgtgtctttaagcttctacccacttgactttcagtacagtttagttttccctttgcggtctctattcacttgcctcaatttttaccctattgcctcagtttttccatagctgtttttgctactgggagagtcgtccctcttaatttttttggacagggtagctcaaataatcagaaggaagatgatatgcgcactacacttcttatggtgactggttttcatgctcttatttcttttcttttagcctttatttttctcggtagcaccaatgaaaagaatagagaagacacagatgtgatagccttaatgcagcacttattaagtaggtagacatgagtatcattcagttgtatttttagtgtttttatattattgctttggagttttggagtttagaagccaattttggagtattggaagctgttttgaagcaaaaaaattatatgttctagtttgtgtgtgtttatatgcttaataattttagatatttgaattaaatacatgtgttaacttcaatcaaatatataatttttaaataagatataattgtatatacttgttttttcaaactaaaaaatggtaaaacttagccttttgtaattgagaaagatataaataaaattaattgtaaaataagctttgcagtaagaaaaatgggagattttcaagctccataaaagtaaatgcaaaggagaattaatgtttacgaatgaaagaaattttctattgattatgaatgaatcttagagcatagcttagagtcatatgcattatcattgtgaaacttaatctcacatttcagttttttaaccatcctctttcactttccccattcaaccactcttaaaattggtcatggaatttttacgttgtagtgcttgtgagatgatagtcatggggtttaaatgcttgaggaagtcagtgaggggtttagttgtagaaagaatggttttttgtgttcgtttttgtttttaagacagtatcttgctttgtcacctaggctggagcatagtggcacagtcgtggctcactgcagcctcagcctcccaggctcaaccagtcctcccacctcaccctccctggtagctgggactatgggcatgtgctaccacacctggctgatttttgtattttttgtagagggtgttgccatgttgccggggctggtcttgaactcttgggctcaagcaatccccccacctcagcctcccaaagtgctgggattacagacatgagccaccatgccctactgaaagaattttaaaaagtaaccccagggttatatgtatccattgattacgagcatttctaatgaccccataactgatttcttgtgaatgaagattttggccaggcgtggtggcttgtgcttgtaatcctagcactttgggaggctgaggcgggaggattgcttgaggccaggtgttcaagaccagcctgggcaacacagtgagacccccaccttcaaaaaaataaaaattaaaaaattgaaataaaaaattgttttggaaattacagtttagaatgatctcaagagctcttgttttcacttagagtagtagctctttttccatttagttatatcatttaagtgggttgaggagaaagctattttgacattcattgtaagatgaagaatagcatctgcagattattttattctttgttagtacagaattttattttctaattataaacktatatttagctgtataaatagaaagtttggaaagcagaggagaagtgcaaagtacctgcaatctaagggaaatatttgatttcacagcattttatttacttggtgaaaaccaaatacaatggcaaatgttccacaggagactaaagttaaaccactgaaatcacgcatatctgagcatgaacagacaaggcatttgtgtcaccaagaagtcaaggagacccaaaataaacatttacgtgactgccaggcgcagtgccctttcatatttgcattttgcctggtgtgaacatcgttttaccagagtatggaaatgttttcattttggacataactttctcttctaatattcgattgggactatcataggccatttgggggaaaataataaaacatatcttcaagttttaaaattttacttaattttggacatgtgcaagaaaatttactgctactggtacttgctctgaatttctaggtttcaattttggtgagactagactagttgctctgaaagatctctgcgctgtattcatcttacaagtctacttttatactgatactcattccttgggaagacataaaagaatgaaaaggtgatgcagttcattttccacagcattgaacactcatttgtcaccagcgtagaagggatttggggagagattaagcagtagcagkaatagtcaataatctgcgtctaaagtggcttgctggctttacttcagtaaattctggccatgtgaagaatacctaaatcaactatcagagttcttaacagtgaacctgtcataactatgatttttttttcttttttgcaattatagaattgattttttttttccttttgaggcagagtcttgctctgtcacctgtgctggagtacaatgccacaatctcggctcactgccacttccgcctcccgggttcaagcaattctcccgtgtcagcctcccragaagttgggattacaggcgcatgccactaccgctggctaatttttatatttttagtagagagaggatttcatcatgttggccaggctggtcttgaactcctgacctcagttgattcccctgcctccgcctcttaaagtgctgggattgcaggtgtgagccaccgtgcctggcctgatttaacaattttaatacagggattcttagcaaataaaatatctcatcaaattgtgaagacacagagctgatagctgaaaaatgattcctggttaaaatctgatactttagaaaatacttggaatgctgcctccaatttggtgtaatttccaatatcaaaaacaaatgaatcttatgtatttgagtctgaacttttttttggataatatgaatatgagtctcatttacactctggctaatcagaaagtatttgtttttaattaaaaattatgtttaagcagtgtaatcaataaaaattaaaacttcaaggccgggggcggtggctcacgcctgtaatcccagcactttgggaggccgaggcgggcggatcacgaggtcaggagatcgagaccacggtgaaaccccgtctctactaaaaatacaaaaaaaaaattagctgggcgcagtggcgggtgcctgtagtcccagctactcgggaggctgaggcaggagaatggcgtgaacctggaaggcggagcttgcagtgagcggagatcgcgccacagcactcccgcctgggcgacagaacgagactccgtctcaaaaaaaaaaaacaaaaaacaaaaaaacaaaaaaaaaaacttcaaaccttgcatctgaataaaggcagactgtacctcccttacttataacctccctacttaacactagtatagcatttttcttcccattgagtatatttctagtactatatttttacaaagttttctcttgctggggaaaataaaagctaagattagttttttattgtactttatggaattgcattacttataaacatttcctttcatcatatgtactcatactcacaaaatagcattaaaaaagcattaaaggctgggcatagtggctcatgcctgtaataccagtactttggaaggctgaggtgggcagatcacttgagcccaagcattcaagacmagctcgtcgtctgtactaaaaatacaaaaattagccaggtgtgrtggtgcacacctatagtcccagctactcgggaggctgaggtgggaggattgcttgagcctgggaagttgaggctatagtgagccaagatcacgccactgcactccagcctgggtgacagtgaaagaccctgtctcaaaaaaaaccattaaagatactatgctggctgggcacagtggctcacacctgtaatcccagcactctgggaggccgaggcaggcagatcacgaggtcaggagattgagaccatcctggctagcacagtgaaactccgtctctactaaagaaaaatacaaaaaattagccgggcgtggtggcggatgcctgtagtcccagctactcgggaggctgaggcaggagaatggcgtgaaccctggaggccaagcttgcagtgagctgagatagcgccactgcactccagcctgggtgacagagcgagactccatctcaaaaaaaaaaaaaaaaaagaaactatgctatgtttggaaaaacaaggaactctttagagcaagcctggctgagcagcctcctatagtaggaaagctcgttgttacttttgccgtttgaaaagtcacttaacctctctaatcattattgtgaaggtcattgcctttttggtggctcagccaaatattgttttgagagtctggatgggaggctgactgacactttctgtgacttagagtcagctcttaaggaaatctcaggaggatggtagaagtagggccctttccattttcagatttttatctggtctctggagaccaggtaactgtcaagttggtttcagtacctcttgagtggcaattttcgtcagtcatcattagaggtagatattggatagaatatataataacagcagtatgtaggtagaaagtatgaggaaaatatacattgttttcctcatcgacttaattattaagaaaacatgtttttcatttgacaaaaaatcttattagctaaccttcttcattaaccttagtcttggttcttttgtgatcaactgcaaatttcttttatttttattttccccgagacrgagtttcactcttgttgcccaggctggagtacagtggcgcaatctcggctcactgcgacctccctctgcctcccaggttcaggcgattctcctgcctcagcttcccaagtagctgtgattacaggtgtgtgccaccatgcctgctaattattgcatttttagtagagacggggtttcaccatgttggtcaggctggcctcgaactcctgacctcaggtratccacctgccctggcctccaaagtgctgggattacaggcttgagccaccacgcctggcccacaaatttttttattggcagtttttgctgagattataggtagtgggcaaacaattgttattatgctcacaggcactataaacattttatttctactttttacttgtgtatgcttatcattggaagtaaatataacagactttgtcgttctcttgagttagttagctttgttatgttttcatggacataattaacctcccttctgtgcttaaaaatgttcgaccagttttatgttgtcgtcgttttgttttttttttgagatggagtctcgctctgtcgcccaggctggagtgcagtggcgtgatctgggctcacttcagtctccgcctcctgggttcaagtgattctcctgcctcagcctcccaagtagctgggattataggcgcgtgccactacacttggctaatttttcgtatttttaggagaaacagggtttcaccatgtttcccaggctggtctcaaaaacttgacctgaagtgatccaccagccttggcttcctgaggtgctgggattacaggcatgagccaccgtgcctggctgttcaaccagttttagaaaagatttggtaggaaatttcttcattgagtcaacatgaatttattaccacttctggggaaaaaaatcactacttagaatacatatcctacaaataatagagtagtatttttgtatgttaaggacaaatacttaaaaaatttagttgttgactgagcatggtggctcacgcctgtaatcccagcactttgggaggcagaggcaagcagatcccaaggtcacgagtttgagaccagcccggccaatgaaactccgtctctactaaaaatacaaaaattagccagacatggtggcgggcatctgtagtcccagctactcctgtttgggaggctgaggcaggcgaatcgattgaacctgggaggcggaggttgcagtgagctgagatcatgccactgcactccaacctgggtgacagtgagactctgtctcaaaaaaaaaaaaaaagttgggttgttaatggaaatttaggggttcagttcaggattttataaatctggctgcatgtcagatcaccccagagattctgactcaaaagtctaaaatagggtccaattctctttttaaaataaatgccccagggtgattttttttttttttttttttttttttgaggcagggtctcactctgtttcccaggctgaaatgtagtggcgcagtcttcggctcactgcagcctcaacctcctgggctcaagcaatcctcccacctcagcctcccaagtagctgggaccacaggcatgcctcaccatgcccagctaattttaaaaattttttgtagagacagggcctcgcctttttgcccaggctcctctcgagcacctaggctctagcagtcttcccaccttgacctcccaaagtgctgggattacaggcatgagccaccgtgcccagccccagggtaattttgtcacagctgggcaagtgttaagaaatgcctttcttaatttactgttaaaaatctaaacatagcactgggcaaaataaagttgtaggtattttcatagttacaaggctaagcatgcatttcaagatcgtaaatgtccattcaaatcaaattctgttttgtttcaaaaagttatgaaacaaaaaagggtaatcttactttgtccttttcatgtgatgaatttggaagggccctttaaatttattataatgggattttatatgaaatttgttgcaccttcatgaaataatattaagtatagagacraagcttctagagagaggttgtgtttattttgcttccttttgatgtcactttttactctgctaggcaccctgtgagcagttagtaaatcttcagtagtgatggccatggacaagcttgagatccagttaatggagattaactaggagattcctatctgggaatggcaagactgcagttgtgggcactgccagtctcttccttatttattctgcttgcagataggctcctaattagaagcttcactccattaaagcaacacttgttatcataagtgtttgcatccattgtgaatgctstcttttaaaactttgcataatacagttgcttgttttttcctgtgctttttgttcaatcaatacatgctagtaagtgcttatttttttaaagaatttaatttacatacaatgctttttgactagtatgaagtrctcctttgtgtacaagatcatgatgatccagccattgatgtatgtaagaagcttcttggaaaatatccaaatgttgatgctagattgtttataggtaagtaacaaattctgtagtaaccattttccattgatagtattaagtatcagtaatctctgcattgaactgaagattaaggtgttagccatgtttgttttaaacatgtttgttggagtactgagaggtgtttacgtccttttgagaaaagttataaaaacaaaggtttttttttttcatatctgagatgaacaaaatcacacacaaaataatatttttcccattaatcagacatgagggtctgttattttttgtttcttcaatattttaaatgtgtggccttttctgtatcttactgactataattggagtgaatgatagaattcacttttattacattacaagaagggtatttttccaaaagcctacaggcttatttgaaagacttgtagaggtgtgtttgccattagtgtttttttttttttaacatagagctgatgtggtctctctaaaaaacmagtaagtcgtataaaatgatatcagatctttgctatttgaagatcgggcaatgatttaaattttttattagcttaaaatgcaaatttgaaaattaatataagtgtagcatgcctacgaattaatcaggaccattacaaatctatcagctcatggtcagagatgctcattcttcacatgtgctatcttaaattatttactgtcatatatttatggggtttttttggttttttttttctttgatacgaattttttgctcttatcacccgggctggagtgcaatggcacaatttcagctcagtgcaaccccttccacctgggttcaagcaattctcctgcttcagcctcctgagcagctgggatcacaggcgtgcatcaccacgcccagctaatttttttgtatttttagcagagacagggtttcaccacgtcaggctggtctcgaactgctgacctcaggtgatccacctgcctcggcctcccaaagtgctgggattatagcctccccagtagctgggattacagtcaggcaccaccacgctcagctaatttttttgtatttttaatagagatggggtttcgccatgtcatactggtctcgaagtcctgacctcaggtgatccacccccctcgacctcccaaagtgctgggattacaggcgtgagcccatggtgcctggccatgtgtgtttacatttaataaacctttattaaatataatctcactgtatttatgaatttatactgttttaattatagcttcaaaataaygcctgtagctttttcccttaggattattttttaaattgacaaataaaatttgtatatatwtttggtgtacagcacgatgttttgaaatatatatatatgtacacattgtggaatagctaaattaagttaattaacatatgcattaccacacatatttattcatggtgggaaatctctcttagcagttttcaagtaaacaacatgttgttatatactttctcatgtacttatactttatttgtggtgagaaatctactcttagtcattttcaagtataccatacattgttgttacctatagttgccatgttgtacaattgccattaaatattgactcatacttaactactaaggcaaggacttaagaattagaaaaagtgaaacagtgaattttcaaagataaatgatacagttttccttttgagaatggacagttttttcctaaatatattattatgaataatagagaatgttaaataatatgaaagtatgtttaattattaaatatgcaagtattctcatttctatcatgtatctttatactataaaatatttttaatgttgcataaatcttttactactgtacctttacatttttaggtggcaaaaaagttggcattaatcctaaaattaataatttaatgccaggatatgaagttgcaaagtatgatcttatatggatttgtgatagtggaataagaggtgaggtttttttcttatttattttataaaactattaatttgaagataaaatgctaaaagcaatctcagatacattcatgagttctttttatttgcctaaaagagtaatttatttcatcatcatttcatggtaatatgtccagttatgcttactaagattttgatttttttaatcctaaactagaatgttacatgtattaaaatgttttcattttgaagagaaaatttcaaccattaaattaaaaatggttgtggttcattatataatctgcaagctttcccatgggtgtaacttttcccttgtttgcctgacacttatctttaatgtgtttcggcttgcgtaatacaccgtctcacaaagggacagaaattaataggtgcatattttactaaaacacatacacttatcggactatacacatgactttttacttaaatgattttagcaagaagcctttcatatactgaaattataacttgcattttcgaacactcataatagtttcagtgttctataatattttcttatattctaattgccttaagcttctcaaccccaatactgttcacattttaggctttgttgtgggagctgtcttgtaggatgtttagcagcatgcctggtctctaccatgagatgccagtagtacccccttctcagtagtaaaagcaaaaatatcttcagatgttgccggatgtcccctgtggggcagaattgcccccagttgagaagcactgacctagaatgagtatttaaggtccaaatacaacttttctttatacggtagatttagttcttaaagacttggaggaaatgaaaaataaggtcatgtaaaaatgatatgagatgtttgctaaagattgggcaataatttaaattttttattagcttaaaatgcaaattagaaaatgaacataaatgttgcactcctatgagttaatcargaccattacagatctatcagctggtcagagatgatgttcattcttcatatttgctatcttaaattatttactatcatatgtttttcagtgtacagatctctgttcaatataatcacgttccattcctgtgtggaaatctgatactcacagagaaaatagtctcatttcctatggttggagagtagagaagccagcacgagaactgaggtcctttagcctctgctcctgagccttttccactaggacagattgtccttattccaaattagaagttccaacagggggtaactttttcaaagtatattctgcctctggtacatagtaggtatatactgggctaaaaaatgtataaattagctttcgagaattaggcccttttgaaattttgtattctcctcagaaaggtggttgagattcattttattagatccatatgtttaaaataatgtattttattaagaatgtaataacaattcacaaaatatattttayattaatgggcattctactaaaaacaaattttcttttctccccctctctgccttttttttaaattgtagtaattccagatacrcttactgacatggtgaatcaaatgacagaaaaagtaggcttggttcacgggctgccttacgtagcagacagacagggctttgctgccaccttagagcaggtgagtatggtggttataaatcatgttcatrgtatcagacccctcatttcccagaagcttgagactatgggagctggaattaggtatctcaagttaactgtattaagtccatttgggaacctgctgtgttctagaagccctgagttgagagcagctgttttcattagtgaggaaattcttgggaccctgactgtaccctggcagtgaacagctgtgygcaggaaatgcctgcggtyttattgccagctgaacacagtctaacctcttgccttgtagtattcacttcctgttytagagttcagttctttatattgttctttcaaacattcgatytgaaaagaaccgctggccccctccccccagccyttttttttttttttttttttttttttttgcgacagarccttgctctgttgcccaggctggagtgcagkggcacgatctcggctcactgcaacctccacttcccaggttcaaacgattcttctgcctcagcctcccaagtagctgggatttcaggtgtgctaccacacctggctaacttttgtatttttagtagaaatggggtttcaccgtgttggccaggccggcctcaaactcctgacctcaagtgatctgcctgcctcagcctcccaaagtgctgggattacgggcatgagccactgcgcccagccctcaaaagaacctttttaaaataccacaaagtatttcaaatatacacaaaagaaaatgtattcatacaagtccttataaaacctatttgatgtccttttaaaacatatttctaataattacctgagaaacttatgttttcattttattttttctccaacttagaaatagtaacatccataggaaactataaataatggaaaagtataagatgcaaaaaaacaaaaaccaacaacctagaaccctaacaattacaggaagtttatggggtttttttgttttttttgttttgttttttttttagatggagtctcgctctgtcgcccaggctggagtgcagtggcgcgatctcggctcactgcaagctccgcctcccgggttcacgccattctcctgcctcagcctcctgagtagctgggactacaggtgcccgccaccatgcctggctaattttttgtatttttgatagagacaggttttcaccgtgttagccaggatggtctcgatctcctgacctcgtgatccaccctcctyggcctcccaaagtgctgggattacaggcgtgagccaccacgcccggcaggaagtttctggttttaaaaataaacattgtatcatttggacactttggagtctttatttcccccaccacccccttctgggccctttagaaaacattgttgagatagtattctaaaaataatctgtatcttatttttgtgactttgtaagcttttcccatatcattaatagcttttcataaaagtaatttttattggctgtatcataggccatcgtatgtgtgtcctatgcttgagttaatcattcctgtactgttaaacatttgggaggaaaaatttgttgtaatgttataaggacagatatgtgatttcagtctttaaatatgtcaacttgctcttaagcatatctgcatttatattcttttgaattgcagtcttatgatygccacatatctgaaggggtaaaggtacattgtgggaacttgcatctggcctttggcagtttgaaccatgagctctttcttaatattgcctgtaaatatatttgtcctactgcaagaaattgttagtcttaaataccagaatttttgtttagaaaaagaaactgagtagccactttaaaataaaatacaatgtgttctagtataccaaattgtatttttgtcttagaaatatccaaattgatacagatgtcaataacatctctgtgatgtgtatgtcaataaacatctcccagaatacacccattgccttagtgtaggtttaatctctggaagtcactctgccatacttagarttaatcattctcaactgtaaagagcacattcagctcagtgactaacatctcattcctaagacctcaataactactaaggaattaagatatgtgcctctgttcttagaagtcaggttcagttcagtcccacaaacactagggcttcactggagtctgggttcagggtaggtagcaagaatcataatcataattgccccttagaattctcttgctctgcactgtgtgtgtaactcctaagaaagatgactactctttatttcaggctaattagaaaaggcaacatatctgaggtgtaaataataaataggattttatgtctactaagtagggtaataacagtccttttctaccattgatttatcagcgtatatatcttatgacttcagagtatatgcagagaaatggcagtagcggatgagagaattttagtatccccgttatgaaaaatacattgaaaaaaatggagaaattgggaagaatcttagtgactaagggagagggagcagctagctacaaaaggatgcaagaaaaggaattaagaaataggattgtgtcccctccccaccccccaccccccaaaaaaataggattgtcccgaaggttgatatacctatgggtggtgtgtgtatgcatgcatgtatatatacacacatatacgtaacatacaaatatgtatattgatcccagtaaagtagatgtgtgtgtatatttacatgaacaccctaaaaacaagrtacattgaatatttgttaatattttatatatcaatgagtgatatttttaccttattttgtatctaaattaagttttatttggatgcatttttagcttactaactgtgcttgctctatgaaagcaatattgtctaccactttttattcaggtagtctacgtaagaataatargatattcactcaatcatacttataaaaaaaccattgggaaaaacagttcgtgaacaccatgcttttaacatgaaattctaatcatacacgtttgtggttttttgggcaggtatattttggaacttcacatccaagatactatatctctgccaatgtaactggtttcaaatgtgtgacaggaatgtcttgtttaatgagaaaagatgtgttggatcaagcaggaggacttatagcttttgctcagtacattgccgaagattactttatggccaaagcgatagctgaccggtaagacaactaaatgaagccatagtatttttattacctaacttctgttggtttattctttttgttcaacctatagattagggctttttaatttaattttattttttttgctagtaagtacagaataggtcaataattttattattttgtttgtttttgagacagagtcttgctctgtcacctaggctggagtgcagtggcgcgatcttggctcactgtagcctctgcctcccgggttcaggtgattctcatgcctcagccaccagagcacctgggactacaggcatgtaccaccatgcacactaatttttgtatttttagtagagatggggtttcttcatgttggccaggctggtcttgaactcctgaactcaagtgatctgcccacctcggcctcctaaagtgctgggattacaggtatgagccaccacacccagcagatcaataattttatagagtaattcatattctaattatagaattgtagatatgtactaatgaagaaggtaaatgttctgattcctctacatttttcaaattaatgtgttttaaagcgattaaaagtaagtttctctgtgtttagaatttttactatatagatacaaatttctgtgttttagaagaattaaaactatcagtgcagtcataaactagtaggtgaaaatttaaagactatcatttcaaaatttgaaatttgtcagtgaattatatgatactttgctaagaagccactgaaagattcatatgactgacttagcatttctctatcacaaaatacttgttttgttttggttttttttttttttttgagacagtctcgccctgacatccaggctggagtgcagtggcgcaatctcggctcactgcagtctccgcctcctgggttcaaacgattctcctgcctcagcctcccaagtagctgggattataggcacccgccgccacactcagctacttttttttgtatgttagtagaggcggggtttcaccatgttggccaggctagtcttgaactcctgacctcgtgatccgcccgcctcagcctcccaaagtgctgggattacaggcatgagccactgcatccagcctaaaatacttgtttttaaaggagatcactgccttgtgtgagaattcttttaaattttttaaaaactgaagtgtgttttaaatacaaattctgtcatgattgtgttcatgtggttcatggtttcctagtgtctcccatgagatccataatgccactttctgtttacatgtcttgttgtttggttagtagtcatcagagactaatctattaaatatggagccctctccattttttttcaaaatgactgcattttaagtttcttaaattgtaaagtaaggtgggtacagtttcttctagttcttagatggtgctgtcacgggccagcataattgctaaaacatccatacgtatggtagaccttaagtcatgtgctaatcatgaaagctgggctcaccctgaataccggcagttgcctggtctttataatgattactgaatgcataaccagttaygcttgcatgtgttcatcatcataacttattttctaattatcttaattttcagaggttggaggtttgcaatgtccactcaagttgcaatgcaaaactctggctcatattcaatttctcagtttcaatccagaatgatcaggtaaatcaactgttttctttttatacttcrttaaaaggaaagtggggaggggggtggtaatttttacaggtttaatgtagttaaatgaatgtacctaaaggttgaagatttttgtttagttgcagaaaatagagtttaacgtctgtgtttaagataaatttaatgtctaaatgtattttatttgctgtataacactgaaagcactcattagagaaatgttgagactgaattttttaatatgctgatctttattttctaactttctgtgctgattaaattttattatctgtattcatcagagcgtaggccatacaaatgaatttaaagacatttttctttgacatcctagacaaaaatagaaaagagagtcattaaaaaaaatttttaggttgtgtgtggtggctcacacctgtaatcccagcgctttgggaggccaaggcgagaggactgcttgagcccaggagtttgagaccagcctgggcaaaatggtgaaaccctgtctctacaaaaaatgcaaaaattagccaggtgtggtggcgtgtacacctgtggtcccagctacttggtgggatgaggtgggaagatcgcttgagcctgggagattgaagctacagtgagtgccactgcactccagcctgggtgacagagcagaaccccgtctcaagtaaaaaaaamaaaacaaaacaaaaaaagtttaaagagaatggtctttctatcacagggtaaaaaaattgattatttgagggaaaaaaaaaaggatttgtcttgtagccaggatattgttttaaagaaaatcctttttgtttttccaggtggaccaaactacgaattaacatgcttcctgctacrataatttgtgagccaatttcagaatgctttgttgccagtttaattattggatgggcagcccaccatgtgttcagatgggatattatggtatttttcatgtgtcattgcctggcatggtttatatttgactacattcaactcaggggtgtccaggtatgtggataggcatgaaaaggttggcagtcccttggtggaactagaactatttcaatttagaaaaagttgaaggaaatgtatctgagccattcttcagcttcccattgtaggttagtctcgggtttgaacatgactttctctagtggaatgttgatgcaaaacttaagtcgatttgcaactttctattggttatataatcgcttttattaagtttccaaaaacatgaagttaattaaatcagtgagtattgaaactaataagacattaagatagcagttattttaatgcttcattaacaattagcattttcttgaacggtataacatggcagttaaattacataaggaagcagacttgattttacatagtatacttagaaaagtgaaatccaagaatttaattttttaaccttgtctttagtttgacagtgagtgaaattaaaaaatttttttttccattcctagggtggcacactgtgtttttcaaaacttgattatgcagtcgcctggttcatccgcgaatccatgacaatatacatttttttgtctgcattatgggacccaactataagctggagaactggtcgctacagattacgctgtgggggtacagcagaggaaatcctagatgtataactacagctttgtgactgtatataaaggaaaaaagagaagtattataaattatgtttatataaatgcttttaaaaatctaccttctgtagttttatcacatgtatgttttggtatctgttctttaatttatttttgcatggcacttgcatctgtgaaaaaaaaaaaaaacacatctgtagtcttggccaaatgatacactttattttgtggaagtagagaatcaagagaattggttctaggaacctgggttcgttcatcattgttgtttatttttttaaaataaataaataaatatatatatagatgctctgcaacaaactctgtgacagtatccttcagtagagaaagtttcttacttgtgagtacactcttttagaacatttacgggtggcagcagctttgctttagagtttagaagataatagaaggaatgactattcatgtccaaagtgaatggttttgtgcagtgaacaacacatggygaggtactaactgagaaactttttcatgctttatgcctacctcttgtagttgttgcagagcaaatayaaattgtaataagatagctaggccttgcagaaacaaacagaaaaacttaaaaaaaaatgatataagagctggagtctagtatttatatgaatctgtgagagataatttttttggtctcactgcaatgaaccaaaagcggctgagtttggtttttaattgtagccatgtattgaaggcatctttttgaccaactcttgttggttctgtcttgaaccattgttaatcactgtgctgtaattagtatagctaaatcttttccttccttgctcctcccccagcccaccccgtcttcccttaacattttttcagggggggttgggagtggtttcattttagtgtgagtggatgttttgatagttgtaaggaaaaaatgcatttcagacacatttcacacatgagctattttcttacacagtatgtcttattgttaataagaatgtaatttcatgatacaagtatttaataccttttttaagtcagtaaatattctagccatcaataaattgcagtagagtattaagaggggacaggatgagtttactcttaaaattaatcagtatcaaactaagtctactgtgtgtgttttttttttttgttttttgtttttgtttgtttactattatagtaagtctagtcttatttaaattggatttttgtattcmagtttatatgacaaaatagactagatcagcgctggttgtaaatgcatgctgtacctcactgttttctccccatcatgccgctaaacttgctcgccaggttgtgcttaacttgtggtgaactggacttgattctgttttgttttgttttttwaaaaaaaaaaaacaaaaatgtaagggacagtgcataagccttttctttgttaagtagtggtgttttgctttttcttcaggattggatggcatgttgtccacaggaatgcctactgcagggctaacactggcaatatggcagctttaaattctgagttactacagtctccatgtcaaagcataatgtgtagcatatcagcaataactacatatttatagaaaacactttttcactttactgagccaattcatttaattgtcaaatgtctatatccatggtttaaatggcaacatatctataagtatgtatacacattatatttaagcttttctctgggccaaactgcttcatccttttttctttctttttttttttttttagccttatgatgaatttgtttgaagggcattttctttatgaacaaaggcttggatgcatattcctttctttctgtgaatgggtattattccctgaggaaagttgcacagtgaaaaccagtctggttgtgacccactacatgttttgtttttaatcactattacctgagttgaactttgctcaccatgtttgtacttgttggtctgtttaatgaagtttggttgatgccatcctttgcactgccgaagcgtaatcttgtgtattacttagctctctgctgatctcagtatggacagtgtaacarcaaaaccaaaatggctggacagacttcttgtgttttgtaaatataaactaggacagttctgtaggtttgttcagtgtgctagtggagtatttccttaatgtaaaacttcacttaacagagagattctttgtttagcaagcttggagtgatgataaaatggtaagaaataatataaatgttgaagaaagcatcacaacagaactataggagtctaaatttaataaatctttaaaaaaaamcagtgtctagaatatataccatgttttattatttaaaatcattgtcttaaatttttgttcaaaaaataaaaatttgaatacaatcaaaacgttagcaatagtgtattttttgttcttctgtatttttataagtagcatgttccaccattcacatcagaattattagaagagttctgtcaagtattccttttgaaatcttccttttacctgagccataggtaaaataaataaggacataggcagtcctgtgacttaagtatggcttttctacattggttgcctgttaaaatcacctggagaacttgtaaaaaaaaaaaaaaatacacaacacacaccctgggccctgtacacaacacacacacacaccctgggccctgtacacaacacacacacacaccctgggccctgcccacatagattttggtgtaattattttgggtgaggcctgagctcttctacccgtgattctactgtgagaatgactggctcgtaatgacctttagaaaagagccagtggtcctttgggcccctctccccccgggctcacagcttgaactcagccttttagatcttaccactctaatggctagaaaatgtaaatccaaaggaaggaatggagtggcattattacttgagacccagatgggagatgcaccttacatactttccaaggccaggtccctcccaagctggaagcctttacaggcctgttttaccaccatcccatgagaaaagaatgttcttaactggagaacaaatccggggtagaaagaatccgctctcagctgatatttttgtctctccgtagttcctgtgttgaaacctaatccccaatgtgaggagggtctttcaaggtgaggcctttggtaggtgatcagagccgtcaggatgggattgatgcttataaaggaaaccccagagagctttcttgcctcttccgccatgtgaggatacggcaaaaaggtgaccagctatgaaccagaaagtcagcttttactagccactaaatctgccagggccttgatcttaaacattccagcctccaaaactgagaaagttttgttgtttataacccacccagtctatggtattctgttatcggagccgtaagacacagtctaaaagggatctggcccagtaaacaaacattccttctcatttgtgtacttctaaccctacagtttaagaaatgatcaacacaaagttgagtatgtcttagaatttcatagctaggtggatcttgaggatccctcacccttattttagaatgaagaagctgagacacccacggtgagagctgtgatcatagggttaggtaggcatggtgctggtggcagagctgggagtagcccctctatctggtcccagtgtggtatatttctccgctggaccacatttaaatttatgcttacactggcttgaaaatttacctagaccttaagggggaaaaatatcacagttttaataaccatctgtatcctaactcaaaaattgttctagagaaccagattcaaacctgtagaacaagaatgtaaattactataaagctcatttaaagtgaaatgctttacatacatgattgataagattgatgcataccacaagactgtgttcatgagaatggaaatagttcagacctttccttctgaagtttatcaggatctagtgcttgagttatttatttattcatttcaagttatagtttacgaccatatcaagttcatttcggtgaaaagaaagcaaaccgcaaaatggtgagtacctgtctctgcagagctgcaaggatatgtgtttagttgggtaatttgctttaaaaatattgatacctagaaaaaagtttaaaatcactatcctagtattttctaaaaacaaaaatacatatctttaagagatccctaagcagctagtttcctaagaaccaaaatgtgctaagcctttcacatggcccctcctcagttccgagagaaattggcagagactgtgggtgtctggaatggtttcatgtggttgtgctgtttagactaatcatcattaagacatccatgctaatagcatggacttgtaattatctaatttaagcaatttagggatattatttattcttctacaggactgagagtatctgcacccctcctctgctgcctgcacaccccattgcggtcatgccacctttgtttcccaacccttgtcaccagacgtgaaacctctatcatttcccctcatgactgacggacaccaggccagcctaaggaacatgctggagaaatccagcagactatttattgtgcagctctggagcaggggaaaggaatgggttagaagtggtgacttgggagtaatttccctagaggtgatggctgagacagtgactataactaaagtcaaagtgccatttagagagacaatggaagaaaaacatctaggaaaagaggctgccaaacctggggtccaaatgggctttttggtagctatgggactttaggaagcttccttcatctttctgagccaagctttcttaaccatgtagaatggagatactaaagcacctgaggtggtagagatgattcgatgaggtcatgtacatgagcatagggacagttagtgcctttttcctcccaaagaagaaagaaatagtaaaaggagtgccacagtagccttggaaagagagatttcaagaaggaagtggtcacgggaggggccgttgaccgtaaaggatgagaagaggctggtgaactctggggcaggaaactccctgtagagttgccagcgtgggtctccgccatagtgaattgtctcagacgttgatagatgaagtgtctgcgtgggagtaatacagcttctttatgaacgatttttcttgttttacacagtgatatattttctacagtgagagacaaaggggtgggactttcaaagacagaaattgctcctgaccctgagagcacccatatgactctgatgccaaggaaacagtttaagaaaggcagctcccaggaagccagttcatcagagtggaagaagcagaagtcagatgctttaggtttggctgcgtgtgaaaaagacatgaaagcgatgggcacagatatttggaaactgcaacaacgatgcatttccacccaaggtcccagtaatactaagccaaaaaactaagcctgacttgaatttgtgagaaatgtcctaagaagttgggtcattaagagacgatgaaggggaattgtccatccccatcttccagtctcctgactttatcctagactgtctcccaacagcataatcggcatcccggaagcagctgtgggcaccctagccctgcccacagtctgccctttttcattttgttctgattcgcttatttttggttatattgcttgttttacttcctgctttgtctctacattgacttggagcttgacttctgacttcagcttcttcctctgaccccatgttcctcagccttactccaagcccaggaaaaggtggtccttaattttctattctcatttcacatcaccatctctccagcctgagctctccacccccaacccaatggctcactctcaccagccgacccttttccgtgtggaaccagagcttccttgctcccatgctgtttccttgccctgaaagtttctctcccttcatcctcactttccctgtctatggggatactctccttctttattgttggtttttttgttttattgttttttgagacagagtgtcactctgtcacccacctggagtgcagtggcgcaatctctgctcactgcagcctccacctcctgtgttcaagcgattcttgtgcctccgactcctgagtagctgggattacaggcgtgcaccactacatccagctaatttttgtatttttaaggggtttcaccatgttagccaggctggtctcaaactcctgtcctcaagtgattcgcttgcctcggcctcccaaagtgctgggattacaggcgtgaaccaccgcacctggtcaacatactctcctttaaacctcaactcacattcaattcaggacctttccagagttgtgtgtgcccacattttgtccctttcattttgtcaggcatttcacttacgtgtctgcaggtcatttccagttttcaggggcctggactttgcatatcttagtagtccttttttgtgcttttttctctttgtacccttccctccagtgcattcatgtaatagtcactcgggaaaggtctattgttgacagtcaagccagaatcaaaacattaattctggcacatatgtcatttaatacctttccaccctctcattgtgttagtaaggtgtttgctatttcatgctcccaacccccccaccctcaccctactaaaacaaaagatttctctacacatgagtaaaatactaaaattttattttccccttctagaatcttctagttctggttttgggtttttgttgttgtttttgtttgctttttgttttttgagacagaacctgcctctgtcgcccaggctggagtgcagtgatgtgatcttggctcactgcaacctccgcctaccgggttcaagcgattctcctgcctcagcctcctgagtagctgggattacaggtgcacatcaccacgcttggctaatttttgtatttttagtagagacggggatcaccatgttggtcaggctggtctcgaactcgtgatcttgtgatccgccctcctcggcctcccaaagtgctgggattacaggcctaagcccctgcgcccsgcctgtttttttccttaaactttgagaagctagcagtttttggaaggaatcaagaggtgaccctgtcaagtctatcttatcaacatcctacaagcccattgattcttgttgtgttttattttctttaagttacacattggttttggatcataaaaatagtacatatttactataaacctgaaacataagaaatgaacaaaagcccttctaggtagatactcaagagaactggaaacaaaacgtccacataaaaacttgaatgttcatagcagcattattcataatagccaaaaggtggaaacaacccaaatgtccatcaactgatgaatgtacagacaaaacttgatcatatacagacaatgggatattatttatccctaaaaaacaaaggaacagccggacccagtggctcacgcatgtaatcccaacactttgggaggcctaggcgggcagatcacttgaggtcaggagtttgagaccagcctggccaacatggtaaaaccctgtctctactaaaaacacaaaaattagatggatgtagtgccacgcgcctgtgatcccagctactcaggaggctgaggcacgagaatcgcttgaacccaggaggaggtggaggttgcagtgagccgagatcacaccactgcactccagcctgggcaacagagtgagactcttgtctcaaaaaaaaaaaaaagaaaagaaaaaagaaaaagaaatgaagtattggtgcatgccacaacatggacgaaccttggaaatgttaagtgaaagaagttggatacaaaaggcctcatagtgtatgattgcgtttgtatgaaatgtctagaccaggcaaatccatagagacaggaagtagattagtggttgccatgggctaggggatgggaggaatgaggcatggctactaacagtggtcattactaacagggtttcttttggggtgataagaatgtttgcaaaggaaaaataaatatcactctcaatgtattatttccttcccacattctggcacatactgctgaagtgctttccagagaaggtgtgtgcgtttctcattacttgtcatccttgttaggagtcagaatagctattttctaaatctttctaaatttgacagatgaaaatgtacatcattctttaaatatatggctttttaatggctggtaagatcgagtatttttgtatgtatgatttttatcatttaktcattggattttcttccacttcttaatcttatttatttatttatttatttatttatatttatttatttatttagagaccgagtctcgctctgttgcccaatgtggagtgcagtggtgcgatctcggctgactgcaacctccac

SEQ ID NO: 95351 - DNA, 80062 bp, Homo sapiens
ataagatatggagatcaaagatggataaagcatggtttgttgcctttaaataacttttcagtgtaatgggccataaatttaggctcaattatgtggtatactatccaaaccttctataggacatttgcagtgctaagtttcagcttgtccacactgattgagaatcactgctgatatctaagaggactgggtggggtagggctggatttttaaactcacgaggtagctgtcactgtcaataaaatgccaatagcaaccacagtgagaaacagctatgtaggctagctctcgctcttggtgtaactatgtctgtgtgcaaaggaagtggaattgattttgtgttacagaaaaaaacacacacaaagaaaaaaacacacaatgaaaatggagatctcttgagttcttttttgaaagcccgtagtcaaaaattattttttagttctttgttagtcaaatggtgcatctaatggtcagggtgtcagtaccagtttcgaagtacagtgccagttatttccctgatggtagtagcctccttaaaacttggatattgtttatcctgcgatttaaatttcagctatttactctcatttttaatgattttgtgagtatttaatacttgctttattttataagtatctttatccattttggaagtagacaattatgagtgtttggttttaatggccataaaatgaactattggatttgatctccaacatccctttagctgttaaattctagaattctttgctttgtaaccatgatttaacagaaaagtctttttaaaatagtgttttattttgatttagtaacttttataaaaagtaatacttgcttaatcactccaaaaaatcagtaattactctgattaaggtatcatattagtatatttgggtccggggaataagctctaattgtgtacagttatgtcaaagttgatattaatttatgagatggtacacattgacttctaaacaccaaagaactaaaaatttgaaacttaaaactttgtattctcattaaatgaatgaaaataaagtgtctttatctttagaagatttttttttaaaccctaaatcaataatttgtgctcatatagaaccagtcatggattaagaccctttgtaaatactagttttggatttaaaaattttctgagacatgtattaaaactaatcaaaatttgacttaacatttaaattatttcagtatatcaaatcatatactgattctcttttcctcttgttttaaaaatcttattaaaccttccatatctgaaatggtttgaggtcttcctcatctggggtgggagaaggctattctctgcagaatggatctgcaaatattcttaaagaacagtaaaaatagctaaaatgtatttgtcatttactgtgtgtcaaggtaagttcaaagggtttacatgtatttacacatttaataagatgtgtactgtttttgtatctttattttacagatgagcctgttacataataggtgtgtatgtccaaggcaaagtaaaatagatctgttacctccctttgttagatattacgttcctggccctactgcctgagaacacacatgctttgggagtgagggaaggcacttacatcagtcatgctaattaacaccaaattaatgcattttttagctttgagtaaactgaacttttgtctttgcatatatggtgttgcatttcttatatgccatatttgtacagttatgttttgggaattaaatgtaagaggccatacttctataccaattaaatttaacctctcattcccatttgtccagatcccaattctgtcatgtaacgtattgccgatttttacctagctttgagttgcttatagattgggtaaatacaacttctaggtcttcaaatttctaacaaaaatttcgaatcattcaggaattaggaacccaacagtgcgttaagaaaacacctctttctagattggtccttttctatctaatatatttagttgtattagcatatatttctgtcttgcctgcaaaaatctcatgctgatgtacaatattaataatcatttttagcactccatgtcttacctgttaatttactttgctattttcttatatttatttagtttttctaataattgattttttattgttgagtctggataacttttctcttcttttttgtttttttttgtttttttttttttttgagtctcgctttgtccccaggctgcagtgcagtggcgcgatctccgctcactgcaagctctgcctcctgggttcacaccattctcctgcctcagcctcccgagtagctgggactacaggcgcctgccaccagacccagctaattttttgtattttttagtagagacggggtttcaccgtgttagccagaatggtcttgatctcctgacctcgtgatccgcccgcctcggcctcccaaagtgctgggattacaggcatgagccactgcgcctgaccaagtctggttaactttcacacaacgtttccttgctctgtaaagtaaccttatgaaagaaggagttgaaattgtattattaaccaacctctttatgagctctagtaactactaggatataatcatccttttgtctttttctaaggccctacccattcacagtaaagattatatgtcagtaaaaatccaccttattgttctttttgaatactgtaaccttttttgcccacctccagtcttccgctacgtgtgcttgtgcgtgtgtgtgtgtgtgtgtgtgtgtgttttgtaatacctcaaagactaccaacagtggtttgttcagagacaacatttattctgggataaattttgtaagccaggaggcctacatgtgctttctttaaaatctccctcttcttgggcctcagcttgcacttaacattttttcttagacttttcaagtagaagataaaattctattagaaaacaaagagaagcaaaatagatgttctgctttctgttgtatatcagtcccaaatagcctgtgtctcaacttgattgtcatgttgtagctaacaagtgaaaagcaaaacttttttattgtccttcgtatttttgtcaaccagccagttagatgaatggaagagtgggtaaagaagaaaatagtaaaaggagctatgggtgatctagaaatagacaacaacctgctgcataatttgtaggtgattggtaattcaaataggtccactttgggaaagtggctcatttgcatttggtgcttttgtctgggcttccttttctttaaatttctttaaacagtgagggaattgagcatgattaatattcatgtgcttatcaaagctctgtggcttgcaaagtaatagaaaactcaacccctgaagggcatttattgacagattacggaaaagatcagtgatgggacaaactttagtcactgattgacccaggggctcaattgatgtccaggattgacagccacatgctatctctatctctctctctctctctctctctctctctctctctctctctctctctcctgtttgaattctctgtttgaattctgtgaagagaaaagacagattggcacataggaataaaaaaaaacagttttattactgataaaagctggaatggatgacttggtttttgtgtgacaacaacgctctagtattgaacccagaactaagcaattatttacctctactccagtaggcttttaaaccttggggtctgcccctaaaaattcaaaccagaatacatgagtcctccagttatctggctccccaaagaaggcagaggtgaagaagctacatatgtctagtttctctaggaaaatctcctatcaggcaggtcatttcacgtccatggtgattgatgggatagcaggccaggagttgttgaggaaaattcctctttgtggaaaccagaggacggatgaacaaacatgccctcaacacacagacttatcttaattattttatttgttaaataataatctattttaaggttagtgtgatgttcaggccaacaaattctggatatagaaacctaaggagattatcaaataaccaccctctccagtttttcaagttggattattattataattgatgtgtgcgtaggagggaacccactttgcctgggagatgagtaaaattggtaataattagacaagcataaggatttgtgaagtgggaggaaggaggcaatgcaagaaaatgtcttgcagaatctgtaactgtcacatctttgcaagtttaacctaaggcaagcaaacttttctcacccagccatcctcaactcactcatatgaattctaagtttttagcccattctccagttcagtcattctcacaagtgtgcttcctagactgatagcatcagcatcaccccaaaaattattagaaatgcagattattgagccccaccttaatctgcctgaatctaaagatgcttgaggtgtggggcccagcaatctaactgattctctgggtgattctgatatatgctgaagtatgaggaccatacaccatgatgtacagacatcttcatagcagtttcatagctgaagatttattgcatttgccattctaatcttttctagttctaatcatcaaacattttaaaaatattttggagtgcaggtagattgcttgaggtgggaagacgttaaatctgtaaaatggagccagacagtcatgagcagcagtgggactgcattttcatcttgtaggtttagatttagtggcatgatgcctatttcaaaaactaaatgtagcagcaaaatgcttagggcattgtatgtgtgagacattagaatgaggaagaaccaaggggttaatgattataatttgcatagaggaacttgaagatcaggaagaaaaggggttatatacagaagagacttttcaaaggtagaattaacttagtaactgactgaagccggaaaggatggaatcaaagatgatttaagattcctagccgaggtggtaaggataatggtggtggcagagctatttaatgagtgaatgagatgagtccattgttgggcatgttaactttgaggtgattgtatggagaggagagcttatctttaggcagattagtataataggaggacttgaaagtatgatgaagaaataaatgtaatgcatgtattcattcctcaaacttttactgagtgtctaccatgtgtctggtacagttctaggttctcaagatgtagtaatgggcaaactctgccctcagaactaatactgtagatggagggaaaaaaataacatataaacaaatgaacaagataaattcaggtaataagaagactgggcaaggacaacaaaagagtagagaatttctttagatagggggtcaaaggaagacctgaggtggtaacatgtgacaaatcatatagagtatagtttttgccggccaaaagattttagagtcacagagtggccaatgagaattacaggaaataatattaaaggatctgttatgctttttgtcctttcaggggctattccatatgaaagacttggagagagagatccaagtataatgttaaaaggaacttgggcttggagacagtccacctcagacatttcagccatttgttagctgggcagaaaactcactttcttgaagtctgctcttatcactagaagaagaaggagtaacacctcatgggattaaattgtaatgattaagtgagagaatgaatttaaaacaactagcatagtgcttggaacaataacagtaatactgagtggatcataaaattcagtcatgtgaagtgcagttttatttaataatgtaatctaatgtcttctgatgtacagttttatttaaaagttgtactttgatcttttatcatgcaaagcactttaaaagcacaagactggagttcaaaaatatttatattattaaattatctactttagctacctggtgacatttagaaaatatgcttacatgcataatactcttaagatagattttattaacttttaaatattttcttcttacagatgtgtatatctcatgattgatatggagaaactagtcatgggccaaaggtcaagatacttctctgggaaatgttgctgctgatgctgctttacaaagtcatacaatgagtgtttggtttaagaaagattttcatacttaaaagattttcatcttggaaatacatcaagtgaaaattaaattcttttgggaaacattttccttctgatatattatacttgtaatgggcgacatggcaaacaactcagttgcttacagtggtgtgaaaaactctttgaaggaagctaatcatgatggagactttggaattacgctcgcagagctgcgggctctcatggagctcaggtccacagatgcattacgaaaaatacaggaaagctatggagatgtctatggaatttgcaccaaattgaaaacatctcccaatgaaggtgagttttattatgcttgtttttggttctttgtgcaaagagttctatatatttggcttataaatgagcatgcttatattatcttggcgattgtatgattatgacataattatagtgacattaaaaatgggttagttatcagattaatacagttaaagtatttttatattaacacataaatgttgcaaattaatttatatgttttagattggcgggatgaaatattttgttccattatatatactactgcttcctgtttatgataaaaagattgtcttccctttgagctatagaggatggaaccaggcttggatgcctcccagggatttggtggaaataaactctcagatcactatccttcattttgctgggtggcttaaaatagttgtcactctcagtagttgattgagttggttttagcatatgaggcttaacctaacctttaataattagctcaggagttcctaaagcaaatgaaatagaagagatggaagttagtttttcacctaacagacatttcctttaatgaaactagtttttagtctttgaattatgttgaatattcctgtgttcacagaagcctttggtttcataaatttgtatttgtggcaggttttccttttgttttttcaaaaaggagaattcattataactttctggcattatggtctttgaaatgatttcagaagattgcctttcataaattaatcagattaaacataaaataaaggttaggacattccaggaaagcatttccaaattgtaaaggcagggatgggaagggacacatatgaggatgaatggggattacaatttattttattaaggatgagaaattattaatgtaaaattttaaagtatattagtatatattccaaagctaattctagagaaattaagcaaaagtatttttcttaatatttttcctgaaacattttatgccatgctattgcttagataatatataatgtaatagcaaaaagtcttttccaaaattaaataactttaaattatatttaaaaattctttaaaacctttgtaacctatgtaattcattgtgaattgttaattattttaatgataggtagttactttgatttctctgaagtagcatgatcttgaggaagccagagtcagtattcacacatgtcccaacagggcttctttagactatttggaatatattctttgcctgcaagacctgttaactcttcaaggttttctgtatcttttcaaattggaaccactagaaacaccagcttcttagttataccttagatatgctacaccattttgatgtagttgggtttgattactacaagattgatcccaactattaatacattaaaatggtattgcatatctaaggtataactaagagtatcaggaacagttcccatggacttgaatagacagtaatttgacaaaattggttgcatacttaaggtataactaagagtatcgggaacagttcccatggactttaatagacagtaatttgacaaaatttgaagcttgttcattatgcaaaccgactttgagatgttatatagcatcttagagatttgtacattagtatgctattctcagctggtagatctattaattcagcttaatcattaaaaaatctcattgttttatcatcatcaaattgataggggacactaacattaaggagccctcaatataacaacatagtttgttcataaaagcaatattgaactttagtttcaaatcttcactcaactgtacttcccctaaccaggtccttgcatttctctattaatcaaagttcttgtcttctgataactgaataccccaccatttgagaatgagaatggcttctcatttttatagacatgatttctcatgagtttgcactacagtttctttcacggtattatttggagcggtgccttttaaattggcttaattagtgaagttaagttaactgaaaattttacctctagtacagtggtttttaaaatttgagaaggggatagttatgtacccttttgacagtatgttggaagctatggataatctctagaaatatccacttagcactcaaaattctatgtgaggccgggcgcggtggctcacgcctgtaatcccagcactttgggaggccgaggcgggtggatcatgaggtcaggagatcgagaccatcctggctaacaaggtgaaaccccgtctctactaaaaatacaaaaaaattagccgggcgcggtggcgggcgcctgtagtcccagctactcgggaggctgaggcaggagaatagcgtgaacccgggaagcggagcttgcagtgagccgagattgcgccactgcagtccgcagtccggcctgggcgacagagcgagactccgtctcaaaaaaaaaaaaaaaaaaaaagaaaaaaattctatgtgaattgttgctgctttgggctattarataaattcatgcattatcccctctytaattcgtagacagtttttgctcatgttcttcctagtattgtgaatttaatatttactaaaatttgtataaacttgtcctcactgtttatatatacacaatttgtttttttgaaatattttaaaaagaatgtgaagcaagccattttaagcattatacttatatttacagttgaaaatacaaatgaaaacagcagtgcagtggctcgcacctgtaatcccaacactttgaaaggccaaggcgggaggttttcttgaacctaggagtttaggaccagcctaggcaatatagcaaaaccccatctctgcaaataaaaagattaaccactgtggtggcacatgcatctctgctattcaggaggctgaggcaggagaatcacttgagtccaggagtttgaggctgcagtgagctatgattgcaccactgcacctcagcctgggtaacagagggagaccctgtctcaaaaataaaaaaaacacagcagcagccttcacaagaatgttatttccaaaggaatattcatagttttagtttaacttagtggaaataattcactcggaagcattttgtcactgatcaagcatacaaatggtaataaatgaaacatgaccaggagtaagcaattaggagtttgtacgtccaaggaaatgaactagacagcaagtactctttcgttagaataccctgtttatagtcagggaaagtgagaattaaactgattcttcaaagtacatgaatttcagttaggtaaaactgaagttgtcttacctgtccctttagttcattcatttattgattcattcattgacatatactttcttcagacatgggatattgattgtcctgtgttttatatacttcctctaaaaaaggtggtggggcctggcagttactggaaggcagttgttggtgtataattaaatcatcacaattttagagactttatgtaagaatatgtgcatcttagaattgctgaaattttgtagtatttattagtatctgccacgcagtaggcatttttctaggccctgggtatacagccatgaataaaacaaatatctctgcctaattttcacatgttcacatggggagacagttcacaagacaactagtagtgtgttggcgatacatgtttaaaaaaaatgagtggagaagggaaatcagaaatattgggggtgtcgatattggatttctgtcaagtatggaggagcaacccaagacatttcttaagcaaaaccacaaaaatgataggctatccttatgatgggtaacactttttgtgccatattggctattagcacttgaaaatattaaaataagttaatattttaacaagtttatcctattttacagccaaagaaccctcaggacaaaaaagttaagcagtttacccagagtctcactctggctccagtcttattctggcttcagagaccatgctttaaccactgcattgtatgttacctgttacaaaagttcagttcacatagcttgtaaaagagttgcactatgaagaaagaggtagctgtgttccctcttctctatagtaatttttgataggggaaaaaatttttggaattacatggtgaaaaaaattttggtttaaggttctgcttatcaatttgttctttatttaaaaaacataccctggccaggtatggtggctcacacctgtaatcctagcattttgggaggctgaggtgggaggatcgtttgaacccaggaatttgagaccagcctgggcaacattaaaaaagaaaaaaatgagccaggagtggtggcacatgcctgtggttccagctactcaggaggctgaggtgggaggatcgcttgagtgtgggaggatcgcttgagtgtgggaggatcgcctgagtcaaggctggcagtgatccatgtgtgatcccacaaaagagtgagaccctgtctcaagaacaaaaagagtgccctattcaagaaattgtatttatgtgattcctgtttgtcttgcccatttatcacttgttttctaacaatatgttttgaagaatatcatatgcatactggtcaataggaagtgttttgaccagatataattttcatattaaaaacttcccagtggttctgattaaccatcctaactcctaaagaaattggaactgtaaatttcaaagtgaactggaattgaggcttgtaacttcatatttttggctccgttagagaaagcatctgtcttacagtcctcagaatccaagaatgcacttttataccaaaataacctgcttataacatcctaactgcataaaattaccttcacagtttttttttcttctgtatctttgttgttttcctgcattgactttcttattcatattctgaatcacattccttgatccttatatttttacactagcttttggtatatctttcatctcattgtggtcctatgttatattttatactggatggtagggtttctggtatacaggcctccagccctaggatcatgtttgttattcagagttctacattaaaaaaggaattcatttttataaatgaattcataaaaatkaaaggcaggtgccaagtggtattctgtaagaggcatggcttcatggacttgtaaagggcaagaaagcaaatgagacactaagcttttaagtggtggttgctgaaattaggtccaggagtttctcctgagctttaggtttgaaagcccaaaacacacaaaacccacagtgtttaactggttgcttgtcagtctcccccaccaaactatgagctctttgagggcaagtggtagggaaaggcatcctgagtcatttccctttgtatgtctagtgcacagtgacgtagtaggcatttgggaaagaatgtgtaagtttgactttagaacagtgtctcttaaatttgcagttagggacgggattgcctcctcttttgaaattgagaaaatcatgagaatattagattgtttcccaagaagaataaacataaacataaatttttatgtactttcttggtctgcacattttccggtgtccctcacttagaaaagtcagtttggctgctgctataggtccaccatgatacagactgtgttactccgtttgcgcactgctataaagaaatacctgaggcagggtaatttataaagaaaagaggtttaattggcctcatggttctgcaaggctgtacaggaagcatggcatcagcatctgcttggcttctggtgagtcctcagggagattttactcatggcagaaggtaaagtggaagcaggcacatcatatggtgagagagggagcaagagaaacaagggggaggtcccagactcttttaaacagccagatctcatgtgaactaactgagcaagaactcacttatcaccaaggggatggtgctaaactgtccatgagaaatcttcccccatgatctaatcacctcccactagaccccacctccaacatttggaatcacatttcagcatgaaatttggagggaacagacatccaaaccatattattccacccctgcccccaccaaatctcgtgtctttctcacatttcaaaatacaatcatgctttctcaacagtgtcccaaagttttaactaataccagtattaattcaaaagttcaaagtccaaaatctcatctggagatgagttccttccatttatgagcctgtgagatcaaaaacaagctatttactccaagatgcagttgtggtacaggcattggttttaccttcccatttcaaaagggaaaaatcagccaaaagaaaggagtggtagaccacacaagtctgaaacccaacaggacagtcattagagttccaaaacaatcttctttgactgcatattctgcatctagggcacactgatacaaagggcgatgtcccaagaccttgggcagctccgcctctgtggctttataaggtaggtgcagcccctgtggctactcttaggttgtagttgagtgattgaggctttctaggcttaggatgcaaactgccagtggctctactgttctaggatctagaaaacaatggcccccttcccacagctccactaagcagtgccctagtggggggactttgtgggtgctccaaccctacaattccccttggcactgccctagtggagtttcactatggggsctctgcccctaggcgggcttctcttgtggcaccaagcctttctgatatttcctttgaaatctaggggaaaactgccaagcctcctccacacttgaattctgagtatctgcaaatttaataccacataggaactaccaaggcttacggcttgcaccctccagagctgtggcccaagctgttcctgggcccctttgagcagaggctggagccagagcagccaggatgcagggagcagtctcctgaagctgagcaggacagctgcaccctgggcctagcccttgaaagcattctttccgcctaggctgctgggcctgtgatgggaggggctatcccaaagatctctgaaatgccttcgaggcctttttctcattgccttatctattagcactcagctctcttttagtcatgctaatctctctagaaagtgattgcaccacagcccacttgttttccttctctaccacaggtccaggctgcacattttccagactttaccctctgctttgcttttaattataagttccaacttcaggtcattcctttgctcctgctaatagtaggctgttgaatcagccatgcctgttcttgaatgttttgctgctgagaaccgtcttgtgctagataccctaggtcattactcttaagttcaaacttccacagatccctcaggcatggacacaatacagccaagttctttgctaaggcctaacaagggtgacccttgttccagttcccagtaagtttctcatttccatctgataacttgtcagcttggacttcagtgtttatatctctatcagcattttggtcagaaccgtttaaccagtctttaagaagtttccagactttccctcatttccctgtcttcttctaagccctccaaactcttccagcctctgcctgttacccagctacaaagccgcttccactttttaaggtatctttatagcagtgccccacacctcagtaccaattttctgtgtgtgttcatttttgtgttgttataaagaaatacttgagactgggtaatttataaagaaaagagatttaatgggctcacaattctgcgggctatrcaggtagcatggcactggcatctgcctggcttctagggatgtctcagagtgcttttactcatggcagaaggtgaagcaggagcaggcacgttacatgatgagagtgagagtgagagaaggaggagttcccagactcttaaccagatctggcatgaactactgagcaagaactctcttattaccaaggggatgatgctgaaccattcatgaaggattcgcccccatgatccaattaccccactagaccccacctccaacatttgtaatcacatttcaacgtgagatttggaagggataaacatccttactatatcacagacatacatacatgtacatgtaatataaacacatacagacacacatatacatatgatatatacacaaatacaaaatttctagtacagaatttgataagactgtagtatgtgctgtgtgttagctgtgattgtcggttaaatctacatccaacattccagtaaattccccccactttattcctaaattgggacataattttattagtgcctgcaattgggatgctacattttcttgtaaaatattaaggtcttaatataagtgacattttatttcattgtatgttcttttcaaatataaagacagtacttctgagctgttatctactcatagatcaaatatagacttttatttctccaaacaatgatggagtcagaccccaaaagcatgtaattctgaggctacttttgatgtgttttggttatattttctctttgtgaagttaactgggccataagawsatcaattccatgcatgaccttggcctcattgccactacactacaattaactgagccaattaggcagaagagttctcattatattttcttataagttattcctagtaatttgatatcattatttatatttttaaaactaggaccagtaatttctttgccagttccaccagcttagctatatctcatactttactttctccctccttacagtagaagcctcctcctgcatctgtattagacaaacattgcagccctgaattgcatggcctctggccccttcgaaggcttacctgtggtattacccttcatctcctgtatcatcagtgttgtcttctccacttgatcattgtcattaagtcacttgtcttaatgtctgtcacctacttttaaaaaaaaaaatgcaaataaaacccatttgaactcatcttcactgatttatttctgcccactggatcacactcttggaaaaagttagctatgcttactgttgccacttgctcattcccactgtccgttcagctcttttctaatcagactttcttccacaccgttgcactggaatattccttacaaggtcatcagcctctatctagtgaaagaaagtgttccattctctggtctgtcactcatccttttaacatcatttgtcatggtcagccacatcacctttttaaaacctcttttcgtctctgggcttctgtggtactacctgaacatgttttgttttgttccccactcccctgccttccttgcctccctcactggctgtttcttcttaggtgccttgggctcctcttgccctatttgaacatcagtgttgggtgctccaacgctgtagcctcagcctagctcccttcttgtctactttaactttctgagagctctcattgggcttgtggctccagaatcatctgtatattgatgactctggctcagacttctccttgagttctcaatatggatagccagctgtctactagacacctatacttgttttgtttaaatctatgaaacagaaccattaactcctccctcccctttcctcctaattcttcaattctcaaaattgcctgtcttggaatatgactaccatccacccacttaagtgcttgaagacccctccycctcgcaaaaaraaacaaaaacaaaaacattctttccctttcatcctacatccagtccttaagtacgttgtctgatctccttccaaaatacctggcaaatccacttatccccttctgcctccacttctaaaacccaaatacaagcaccatcatctatactttataagcagcaacctcccaactggtctttttccttcaatcttgctctcttcaatttccttcagatagcaatttatgtgatttttctaaaatgcaggttagttaccactactctgctttaattgttttcattgcactttaaggtgagaatgccattctcctctccctagcccccatgttcttacctttggccactttttccattttgaccctctcttctttcctccagggtcactgggttttactacagtggctttgcttctggctagtaaatcttctaatcttgttttgatctctgggcctttgtatttgcttttgctgctgggaatgttctgctcgaaagtcttctcacccttgacccctggaagttcagacagaagccaaatgttagctccttaraaaggctaatgtagcccactaagagagttctattggcccttttttattgtcttcattgtacttgtctgtagttattttaattgtctactgtctacctccaggatagtataaacttattgaatgttcttgttcacactgactcctcagcatgtagaacagtccctagaagtagtaaatattcagtaaatatgtattgggaaacagactattgttacaaaactgttcgttttattatatttagattgtgtaagtttattaatagaaattaattgtccccaaaattgaattaataactatagtgttcagtcagtttataatttgtgttccacttatttaacttaagagttgccctgtttatgatttatgaactgtgtataccttctcttttggttcttcaaaacaaccttgtaagtttggccaactgatattagtgccctcccttgacccccaaagagttaagtgacttgcacaagatttcagtaggtgaaccggaacctaggtcttctacttcctataccagatagttttattggtatagtgtcctaggtgtgtgcttttgtgtgtgttagtagtttagaggaattataatagcatttaagacctttacttcccatatactctccaagatacgttttaaagctatctttagctctgtggctgttcttttcagtggtaacataaaatattggtccctgttataaccaatatgttaagatttggccaattattttttagtggtgataattatcaggtgttacaggtatgtcatatrtatgcaattaatggtagtctttatacagtgtgagttaggctcatataaccactatctccatttttttttctttttgctggtaagagcattcaaacacaagacaagacaaacctacgcatagactaatctcatccttattactgcagtccattgctgccttgctttctattgactctgtcttaaagattagagctctttggaagctttcaactgataagtcttttttttttctttttttttttcaactgagaaatctaaaatactttccgtattgcccagtatggaccctgttatagttgcaagtgagatcattttctgaaatctttgaatcktgttgaatccttcaatgaagtaaataattactttaaagctatatgttcatttctcattatttattctaatgtatttatattccctcttctactctttgcctgcctgagcagtgagattaatagttaaagcacttaaagctgagagccttaacagtaatctactgttttcctgtcttcctcctttgatgttctcttggaataggctcttgccaaaaaaacaaattgaagttaggtttaatatgagaagtcaaaaatgatgttatcctggttatctctgccttcttctctagcattctttttctttctttctttcttttttttcggaaacagagtcttgctctatcccccaggctggagttcagtggtgtgatcttggctcactgcaacctcagcctcctgggttcaagtgattctcatgcctcagcctcctgagtagctgggattacaggaacccaccaccatacccggttaatttttgtgtttctagtagaaatgagattttaccatgttgggcaggctggtcttgaactcccgacctcaggtgatctgcctgcctcggcctcccaacctcaggtgatctgcctgccttggcctcccaaagtgttgggattataggcatgagccactgtgcctggcttctctagcattcttaaacagacaaggaaaaatatcatttgtcactgctgtctgtactgttacattcccacaataatgtacatgtgtacacactttgcattaactaattgggatatatctgggtttgacaggatcaacaaggttaaagacttacttggtagggtgaaggaatggcaaaatggatgttcatccaactagctctgtcttaacctcctcatatctttctaattccatactccagacrataaatgttacatcctacagtatacctcctacagtataccttttaccttaagtgacaataggtacattcaatagcaccacctattacttctaagaaagatcatcctaagtttcctgttatatcaatcgaagtataacagagacattttagtagagaagcttttagagtttgtgatagattaacttttcactgttactcagcaaatgagagtaaaaaatcagactttcacagttgtccagggtgcaataactaaaccaaatctgtatctatatctatataactgaaccaaatatatatatatgtgtatatgtgtgtgtatatatacatatatatacgtatatacatatatacacatatacacacatatatacatatatacatacatatacatatatacatacatacatatatacatatacacgtgtatatacatatatacgtgtatatacgtatatatatacgtatgtatatatgtgtgtgtgtgtgtgtgtgtgtgtgtatgtatctttatatataaacttcccagttttgtgggggcaatatcctcaggtcagggaaatgtttaactccaatatgaaaaccatcagactgtcacaacagttctgattgctaacatctacaagatggtatargatagtacgatcagaaataagcagttctggccaggcatggtggctcacatttgtaatcccagcactttgggaggctgaggcaggtgcatcaccttaggtcaggagttcaagaccagcctgaccaacatggtgaaaccctgtcactactaaagatacaaaaattagccgggtgtggtggcatgcacctatagtcccagctactcgagaaggtgaggtaggagaatcacttgaacctgggaggcagaggttgcagtgagccgagattgtgccactgcacgccagcctgggtgacagagcaagactctgtctcaaaaaaacaagcaaaataaaaaacaaaaaacaaaactaagcagttgggaaagtgaaaattcttagtgcagtcctaactgatctacttaaagtgttcttttaaagacctgcacatgtttttcagtgatttaaattctgtacacttaaagcatgaaagtaaacattttggtagggtctagagtgatgagttgaggtattttgaataaaactatatattttcatttgtaagaagtaaaactgttcactgaaatttgtttctttttattaggtttaagtggaaaccctgcagatttagaaagaagagaagcagtgtttggaaagaattttatacctcctaaaaagccaaaaacctttcttcaattagtatgggaagcattacaagatgtcactttaattatattagaaattgcagccatagtatcattgggcctttctttttatcagcctccagaaggggataatgcacgtaagtaaatggggggaaaaaagacatgtctgatgctagttcagctaattcatttagttaatgcacaataataatagctggccagcatttattgatgtttgcwatgtgctaggcactgttctaagtaccttaaatatattatctcagataactttcacagtaaccctatgaattagattgtgttacctcccttttacaatgaggcacagaggttaaataacctatccatatatgcttactatgtgtctggcacagacctatgccatgtatatgacatggtctttgctatcacagtttttaagtttttttagaacactatactgtgaaacaatttcagtttttagtttttggtttcttttggaaaatgtcattatgaaagcaaaattctgttctcttcccaaattcattacttgtcaagttcttaaagtgttttgctatgtacaccatttggataatttccttgccattatggaaaatgtccttgccattatactataggttgaacatccctaatatgaaaatccgaaatactttgaaattcaaaatttttgagtgccgacatgatgccacaagtggaaaaattccacacataagtacttaccacaaattttgtctcatatacaagattattttttaaatattgtataaaattacttttaggctatgtgtataaggtgtatatgaaacataaattgatgtttggacttgggtcccatccccaagatatctgattttatatatatgcacatattcccaaatctgaaaaaattaaaacatttttggccccaagcatttcagaaaagggatactcaacctgtacagagtatcctaaccaatagagaaatacattatagcgtggtagatttgctttaacttgtggctacaaatgtttttttctcctgtctttccctttctcttttaaatttctttatctgccttttaaaaaatttgtttaaaattaatagttctgctggtagattctgtaactggtaggaaatctagcatgcattttggttactatatttaagtagctgtaatataaaacaaaccagtagtattttatgtatcaaaaggctgattcaccaaaatatttttgtgaaagcttcattcctataccctttcgagttgtgaagagatacttgctaactctaaaagttgggtaaggtaattatgttagtctgtttgcattgctgtataagaatacctgagactggctaacttataagaaaaggttctgcaggctgtacaggaaacgtggtgccagcatctgcttctggtgagggcctcagaaagcttatagtcatggcagaaggcgaagcaggagcaggcagaacacatggagagagagggagcaagaggtggccttgaggggccaggatttttcaaggacctgctcttgtgtgaagtagtcaccatggggagggcaccaagccattcatgagggttccacccccatgatccaaacacctccccttaggccctgctttcaacactagggatcatatttcagcatgagatttggagggggaaaagcatccaaactctatcaataattatgtaattatttataagatgtacctaggctcacgtaagactgtattctttctctttaaagaaatttggacacagcataaatcagtttttctgagattggtatagattaaggtttcttagaagcagcacgactgacatattgagcggcaaaattatttgtcacaatattcattctgcaccccacccccagtgaggcaaccaaaaacgtctccagattttgctgtgtgtcccatagggggcaaagttgcctctggttgaaaatcactatagataaggagaggcttagacaatattcttgtcactgttgagctaaattattttttaaacttttatttatttttgctaaataagtagtacctattttactgtttaaaaaaaataatgggggtgggggaagacagtccaaaggaaataatattcactggaaatcccatttcttagagattcctgctatacccttttatgtatatatcctttaagattttaaatatgtatccgtggtctatgtgtctatgagcactaatatatgtaaaggtatgatggtgcatagatacatgtgtttatctgaaaaggggagtcatatcatcttcagcaacatacagctgaatttttgtcagttttccacctgtctagctgtcactatcaaatattgggtattggttttctagaattgagttagcagattaataaaagctttttactttgaacattttagttttcttagaaaacaaaagaaaaaatactttcaagaagtggagtttattaccagcaaggtccaggacaaatctttttggaattcaaactgcttcctttgtaagatgtagtgacaggtcctttcctaaatttgttaaaggagatacaggtattaaaatccaactgagaagataatctagagctgtcggtgttctaaggcccttttaaaagagtcagagttcactagaagttcttaatgaaacatataaagatttttttgctccatggtgaaaagttatttagtatttgcattttttattttttatttttattatatatataaaataaaatatgtatattgagacagatatatatataaaatatatagagagagactatatatatattgagacagagtctcactgtgtcgcccaggctggagtgcagtggcactatctcggctcactgcaacctccatctccaaggttcaagcgattctgctgcctcagcctcctgagtagctgggactataggcatgtgccaccatgcctggctaatttttgtatttttagtagacacggggtttcaccatgttggccaggctggtctcaaacccctgacctcaggttatctgcccgcctcggcctcccaaagtgctcagattacaggcatgagccaccgtgcccagccttgcattttttaaaatcattattagtacactacatgtatctttttgtctcgttacatctcaacactgaggtgtggtaacttgcttaaaaggaatctatttgtaaatctacagtcatagaaatctaaatgatcaaaatgtcttcctaatattacttgatgtgaaaatatatgctatagcccaaaccataaataaatctatagttactggtatctgcacttaacaggagttctcaaactttttggtctcgagacctctttaaactcttcaagtattgaggactccaaagagcttttgattatgtgaattattcctataaatatttagtatattctaaataaaaatggaaaaatttttgaatattaatgtgttctcaccacaaaagtaactatatgaggtgatggatatgttaactgattgtggcaatcttttcacagcatatacatatatcaaaatattttgctgtatatcctaactatatgcagttttatcaatcatactgcagtaaagctggacaaaatatttatcagtgcatttttaaataataatctattgtatattcacatagatagcattttgatgaaaaatgttccctcaataatgaatttttaaatgaaataatgtaaagagtggtgtcatatctctttaatgcccagctttattgaagatagctcggttctcctgtctgcttctgtatttattatgtcacattatcacatgcagtgtaatctttggaaaattatgttacacattaatgaaatatgagaccaataattatgtcttcaaattatgaaaataggaatccctctcaggtttcacgacagcactttgagaactacttctctgtactgttaatgtacaaacttggtacawcacccaatgaatagctcaactaggaggttttaaaatggaatatttgccttgtggtagagagtattgactgaatttagattgtgcatgtctctcagttgaatatatttacaagagaatacctttgataatacaggtttttattattatatttgagcttggactttactgaaaacattgttaaaattctttatatatttatacatatatataactgtaagctgtagtcattttgtaactttgatcctttttcccctataacttctctaaaaatttgtaatcattgtcagtaggtaggaaaggatttatattttgtactatttcaagattattttggtcttatctgtatgatgtagagtagaactatatatgaaatgatatatgtcattaatttgcttcaagttctcttttgaaatattcagtagtttagtgatggatatccatgtcagattcagagctgaaaattgtataattgtccgtaattctttcccctccttaacctctgttgtgttggtctttaaacttttttggttatttactctatcaggaaaaaaatgagcacatacctccaaatgatgcatttattaattatatttataactatataatttgtatattttcagcatatagaaaaaatagaaattgaaagtaaaagataaagctgggcacagtggctcatgcctgtaatcccagcactttgggaggctgaggtgggaggattgcttgaggccaggagttcraggccaatctgggcaatgtggcgagatcccatctctacagaaaattttaaaatgagctgggcgtggtggcatgcgccttgtggtctaagctacttgggaggctgaggtaggaagattgcttgagcatgcagtgagccacattggcaccactgcactccagcctgagcaacaaagtgagactctgtctcaaaaaaaaaaaaaaattaaaatttaatgtttgctttcttcttgtagccataaaacattattgttaacctgatttaggtctaagtttaatttcagaagttggctttaatgtctcgcagctaaaagaaacacaacattatataaatccaagtgggaaaagtgtagttactaaatcatactcattttcatgatacctacccaccagttatgcaaaggtatttgttaaaatatgactggtaaattccattgtctgatgtcaatctgttgtttttatatgctgttataaagtattgcattttttgtgtaataaatgacatcaaaacccagtaaaatgcttcacttggataatatgttagctgtgtttccaagttggtgaaagtggtcagcatggtgttctatcatctgattctgagtccagagttgctctaattcagagttaatctcctgtcttctggctagagggaggaatggagcggggagagtcattcttacagccttgactgttaaacagaatgtaaatcataaaatcactttaactggttattrtacacaatgacacatggtgatttcttgagcttgaaaataattaaaatagaaattctggtatttgtgttggagggggttctgttggattatcctgcttgtacctcacagttgaatcctgctggtggttctcaggatattttttgtaactgttcacgtcaagtcttccatttcatccccaattgattttacttcattccctgtcttccctcccagattgctttttagtcagcaccctcacacctcagattttttcttcagtctgtactcaccatgctagaacacgctttagtcatttctagtgtcatttatttactcattcttttcttctgaataatcctcctgctttgtctgtttgagagaaccaatggctttcagacatttcaattcaatttaaaaagaaataacttcacatagcaacccagaagcctgtattccttcatgcgaatttataagtaatcagcgtttcaggaaataatacttatccttactacatacatatcctttctattttgttttgttccatttttcagaatgctggtcatgagccactgaattgattttggactcacaactagattacagcccgaagtcaaaaagcactgttctgttattcttcaccattattgactatagagttttggctcattctctccsccctccccacctcccaccccacatccttttstgatctctattctgccatttgtactgattttaatctctccctggattttttttttcttagatggctggttctctaccaatatttggtagctcaaatgtcatgcatacctcaatggggccttctctgctcactgaacctcagttatccctcttttttcatttaatagcacatcactatgtttttcttcatggcacttgtcgatatgtgaaattaattatttgtgtattattatctgaattcttyatataccgtccccagtctgagtatggattccatgaggagagagagcttgtgtgtcttactcactactgtatttctagcccctaaaatagtgtctggcacctagcctgtgctcaaatggttggaataacaagtagcagtttgcttaacttttcatgttataaaagccaagttttaatcacatttcagtaaaaatgacatagtaaataagcatgattcatgggtttcacgtaatactaacttctcatgtatatcttgtctatcatatgtaataattaatatggttagctcttggttgagtgcgaagaaagccttagccactgctgtacctactttaccagtatcctcacatttaatcctcacaataactctggaatagctggtggtatcataatttgacgatgaagaaaccaagtctcaaaaattaagtaacttgccttaggactgatatttcatctccttcagtgtccttactcttaactagtaccctacctagactgcctccctctactgagattaagaattacagaagcagggaacttgaaagtgacatagagttcttatggaatactttgaatttaataaagtatttattgctataagtaaaattgataaacataattaacacaaaaatatgatttagacgtactatatgtatgttgtcatcaattcagaatctttttgataagcattttctttctttccaaatagtttgtggagaagtttctgttggggaggaagaaggtgaaggtgaaactggktggattgaaggagctgcaatcctcttgtctgtagtgtgtgtggtgttagtaacagctttcaatgactggagtaaggaraaacagtttagaggtttgcagagccgaattgaacaagaacagaagttcactgtcatcaggggtggtcaggtcattcagatacctgtagctgacattactgttggagatattgctcaagtgaaatatggtaagtaagtaaaaagagcagtacatctgacactaaacataaaattactgtaatcttgtttataagtttagtatatcatgctttttattttaggtgatcttcttccagctgacggcatacttattcaaggcaacgatcttaaaattgatgaaagctcattgactggtgaatcagatcatgttaaaaagtctttagataaggatcccttacttctatcaggtaaaaatttcatttatatctttgaacactttcctctttcgcaactatgtaccattgtcagcaaacaccattttcctaagagtcaataatataaagaggaatctgtattttatgctaccttctactgttgtaatccttgcagactttttttggtaagctgacaaaaacattagaaaactttgaatgcagagctatattttacaaatgagggaccagagtccaaaaaatcaagagatttgagattcagcattcatgctagtgtaatgataaaactgaaatataggcctaatgatatctcttgagttggtctgttattctgtatcatgactatttttaatgcctattgaagtataaaattaaagaatgaatatatgtttaaagcaaattaatgaattctctgtgatgctctacaaaggacaggttgttttttcttaagaactggtaaaatccttaaagtttacctaatccaactcctttaactgctgaagaatgagtttgagatataaactatttagtattatatgattaaccaagagtaggtctagcagtcacacctccatctagtcagaattgaatttgcaaatggttaagatatgttctgggattggagaagggaaggataggtgaggatactgtttgaaatggagggtgacagcttgggaggctcttgtagtaacctcattgtgatagcttgaactaagttgaactaagtaaatatgaaatggaaggggtggtgggaaaaattacaagttcgcttccaaaacactgaatgagagaaagctatagtatcacaaattgacccccaagtcatattaattattctaacttttaggttctggggttcctattcttattttcccagtattctatatggaatttatgaaattgtctatcagaactgtacttgtcagattgaatttatactagagttttgggaaagccaaatgtagccttctacatgtagtcttctgtcattgtcaggtgttgatagattgccaacattttatacattgtcagatgattgctgctgaaaccagagtcaaacctgtgatatccacaagggtcagttaagttagaatcacaactttagagcaaaacctaagtttaaccataactttttaagatttataaatgcatgccaaaagaagcttattgcaaagaaccagacacatttatattggccagaaaatcctattgcaaaaaaatcagagtaattacatttataaacaccattataaataggataaaagttccaattctaatatagacttaacgtttcatcaaaaaaaaaaaaaatcttgagatgtgtataccttcagtatcctgtgccacttagaacattaggagatatacgtaatgctaaatgacgagttaatgggtgcagcacaccaacatggcacatgtatacatatgtaacaaacctacacattgtgcacatgtaccctaaaacttaaaatataataataataaaatttaaaaaaaagaaaaaagaacattcacaccctgtttggatttttctttgtattggtgtggttgtcatttataccaaatagccagaaagagcttggatatataaatataatgtatttaagtataatgtgttaactcattctacttaccttgccatgcttctaaggaactgtagttaatgttaaccaaataaaatctataacctttccaaaggagagggaagctatctaatcataccttaccatcacagattaaccagaccacaatgtgtaacaaactaagatagtctcctgtttgctatgtatactgcatggacttttatgtacatctcacttatttacatagtgcttagctcttcaggttgatttcctttaactgaactttggtcctttctgttttaacagagatgactggtaagctttatgtagactcaggttcctaacacaccaagtataccaggagaactctataaattttccacatttaagaaaagactgaaataactttgtagagtcccttatcgcagtatgggtgggaaagtttttctgcatttatttccctattccaaaaatgtactaaaaaacatgacatgcatttatttttaaatttactctcatgatgccatctctgactgctgttcttggcttcttaagtttagatttttaaaagcagtattcagttagtggtggggatatgaccaagacttaaaactgtttactttgcctgagcacattcactgccaacatctgattacctgtggtaaggcaaaatagaacstaaacaattggagtctggagaaaaccagaattgttaaaagaaataaattatctactttttcactatcttgaattatatttcttgttttccctgcactttcactggcaaagaagctaataactagtgaaataatcaatatggatttttaaaagcaaggaagcaaaggcctaaaaaacaatattggataagttactcagtaattaatagccaaatatggattcttaaatacttgagtaagtacatatattttatgagcgtacttagcaaataatccttgagcatcaacttggttcataagattatggtagatgctatgttcactgtgctccagaagattgtaaacaaggaaataaaatacaaatcaatgataacgtgtaaaaaaaaaaaagttgctttaaagcctgcttaaaactaacaaaaagattagacggattagaagccttttagtgaataagaaaagatatagagatgtggatgtacaagtcggagaaccgtaagcagacttatcagcattataactgaagaagaatatactctttatcctctgacagagctggactgaatctttgccttgacatttaatagttgtataaccttcaggccgagcacggtgactcgcacctgtaattccagcactttgggggctaagacgggagacaattatggagaccagcctgggcaacayatactctgtctctacaaaaaaaaaaaaaaagttgtataaccttgggcaagtttctagaaaatgagaatagtaatgcctgccaacttscaaaattgttttgcgggacatagaatttaatccatgttcccatctctgattcctagttttctgtaatgaaattttatgttagagtagtggatgagtaagtttgtaagattgggtcggtctcaaggtgaggactttggactcaatccagtaggcaacgaagaatcagaaatttttgagccatgagaagtatatgatgaaatcacaattttaggaagattaaaatggatttcaggatgaactgggaagacacagagactaggtagggggctattgcagttacaaaggcgtgctggaatgaaagcttgtgttaggtagaggttatgaggttgggtgtgggaaatgtgacattggttgtcattgatacatacgttgtttctttataagcagtgtttttctcagagaagtgtccctcataccttaggttacaattaatgagcattcattgaacccctacaaattctaggcagtatgctaagcactttacatttataggtttatatgagaaatgtaaatctcatatttctatgaagtgtacagacagggaactgagttgttaaaatttacctaatattacatggtaagtgagtagtagattgagctttgaacttggatatgactgattagagttaaaaccttaagcacaagaaataagttttatttaatgtcttrctaaatgtattttattgaycaagacatggtggctcacatctgtaatcccagcactttgggtggccaagacaggaggattgcttgagcccaggagtttgagaccagcctgagcaatatagtgagaccctgtctctacaaaatttttttaaaaaaattagcagagtgtagtggcgtgtatctgtggtcccagctactcgggagggttacttcagcccaggagatccaggctgtagtaagccatgttcacaccattgcactccagcctgggtgacagaccaagaccctgacttaaaaatatatatatatatttatatatatatttatatatttatatttatatatattttttcctaaatgttgaggctgttaaaaacaatattactgaagtttgaaatttggtggtagcaaggagatctatcagtatttttaaaaacaaactatgtttttggttataggtactcatgtaatggaaggctctggaagaatggtagttacagctgtaggtgtaaattctcaaactggaattatctttaccttacttggagctggaggtgaagaggaagagaagaaagatgagaagaaaaaggaaaagaaaagtaagaataacaattttctataattggtatttggaaatagggcaaataatttgtaagaactagtaccttctttcaagagattctggtatgaaaaattctacaaaaagttaaaagaagatttttctattagacttaatagcatgggcctttagagaatacatcagtcccctttaccatggccagagaaattcagcatctacttgaatacttccattggcattcttgcatttattctctaggtgtagaatctcccatcatctgatcagcaaaatgaattgaactctcacggcggattttttctgctactttagcagtggctttctttatcagccatattatattttggtttcactgagctttcttttaatcttcttcacatttctattctactatacttaatgtgcttggtttttgaacacaagactaggacttcaytttgacaccttacatttctcttgttatattcagcccatcattagatatcaaaatctttttaaaatgttgatccattgtatctactgtccctccaagtgttctgttatcagaaaacttgataatcatacataccatttatctgcaaggatcttacaagaaactgttatacacaagagacatctcagaatctcctagttaggggcatgccacttttaaaaagccctccccaccctgcttctaagtgtctgctataccacccttccttcacactcaggattacccctctggagtcttttccctttaggttgacaacattttacggtggtttagccacttagatttatttgatgttatttaggatagtaaacccatattgttgtttctcacatgaatattttgaaacattctaaaataactgcctggctaaaatcctggtttgctataactacagcagtgtttttaatatttgagtggtttgttttgttctttgagttttgctgttagctataaaatctctatttcgaaacaaaaatgtatgtgaaaaattctggacgcagatccaggtggcaagccccccattctaggttttttttctatgtcctccttgaagcagttctcaatgtgcttccatacgtttcttaaggctgagtagaacgcagtttgaaaaccagcacagtaatgattccatttattgaatgttttacatgcactatctcattaatcctcacaactgtacaaagtaaagacttattatttttttactgataagtaaactgaggcttacggagattatataatttgctctagatcaaagtgctagtaagtgacaggtcacaccctcttctctggctcaagagtctacccttttatgctgtgctccatcctaatccacaagagttgaaagtcattgaacgctgaagggaagtttgcatcctcactgtattccacagtgtcttttccagtaagcttcttttccccctgagtcttatacactggttttattaatctagtctagaacattccccagaaattaacatctaatttgttgactccctttttttgttgttgwtgttttttttttaaagaacagggcaacattttttcttctgtgggcctccagcccttctcccattcccttgactgccttagcgattactcagaagcagtccggggtaatgtgtctcagttccctcagtggcctggactgtggccgtctggtctctccaaacttgagctcattaaaagtagctaggtattatcttactatctcctcatcaatcttgagcttctattccttcttgaccatgtttgttccatgttttccgtttgaagatagttctcctcgataaagaagctagaagaatataggatgaatggttctcctgctctttggcatttttaatattgtagtgcctactccagacaataggcctgtcccttcattactttattgcttcagatatgctcatccttctgtgttttccaaatataagctgatttggagagctgccttacctggtagtcttactggcttattctatacattcgtattctagttttactaagttacctctcctatcttttgtacatattttgtcctcactctcatcaacactctcctgtgtgccagttgtctttttttttttttttttttttgagacggagtctcactctatcccccaggctggagtgcaatggcgtgatcttggctcactgcaacctccgccttccgggttcaagcaactctcccgcctcaacctcctgactagctgggactacaggtgcatgccaccacacccggctaattttttatttttagtagagacagggtttcaccatgttggccaggctggtcttgaactcccgacctcagatgatccacccaccttggcctcccaaartgctgggattacaggcatgagccaccacacccgactgcccgttgtcgttttataacatcccttcctcctccctctctacccctgctcttcctcctccctctccacctctgcccttttctgctttcttggggttatatttgtatttagttttaaaactttttgtatcatatttaggtttattacagcttataaaataatgaagtcctatggaaaaataaaacaaatatagacaccctaaattattttgcggtattctcccgtaggtaagacttagggagtgattgacccagcaggtcatcacaagtcaaatgttttctaatctgtagacacacacaccattgtgtaacaactgttatagaaatgtgaactacttctgcataatttagcatggctgtattcatttcttttggaaagctttaattcccattttgttcctacagataagaaacaagatggagctattgagaatcgcaacaaaggtaaatttaggaggacaaaagtacagtgagcttgttttcattatatccaaaaatctactgtataccatatttattcaaaagtaagatacatgtggcagggaaaatcaacaatatacgttagcttgggttaacctttcttcctgccggtgtcttagtcatgtcgtcactgcaatgttaataagattttaagtatgatttgtggtacaggttgagtatcccttatccgaaatgctkgggaccagaagtgtttcagatttcagattttttttttttttttttttggattttggaatatttgcatgtacataatgagatatcttggggaagagacccaactccaaacacgaaatttatttatacattgccatatacaccttctacacattgcctgatggtaattttgtacaatatttttaataattttgtgcatgaaacagttttgactattccgcatcacaggagatcaggtgtggaattttccacttgtgtcatgtcagtgctcaaaaagtttcagattttgaggtattttagattttcggattagggtaaatttatgtagattgactcaacttaagtatttcaagtatttgaacgctggttattatatagttagtagcaaaaatgcataagaaacaaaatatatagcataaatgttactgcatttatttaagagtcatatatgcatatttctatatgcatatggttatacataatctctacattatggtcataaattataggggagggattatgttgtttagatrttacctaacataacacacaggaaaagaaatttagtattctttagttctcagtttaaggaccctgtatgcctcatcctcattacctagcacaacattttcaaatatggtacaaagtttcacaacctaacgtcactattgtcttattttctctgtgtagacacacacacacactcacaaagctgaatgcttatacctttactggtttctgtaagaaactgatttttaaaatttctttaaaatgttaatagtgatatgtgcctttaaagtatagtgaagttctatttgctcttaaatgtagcaaaagcmcaggatggtgcagccatggaaatgcagccattgaagagtgaagaaggtggagatggtgatgaaaaagataaaaagaaagcaaatttgccaaaaaaggaaaaatctgttttacaagggaaacttacaaaactggctgttcagattggcaaagcaggtatgatatagagaagaaaataaagtgttttatttttaagtatgctttctgcttaaaaattgtcttttgacacacttaaggctggaaattgttgctttgtgaatagaaggggagtttgaaatattttcagttctagctacaatgcaccaggccctttgagttactataggtacttataatttgctaataagtggtcgggttaggattagtgcctaagtctgtccagttacaagcctgtgcactcatctctgaatttctgcattaagtggagaaaaggcaacctgtgaggttatttagtaaagatgaactaattatattttaataaaatttcatcacacattttgctcatctttttactggttatgggaatttttagttatgtctctaatgttaaagttctgcactgaatggagtcgttgtagtgcggctgaagtttctatattactgccatcacwagaaaatacctgttaatacagccattctttaagggaaaaagcagagctctgaggttagaaacagcatgacctccagcggtagcatctttttggaagaacactgtgtggataaataagcatatattattaaaattgcttaaattgcatcattttactgctctctaggagtatgatggaaaaagtgacgtttttgcttctgtcctcagtacacttattatctaatagcaaatatttgctctttgtaatatgtagccaagtggtaatgctgactcatgtagtgttgggggaaaaggtggatttgaggtggtaaatccacttagtagacattagattgggatgttagaaccagatatgtggacttacacctttttttttctttttttcttttcttttcttttttttttttttttttgagacagggtctcactctgtcagccaggctggaatacagtggcatgatcacagctcactgaaccctccacatcccaaggctcaggttatcctcctgcctccacccccgaagtagctgggactacagatgcacaccactacacccggctgatttttgtatttttagtagagacggggtttcaccgtgttggccaggctggtctcaaatgcctaggctcaagtgatcctcccaccttagcttcccaaagtgctgggattacaggcgtgagccactgcgcccagctgcctctatttttgggggcggggggtgttgagggtgggagacagagtcttgctctgtcacccaggctggagtgcagtggtgcgatctcggctcactgcaacctctgcctcctgggttcaggcgattctcctgcctcagcctgagtagctggtattacaggcacgcaccaccatgcccagctaatttttgtatttttggtagagatggggtttcaccatgttyggctggtctcgaattcctgacctcaggtgatccacccacctcgacttcccaaagtgctggggattacaggcgtgagccactgcgccaagccagctgccctattttttaatacatatgtcaaagagcagagtatcccacaagatacatggttaactcttggtttactaagttaatgaaacagtaaggatagagcaaaaaaattgaagaaataatactttgtgttatataattttatttattataatgttatttttttaaaacatgggttgagtatttaattcgaggtctccccattgatgagatttttaccagtttctctttaagcatcagggagcttgcctcttgaacatataaagcaccagtttattctaagctttggatacttccttatcattgcgtattattttgtcttagtttcagtacaaggccaaagatataattaagtctaagaaagaatcctaagtgtttttctcccagttctcctggggacaagactgtacttggaagcaaaaaattaaatctgacaatgtcaagttataaggtgcaagaaagaagtaatttctcagagaaattcaatactatcaagcaagttataactctttacagtgtttaatttatatctgkcaagggttagtgtctggaaatttaataatcacatttttctttcatttctattctgaaaggtctgttgatgtctgccatcacagttatcattctagtattatattttgtcattgacaccttctgggttcagaaaagaccatggcttgctgagtgcacaccaatttatatacaatactttgtgaagttcttcattattggagttacagttttagtggtcgcagtgccagaaggtcttccacttgcagtcacgatctcactggcttattcagtcaaagtaagtagaaaatagttcagtagacgttgttatgtttaaagccttagctggtatagaaaatgcccatctagttactccttttctgcttctgaaagtgaggactttcatataaatgtacactattttctctagaaatgttgtcattgatgccctgtacctcccaccagttgaatatctctgaaggagacctgtgcattccacatagggcagccttgacacaatamtaagcacgactctgctgggcaaagttctagcataattttctctacgtgatagttatattgtcaagtcatgtcacctcctctttcccgtctgtaaaattaaggtgagcgtgttaggctaatgtttctaaaaattaaaaaaaaagttaaaaattatgatttccatgtgtaaaacctttcagtcagttctcatgacaattagagtaaaatgcaaactccttaccatggcctgcagggccctgccagtctggcctttgcttacctctcagtgctcaattcccttctcctttggcccagtctcaccagccttcctgatgattttcaaacatctcaactgtattcttacttcagagcccacttgttccttcctttgagtaacctgctctctttctttattcaggtctcttcaaatgtcaccttcctctgaccacttgatttacagtagctcagtccttcttgttttccaagtagaatgctaagaaatgagctttgatggctttgcttactgctgtttaccttaaagtaataatccttttgaagattattaatttatttttatcaattttctatcttacggaaaaggtggattggaaataaaaaaaaaaaagatgtagcttggacaattttgaactttttttttttcaaaatgatcttgcaggtaaaaaattataaccaaacaaagaatgctgcttttgtaaattttcaaatgttaattactagttctctttaagaaacactgctgacagtgagcaatattaattaattagtcatcgtttctacctttgcactcttcattattagacctgtcttgataagaattttttttgcttactgtttgagtttattttcttttcaggcatttaacaactttcatttcaaaaataaagtggtaaatgtatcaaagtgataagatacagtataatcatctatctgtcctttkttgatattttaaagtaatttgaaatatttggggtaaatacaagttttggacacatagaacagtcattttaccgaactgccattagttcattttgagtagtcattaatgatactaatttttcaattgattagaaagatactggtaggattgacttatgctttttgaatagaaaattaataagaacaagttaactacttttttaagcctttattagatgtttatctagctctgttaccaattactgttcttttcacagaggtatagtctttatggattctctgttagtgtttcacaaaactgaacatggtttctttactgcagaacttcatttttctaatctttaatatgtaaatcacaagtaatttaggaaatacacatccgtttttcacatattttttcaaggaaccagtttttttgcagtatcttgcaaattagtcatcacaaaaaacactttgtaaaataactccatatagtttttaacccattccacattaagtgctgagaactaattataaggtattttaacttaaatgccctgtgagactactgtgaaaactgttggttttttagaaatgattttttctgttgtaaatgagagaaagaagtgagatgcagtttgatgctaaggatgaaaatgccaagtctgccagcatatagaatagctaaaaaatgactcattctagttttgatatgttaactctatcagagttaataataaaaaaaaatcaagcaactacatacccacaagctctttattttagctgctaaaggctattttttccttggcactgatgtaagaatcttttgttttccacttaataaggaggcttaatcctttaatatactcttacactactataagtaccactgtacttaacagtacagattgtcattgctcttgcaatgtgaggacattttgcaaaaaccgttggagacatatattcagtattatttgtgtacggatgtaggtacctgaattgattcactaggttatgttatgcagcaataaaatgattgaaaccccagaaagctctggtactgtgtttagcttattttaataggtcaaatatgctaaaaaaaaaaaaatttcagtattacattggtactttatacattgtatttatagaaagctgggagttttctaattttaaaacaatttataatcattttaatgtaatgaggtgattggttttatatgcagcttaactagtttttttttttttggtcactgtagaaaatgatgaaagataataacttagtaaggcatctggatgcttgtgaaaccatgggaaatgctacagctatttgttcagataaaacaggaactttgacaatgaacagaatgacagtcgttcaagcttacataaatgaaaaacattataaaaaggttcctgaaccagaagctattccaccaaatattttgtcctatcttgtaacaggaatttctgtgaattgtgcttatacatcaaaaatattggtaaggtttttgaaataatttatgaaaattaatttttaaatctataatgatcagaytatatgtaagtcttcagaccacyattactgtatgtaaactgaactgttaagtttttaaaaggcatatatttatttatataatggtttttaaatttgtgttatgagtgaggtctgctgatcaacataaacattgtttgcttacatttttctcctatattttgaatttcctgtgttcagaaactctccagccttataaccagagcatgtatttaattttaaattcttgttaagctcatttttgagaaagatcaaactgtcttactataggaggtcagctctcaacttacagaaaatttttaagccgatttcaacttaaaataacatgttttatatatggttgccatgtgttctgtttggtttctcagtagttcctacctaaaaggtggtccttagacctttttagaactaatgcagtaaagtaattctagacttgtgccaccatataataaaaaattttcaacttacaagttttaaaaatcttatttataacagaaagaatgcgatgttatgtttgacttaatctcttctagtgatttatggatgaaaatcattaacaaaaataatattgcaagctgttcattagggaaaacatacatgaattggatgattacattggaaagttatgggatcttggttctagatctagctttgccttttactagctgaaagtctgagctaccttctttaattactgagtaaagatgatcacatctgcccttaataccattgtgataattatgtaaagtggtatttctgaaggcactatgaaggaattgaagcttctcactgcatttaagagaacagtattttaatgaatgtacttttaagccataaaaattggtagatttaattttgaatgatttagtataaaagttaagtgaaaacaggaaaaggaaattaaaattaagttccactctgtattaggaaccaactataaacttcatacatcttatatcacttaattttggggtcataagtgctcctattttacagatgctgaagccaaggaccaaagcagttgggtaattgtcaaatttcacgtagctagtaactggcaggactgagattagaatccatgtcattctcaccccaggctcctttctaccttacttttctatatccttctttaaaatgttgatattagacaattgctttgtaattttattttagaatatcgcagtctgttttacattataaattaaacgttcttagagaaacgagatactagctactaaatgtttttctcttatagccaccagagaaagagggtggattacctcgtcacgttggtaataaaactgaatgtgccttgttgggacttcttttggatttaaaacgggattatcaggatgttagaaatgaaataccagaagaagcactgtacaaagtctacaccttcaattctgttaggaagtccatgagtactgtcctgaaaaattcagatggaagttatcgaatattcagcaagggtgcatctgagataattctgaaaaagtaagagtaaaatgcttggatgaataaattgctgactatagttgctttatggagtatctactgtgttgttattgttgttgtctttttgtgaacatcaggcatttgataggacctcagagttttttagcatattttatggtatccagatatttgcccctgctattctgccattttcacactctagcttctcttatttcttagcattttgttatagggaaaataagctcattacattcaatctggtatgtttaatgaagtatactttgatgtttatttttagaagtcgatttacttgttatttaatatgcagaatcttgaaaagcctcctgggaagaaaatcaagtttatgtctttctttctttcttttttttttttttttttatttgtttaaggtggagtttccctgtatcacccaggctggagtgcagtggcgcgatctcagctcacttcaccctccgcccctgggttcaagggattctcctgcctcagcctcccaagtaactgggattacaggcacctgccaccacgcctggctaatttttgtatttttagtagagtcagggtttcaccatgttggccaggctggtcttgaactcctgacctcaagtaatctgcctgtgtcggcctcccaaagtgctgggattacagacgtgagtcactgcacctggcctcaagtttagatcttcarcgctcattgtggttactggactctgaatgtgataagagaattatgaagtaatttttagaatagcaaagcataaaagctggatcttggaaattccccatttatatcaaaatgagatttatcatgtttatgctgctgcagtgtcgtatttaaatatctcctgtcattttgaatactaatttttcttactgtccttttacagatcagtagctttaattttgttattacatgttcacatataatttccctgatgtttatttgttattaaaggtggtgaaattattttagtttctttaatttcattaaagaagtagagaactggttaaaaaaaaatactggttaagagcaagttgggaaaattggaactcatttgaaattataatatttaaaatattaaagtaaatgtttaagatatacttttaatttgcttacatgtggattataagccagtattaatgaacactttacaattagtttaagagacaaatatataaataaataactgaaggcagcatataataaattggtacaaagtttttgggtgagagatcacactgtagggatgtggcatttaagatagattttggtatgaaatgagaacttcgaggtggggaaaccacagcagaggaaaggagatgagaatatgcaggtcatactggggaggggaatatctggttgtatagttcagctgaatagtgatgggcttttgtggcacacaggccatatacagctttcttcttgccacagtacactcagttacctgatttcattgaaaaggttagaaatctgtttcaaccctggcttgctgggtagtagatagatggtttaggagagaattttttttagtcaaaactgatcaggcattgactctttctctgcaactaactagcttctggatatggggcagatttttcccttacttccatttttctcatctgagaaagcrggtgatgaccaccaactctgtggcacttaaatgaagtaatgcataccaactgtctagtgtgaagcctggtggacagtaaacatacagcaagtgttcccacagtaatatttgcattttgttgtggagactttttaaatgttgggctgagcagttaaaattgaagtaagccagataatgcaaatgaggtatttttttcttcaagtagtagaatcatcaaagctgtgattaaagataattcttgcatcagggaacaaggtgggttagagggaaaaaaaaaatcaactagagacatatcagttaaaaggctattgctattacaatagctgtagctttgtagcttgaagtaagaaccagaagaaagtagtagcaggagaaataaaaaggagtggacacattgaggaggctgttcagaggagaaatgtataggacttaggagctaatagtagagagatgatcaggaaaaataagtattaaggtgaaattttagacttacatcaaaatgattagggtaatgttgatgcacattacatgggcagtgaagaggcagcttccagtctttcatccattaaggtttaggtactgataaaacatctgggtagaatttttcagcagtgatggaaagctttgaaaaacaaaacagaagatgtggatttgggaattacctccctagaagcaggaagagatggcatcatcaagggagaggagtatagagaggcattatgaaaaacaaactttaaataggtatatagtatgatttttattcattatgtaatgaaagaaaaggtagtagtgtcactgaaaataacttttggcattaactctcattctgatagaatgcttattttaacaataagttattttttttctttcatggttaaaacaatataggtgatgaaacaacatctcaggtaaggggttgactacgcttggctttttaccttaaaagaagaaaacatttgtgattttggtattatttcaaactaatgtctgattctgtaccaaaatggtgaagtatatagtttattctcctttgccacccagggattctttatgaaagtttgaaagcactgcatttccaaaagacaaggtttagagaagttctagagtaattgataaatggagaactgtcaaatgagaaccatacatattagttctgttttgtaaaagggagggtgaaaagtgaatttaagtctataaaaatgaattatatgtaattctctaaattccagatatcagatcccatgatttctaggcctgccagttcacttaaatggcattaaccattatttttttaaattattgatgtttggattcaacatttccttttaggtgtttcaaaatcttgagtgctaatggtgaggcaaaagtattcagaccaagggaccgtgatgatattgtaaaaactgtgattgaaccgatggcatcagaaggcttgagaaccatatgtcttgcattcagagattttccagcaggagaaccagaaccagagtgggataatgaaaatgatattgtcaccggccttacatgcattgctgttgtggggattgaagaycctgtgagacctgaggtggtgaaacattctgtgttctgcatgtgcagaatctcataactatagaggacctaggccttaattgtaaccagttttctagtaaaattcttggtgtttgtgattttttttttttctgtgtgaacccaagataaatgaaataatagtacctacagtgcatatgctagcttttatggtttttaaagacagtgtctctttgggatcctatgtgttcatagcaccataacctagcacagtgccttgaagtgggtagaattttcagttattatttatcttaaattaaataataggtgccattatttgttttcacagtctctagactagcattgtctagtagagctttctgtgataataggaatgttctgtatattgkttagtacagtagccactagccatgtgtgaatactgacttctagttttcagtggctagtgcaactaaaagacaggatttttaaattttatttaattcaaattaaaatatcttgctagtagttgtcatattggatggcatgcagctctagactgatttccctctttaatttttttttgctatttggtttttcaccttttttaagtttgttgaacaactactgtgtgccaggcactatcctaaggtactagagacttaagagttttgagatctgatcaccggcctcaaagaagttactgtcttatgtgggacgaaccaaacacgtgattattgcaacccaagatattactaccttgctgggtatatacagagcatgttatatgagcagagaacacgagttcccaacctagcctaatagcatctttttattgagttctcactgtgtgccatatacttaagccatgtgttttacaagtaattttttaaatgtctacctttatgaggtatgcatattattactcttatttggcagatttttaagaatcaaaaatgtatagagcgttagacatgtttaaaaatacatttttaaaaaatcgagaatgtatagagcatagacctagtgtgttaaaataccagctttgtctaaaacacatgtgcttaaaagactactgtactgtattgaccactggaggggtcaggtaagacttcctagaggttaattacctgatctgattcttaaagaaggaggaagtattatctaaaccaagaaagagagcgagcagttaggtatattctgagcaaagaagcaacataaataaaagcactaacagaaaaccacttttgttcagtgactttatcagctaattgattcaaaacctaatgtgtagcactcttttaggagctggaaatactgcagtgaccagaataggcttgagatttatattctagaggaagaagacagctaagtaggtagaatgatagatacatggacaccatgtcaagtgaaaaatgaattctgggaggaataagacttggtccctgttctcataggccttaagatattctgggtggcagggtggcatatcaggggggatgatattaaataagacaattacaagtgcagaagggctatataagatatgcacggtgtaatgaaataaagtaatggagagagactgcattaagaatttctgaggatgtggcatttgagttgcaatctgatggttcatagtgggtctgccatgtaaayagctgcaagaagagcattccaagcaaaacgagaaatgcaagtgaaagtgagaaaagtagctattttaaaggtggaaaagaggccagtgtggctataaatgtaaagaagaaaggggagacgagatgatctctggccttactgggctgtgaggactctgaattttctgaaattcaggctgggaagtgacatgatttatgttgttaaaatactattttgggtacgtgtaagacagggattagagatgaagaagagtagaagcagggaagctaatgagattattgcagtgatcccaggcaagagatgatcatggcttggcccacagttgtggcataggagatggaaagaaargaatgatttcaaagtaagtggagatagaaccagtaggaagtaatatgttgggtttggatacgctgtttttgacattgttgaggtgtctgagacatccaaatgtatgtcaagcatttggacctcagagcctgaaagtgggctagtctgaagaaatcactgatgaaactaaagatatttagagaaagtgtgtagctagggaagaaggcttttatgactaagaggttgccacaattagaagtcttataaaggagatggtcgctaaccatctctgtacaagttagagaaccagtctgtaacttggtggctgatagagggttaccaatgtaataagagaaccagaaacagcagcctgttgagagattaagataaatttggtttggggttttgtaatttcaaatgcttataaaatagccaggtgggtaatgtttgccatgtggtcacaggagaatcattcaaaggttgtttttttattttgtcttgtttttgttttctttaaggaaggagtcttcctatgttgcccaggctggagtacagtggcttttcacaggcaggagatcatggtgcactgcagcctcaaactcctggcctcaagcagcctcccacctcagcctcctgaatagctgtaattacaggcatgcaccactgtgcctggcttttcaaagttctatacattgacttacggtttaaactttaacatgaaatcagggtatctgcaactttcattctttggaagacatcagtctattatcatgctcttggcattgcagttgatggagagttttatcttttttaaagcatgtaaatggcacttgtttttcagtatcacaaaatgagatgggtatttatatactaaattgagacgatgtaatatgaaacagttttctctgagtttattttgtacagtgcaattctggtggagggattcttgaataattagatgtctagaacaaatccagtttttattacatatgtataagtacttggccttgctttagtttcttatatgtaaaagtagagatagtttgtaagttttaagctgaaagcatctggtgactagtaggcagttaataaatgttagtgtgcctttcttatgtattatttgccacatagttttaacctgagaccaatttctcccttttactcattgtttccctgtccagatgatcctgggatactacctaatcaaggactgcttagatacaaaaatttaagatagattttatctcaaatgagataacaggagatatatacatttataaaacagacaagtgtttttagtgtcaaatattgatttttttgaaaaaataatctaagcaggccctgtccttttgctcatcactctggcactaggacctaagcacagtgcctggcattcagtaaatattagtttgagtaaatgcacgtgatgtccccctccaatgatttgaatcactaagagttgactgggtagagggaaataacttttatgatgtaaatcttaaaacttatagataaatatgtatttaaattgcaattaattacattgcatacatgttttaaaacatggtaccctgggccgggcatggtggctcacacctataatcccattactttgggaggctgaggcagacggatcgcctgagctcaggagttcaagaccagtctgggcaacatggtgaaaccccatctctaccaaaaatacaaaaaattagctgtgcatggtggcgtgtacctgtgatcccagctactcaggaggctgaggtgggaggatcacttgagcctgggaggcagaggttgcagtgaatcaacattatacccctgcactttatcctgggtgatggagtgagacccatcttaaaaaaaaaagtaccttgtctggaatgtgcaccccttaaaaaatgtaccttgctattatcccaaagatatttaattcagcagttcagtaaatacttagctccagttacatgcctggtgcttatttgttaaatgaacaaaaggtatactaggtgttggtgatgcaaagataaggtaaaggtcctaccttcaagaagctcattgaagattcaggtaaacaataactatagtatgacttaatgatctgtaatagaggtatgtataagatgaaggtgcagttttgtctaggtagaccaagaaagctccagataagttagatttacactggatttaggatagacttcacaaacagctaggctgcagttcaaagttagccttcagtcaagttatctttgttgggcggggggagttagaaacattaagtatgaagagattacgcacaaatctctgtttctttcttttgcagttacaggttctgttaacactggggtctcattccatcatggcagaaataggctagagctaaatagctctttcattaggcatttgtctcgggggtttgtcattttcagcatattttcttcatgtatgttacctccgtgatcctttaggcattttaatttgcaacccctgctccagtaggatccgtgtggattttctggttacagaaaagcaggaaaagattttctaggtgaaaggaactgtagtagcacaggcacaaacactgattgtgttatactgagaactttgtggtttgtgtataacagctgaggaatcatcgtatattttaagaaagtgtatttctgcttaaaaaataaaaaactctaccatcaagtatatcatatgttttaaaggaggaacaaacttaaaggcagggtaccttataaaaagccattgcagtaggttgggcaacaagcaacagagacatgatgcagggcaagtttgaggtagaatccacaggacttactggcttctaaggatgtaggataagagagctgaaagaagaggtacaggtgactcttaggtttctgctagacaggtaaaggaaacatggtttcacttttagacacctgaatcgatacccactttacaggtggaactatgactctcctcttacagtgaggtaggggcaggatgtggattctaaagtcattagaatatgatggaattagatggaaattgaaggtatgggaataggtaaggtaacacttaaaagatatggattgtgagccacccttaaccctaaacaaaagaataccaacattttactcrtgtaatctgggtagtaaaaccagaagggtagaaagccaaccagaaaagaattgcctaatggttgcctggggaaatggtgctttaaaaagccttctgtaaataaatactgcaaacaaattagtagatgacaactgaaaacgaagcctgagctaagtctggcagtggaattggaaagagattattgaaaatagtgcaagaaatgttgagtattggaaatgaaatcaatcattattaagtcattgtatcattgtcatcatttgggggactataaattaatgcagtcgtgtgcagtgaaatatttttccttctaaaaataccaaattaactttgtaatttttttttttaatgtaaaccaggtgccagatgcaattaaaaagtgtcagagggctggaattactgtgcggatggtcactggtgataatattaatactgctcgggccattgctaccaaatgtggtattttacatcctggggaagattttctgtgcctagaaggtaaagattttaacagaagaatacgaaatgaaaaaggagaggtaaagatttattattattttgtttttggttgacagatgtttaatatattaggaatttaactcaacaaacacatattgaatatgcactgtgttaggcaccatgcatgaaataaatgcagtctataccttaggaagcaaaatactagtgttctaagggataaaagagagaagtaataaattggtactaaagggagtaagcatttcttgctatgaatgctatataaaagtagcagcagtgaatctaggccaatttcagaagtacagtatgtataagggagtaatgggagatgagttggaaaggctgatatggagcatattttagggggccccaaactctctgaacttcttatgctaaattaaggaagttctattttcataggcagtagggggattttttaaatttggtctcataatgatatataaaaacagtggcttttaaacttgagtatgcatcaaagtcacctagcaagattattaaaacacagattgctgggcctgccccacagtattcgctaagatagatctgggtccatgcccaagaattcacgtttctaacaagttcccaggagtttctgattgttctgtggaccacactttgagagctactgataaatatgccagatagctcattaggatttaagaaactrtgtttgggcatattttaactttgataaacacttatagattgagcaagagaggatagacaagatttggccaaaacttcgagtacttgcaagatcatctcctactgataagcatacactggttaaaggtaagtagatttttcagttatttcacaatttcttaatacagaaatgtgttctgcttcccagaatagtaatagatactgaatattagattgagtcatggatatcatctgttttaataaaatctaaatacatttcctttgataccttaggtaaattgtgttgttaagtgattatcttaagtgtttaaaacaggatattgctctgaatatacccatagtttctgaagtaggttctcacccaacatctaagcaatttccatttttatatttgtttatttatttttaaccttgagtctataaaaccgacgtcaggatattcttcagaatcatcttattaaagagtaatgtttttataacacaaatatttgcttgtatttaaggtataattgacagcactgtctcagaccaacgccaggttgtagctgtaactggtgatggtacaaatgatggcccagcactaaagaaagcagatgttggatttgcaatggtaagaatttactcattcaaatatccaaacgtaatttactgactggtttgtttgtttgtttgtttgtttgttgactaaattactatggattttaaacactgtccctcaagattagttcgagggataattaataagcttaaattggtttataagtctaattagtttatgcattagctttatttgatgtcatgaaatctgactagattgtttcttttgagcaatttaataatattgtatgttggctttgtattctgttaatkttttaatgtctgtcaactcaactgaaccttttaataaccctttaatgcaggacacaggcttagaatagttgtgtgtatttaaattaaaaatataattgaaactcttccattcatctactcagttactcttcagttatttaaaaagtaattgaataccatcattttatatataatctttttttattgaaaaaaatcctacctacttgttttccccaaagtcctcaatttaagtattttattttctttgagtttcattttatttttggaaaatactggttcataatcacaattctcaaatctagaactatcaggaaactgaaatttttaacctaaattttgcagcagactcatttgattgcaaaatttgttctgaactgatgtgaggctgttatttgtcctacttagtgtgaatattcatagccattgtggagattttaatgtgatttttatggggtgctaagctcttttgggaaaattgagatataaggttatgtgtctcattatctttccaaactatgagagactgaattccgaatcacagtctggccctaaggttttcagatgagagattgtttttgtgtacaaatgtttatttgcataatttgtccccctgatattttgctgctaaaatggaaatttagaagatctaccatggtggcagcctttcaacaggagtgagagagatgaggaaaggaaattatgggtaaatttccctcaatcaaaagcagggaatccaaagatcccccgccctaccccatcccaaatttaaatggttggcagctgcattggtaggagcttctgaagacatgtgaagcatagctgaagaggtctatggaataattaagtgctcttccttttgctgtaggcaaacaggctcattccctttaggaacataggatcactcactgctgctcttgagcatttagcaggattcttattgctatttacattctgacagctgaccagaaaggcagttatgtaaaatgaattttaaaataaaaaaagctttcttcccaaaacttgaatgtaagacagatacaatgggctttaaataaatacaggtaaatataatcaaacaaatacacaatacaatggcttgttggttagtgttttttaagctcttcatggttttaggcccagttataccactttttttttttttaaatgataacatcaaaagtctaaatttagttcaaaaacaggctggccatgatggctcacrcctgtaatcccagcactttgggaggctgaggcgggcggatcacataaggtcaggtgttcaagaacagcctggccaacatggcaaaaccccatctctactttaaaaaaaaacatacaaaaattagctggatgtggtggtcgcgcctgtaatcccaactacttggaagkctgaggcatgagaatcacttgaacccaggaggcgcaggctgcagtgagccaagatggcaccactgcactccagcctaggtgacagagcgagactctgtctgaaataaataaattaatttagtttaaaaacatagagaaactgtaagtrcttggtagcttggacttgaaactactcttgttaaagcttgaatttactttggttttgcatttgtacagttaaaacttagacaaacgtattgtcttagagttttttttttagttacaagaaatcgctgttgataatttctttctaaatgtatctcctattttcaggcagatatagcattttagagcatactttcttgatttgttgatctatagataaagtgtgtgttctgcttgtacatttggccctttgtatccatggattctgcatccgcagaatcaaccaactgtggatcgcaaatattcgggacaaaaaatatggatggttgcatctgtagtgaacatgtgcagactttttcttgtcatgattccctaaataatatagtgtaacaattatctacatagcaagttttggtcgaaggagagaatccttgtcacatgaaattattcttgccaaaaattagttaaccatgtatagagatactgctgtcatcaaagactgaatctcatggtgtaatccaataatcaaatacatctatggtagtaaaacctaaggtaattaaaatacttttatttaaattttatttggattaatgcgggactccaratattgagactgtgttcagtattccagtcccggaacattagaagtgaagagttgctgtctcctaaaaattcacagcacatggaaataattacaggacagtgacaagtgtctcaggcagaagtccttgactctgcctgtagagactgggaagggttttctggaagaggtgccagtttagctgagggaaggagaggaaccaagaggccctcattcatcagcgaattatgtacaagtttttcaatctaactagaagaggttgcggtgctgtaatgagatacgaagctagaagaattcacagggggccacattaaaaaggccttgaatgccatgataaggaattttttttctcttatcctgtagatgaacatttgccaagcctacttctgatgatgtaagtttagagacacactatgcgatatcatatgactcctagaagctcatttttaaaaagcagtttaacgttttgtgattgaaagttttccagacttgtttcatcatrgaactagtttttatttgaataccaattaacaccatagagttacttttagaaatkttaaggattttgagcaagggaatggtgagatttgcatttgtataatatgggtatgatgagaatcaagaaatcccattgagtttaagtgtgttaaatatatgggacattggccaggcatggtggctcacacctgtaatcccagcactttgggaggccgaggcgggtggatctcttgaggtcaggaattcaagaccagtctcgccaacatggtatattaaaatcctgtctctactaaaaatacaaaatagtgggtgtggtgatgtgtgactgtaatcttagctactccggaggctgaggcaggagaatggcgtgaacccggaaggcagagcttgcagtgagctgagatcgcaccactgcactccagcctgggcaacagagcgagactctatctcaaaaaaaaaaaaaaaaaaaagtgggacattaaaagtaaaatattcacattgggagctggagactaagattctaaaataagattgtttcttcattgagtattttgagaaaggtttcatctgaacttcatgtttatcaaaacaatgtatgcgtagcatttaaaaggtcaagtagttctataagacttaatagcaagttccctgccacataccaaatttttggctcccaaaggaaactgttttagctgcttcttttacttagttatgtacctttatatctctgaatcacatrattctggtgctttttgatttttttaatataaggctttaactactgactttcattaatgaaggtgaggacttagtgctttcacaagcatatagaccacattcaccgcatataccttcatgctcactacctatcccatcatctgccagcagagttatatcataatttagatttgatcaatattcagtccttactgtgactgtaaatgctgtttcaacctratctgtgtggtctactgtaattacttttccttccttacacagctttttatgttccctataatttgttgtcttttacttgctttcttttaatttttatttggtttgtttgaatttttttggcttagtttttctatgtacttaactaattcatccccaaattctctgtttcatacatcagagacctttagcactcttaccaattttagtgtctaagagatacgtctctcagcatctttcaacatgctttaatctgcactcgctgtttgctagccttgctgcacagctgtcttcttggtctccatacctgaggattttctttattctcctttgtgttggatcttgtacttcatgaattcagtggcatcatcttctttggtttattcccttatctggtggagtcatcttctccagctgcttcctgagaaagggtttgtctttgtccattttgtattgtgataacagaatatctaagacttaataattcatgaacaataaaagtttatttgacttgaggttctggaagtgagtaaatccaagagccagggtgccagcatctggtgaggrccttcatgctgtgtcatgtcatgggagaagggcaagagaacaccgcaagtgagcacaaaagcaagagggggtcaaactcacctttataatgatgtcactcttgataatgaaaccactcccaaaataatgatattaatccatacatgagggcagagccttcatcatatcacctctgagtttccatgtctgcacttggttgattagagattatgtttccaacacatgaatttggggaacactttcagctcgtggcaaggttcgtgaggttaagctttttgataattttttagtgaatcctactcccttctaattactgccttgtctctctgcaaagataaccagtatcctgaagattattccttttgcctgtttttgaactttgtacagaagagtcatacattatgtgttgagttcatcttctttattcagcattatgtttgtcagatcatttatgttaatatagttgtagttcactcattttattaatccacaatttattaattaccccattctcctgttgatgacattgttattagtttgaagcttctaaatgcgtcttcagtagactttcaagagatcttcctttttttattcctaccttcacccctacttccagtgccacgtaaatctgccaagtctggagctgacaggggggttctgttgttggggggaaagggggctacttctactttctctacacttggattaggattcagctttcttgtgtctgctgagttacttaccatttggctgtctgctttctagcctctaaggttttatgggttttttgtttgtttgtttgttttttggtagaatctccttttcctctaactttgtcttcatagagtttgtttgctttttattaacagatacctttttgtgtggcttttggaaggaacttgggtaatgtctttgttcattcctccatttttaacccaacttgaaccttatttttaatacttcattctttgtttgatttctgctaaaccagaatgtctttcctagtaatatcttagaataactctgttaccttcttttagtgtaaatttaagtaatatttattaggtataatggtaaactttttgtttattaagtgtgtattttttgactatttgaaagttatacttaaaacatttagtctaattcacaaaattttttttaacagggtattgctggaactgatgtagctaaagaagcatccgatattattctcacagatgacaactttacaagcattgttaaagcagttatgtggggacgaaatgtctaygacagcatctcaaaattccttcagttccaacttactgttaatgtagtagcagtgattgttgcttttacgggcgcctgcattactcaagtaggtgatgacttgtctatcaaaacttgtttactttaaatttaaaaagtatattaaatgcctcttaaaaaatacttaatatttaagctgaagcttaatattttaggttagttaatataaaaatataatcctgttctgtttctcaagtttttaaaccctaaaggtttcctgagaattgctgagcccctgagtagttgtgaatgtctattaggaaacatatcttttctaggactcaccgcttaaggctgtgcagatgctgtgggtaaacctcataatggatacactcgcttccctggctctggcaacggaaccacccactgagtctctcttgcttcggaaaccttatggtagaaataagcctctcatctcacgtacaatgatgaagaatattttgggtcatgcattctatcaacttgtagtagtctttacactcttatttgctggtaagaattcagtgtctaataaagcttcagttaattgtttcttttccaagctaatcatccaagatgttataatgttacaaattttcaagagcctaaattctactcctgacttcccatttatctttaatttcttcttaatcagtgagtgcttagtaaatttgggaggacaataagctagatagtagaataaacaggagaataaacagtcctgatgtcttaccctggctctccactaatttagatatgtgatcctgagattatcaccatagttttgggagcttctgtttccttgcctataaaacaagagagttgtactagataatcccaggtttctctagctccttccatgctgccatttcagatcaaataaaaggtctagctaagttgtaatttgtatacctccttgaaatctaatttggtatgataattacaaaatagtcatttttcattctttcaggagaaaagttttttgacattgatagtggaagaaatgctcctttgcatgctcctccttcagaacattatactattgtttttaatacctttgtgctgatgcaacttttcaacgaaataaatgcccggaaaattcatggtgaaagaaatgtattcgaaggaatctttaacaatgccatcttctgcacaattgttttaggcacttttgtggtacaggtgggtaattggaaaagatagtttcaaatttgcstgttaaatgggagacattaggtaaacagcttgttctagcaatcacttgtgtggaacatgtgtggaactgttgccttggtgacatatataatatcatggtgatttaaggtatatgttaaagaatatgggaactgaatctcctgttcttagaagtaaatgccacaaccaactagacaaacagttttatttcttccaactgtaaagtgaaagatattatttyttaggaaacaaagtcagccaatcaattaattgtttcccagcattttagtattctttttacatcccacattataccaaaaaaaagatcaggtttaaattttaaaaaaaattaagatcacttgtacaaatacatattgaattcttcatgctcattattttcttgatttataaaagaaaattacttcagttttatatctctactaaaatccagacctgattgtcaaatcagttgtaatctaattgggctactaacaaagcagttggaaatctatctgtacaagtgcacaaattaacttaaaaaatagtggaaccgagaagtgaaaatgacttgaatttgaataaagtagagctaaaaagaaaggaattgtaactttaaggttttaaaatgttaactaccaaaattatttttgattttaatatttgggaactagttaactgccatatcaaagagaggcctgtcagactcacaggagggtgratattgttaattgattctttttttaaaaaattatttattttttaattaagacagggtcttgctatgttgcctaggctggtcttgaactcctgggctcaagcagtcctctcacctcagcctccaaaagtgctagaattacaggtatgagtcaccacacccaaccccagttaattcttaatatttccatgcacactattttaggccttttagaataacaagcaaaacataagcactgtattatgaatttatattcatcatcagacctcactcttttcataaaggagagcaaatctgagatcacctcacctgagttagcccatatttcatagaactttccaagttgcctttcttctcatayagtctgtgtttatcttagtatgtctaaatgttaactagaaataaacagctatgtggaatttttttaatattgtgcatttttccagtaacatacagtcttttctacaaaagagtactatattttgagaaaggcacagattatttgaagagttgtactaaatacaggggaatgtagttgcttggggttatattggaaacagtataaaattattattcttggtcataagaattttactttttagtaagcgtaatttaaacatgaaataygcatgcatcaaaaatattgggcagagattttactttatttcagttgtctttttttctaagaggcaaagtggactggaggggaaagaggaaaggtctatttcagttgtcttattttcagttgtgactaatataatacaattcatcagaatagtggttgttcaccttgttttagaggacataaatttgatatttttttaagtatatgaattttaaaatttaagatttaagtaaatttactcttgattattcctccagataataattgtgcagtttggtggaaaacctttcagttgttcagaactttcaatagaacagtggctatggtcaatattcctaggaatgggaacattactctggggccaggtaaaaatttcatcagtttttgtttaaacctaaagtgatttttttttttaatttctagtgtgtattttctttaacagtttcattacttgattctaaatggttaatgtggtgagtaaagagagggcattcaaagataagtttttttaatgtcgtattagttccagtatgtcacttgttcattatgattatgcctgtactataaaatactatcctaactttttatgtgtttttttaacttgttttttagaagttttgtagcggtttttaaaaatgatgtatttataactggttaggatgctaatatctgtatcttttactctataacctatttttacattttcagaaaaaaattttttacaacaatgtaaaaaatacatggccgggtgcggtggctcacgcctgtaatcccagcactttgggaggccgaggcgggtggatcacctgaggtaaggagttagagaccagcctggccaacatggtgaaaccccgtctctactaaaagtataaaaattagctgggcatggtggcaggcgcctgtaatcccagctacttgggaggctgaggcaggagaatcgcttgaacccaggaggcagaggttgcagtgagccaagatcgcgccattgcactctagccagggagagaagagcgagacttcatctcaaaaaaaaaaaaaaaaatacattgtcattttgttctgtaatttaatccaatatgcagcataggaaaaactgaccttagagaatgtttttataaaaataatgttacctggaaaaaggggtcacaaaatgatgttttagatttgaattgaatagctttaacagtgtatatatgaaataaagtgcctgaaataagagatatacctcatatttactataggcagcttacttgcaaatgcatgtcattattttttaaatgtgacagtgatttatgcattgttcattttaagcccattactataaaactaatttatagaaaatctaacmttttcatagatgaaggttaatatatattatggcatataatttgcatgagctaatttattgtcattctgcaaatcagtgaaaccagactttcaggttttccttaaatgtagcccaatctttacatctttgtgtctcttctttttcttaactatgtttctagattctgaggtttcttatctattttgagtacctcattaatagagatcatcttttaagtaagacccatactaagtgtaccatggtagaacaagcactgcctttggtggtcaggagacctaggttcctagtcactccatgagcaagtcactttatgtgccttgaagcctatttcaccttggtgaaatgaggtgggtgtactagaagttctccaagcagaattctgtagctgactacatgcttgtttctccctgataaacccaactgctgccttagagaatggatgttaacacataagctaatatacgtgtattggtgtttcttgtatcctttgtgttttctagggcatctgtttttgtttggcgtcatcaatcagtactaatccaattttaaactgttgcattttaaaaaaaatatgtaacaaaactattttcagtgtaaccttaatgatttttttaaaaattttatacattttttctcattgaactctgacagcattaatgaaatgtaaacgtgttttgcatctagtaagaccacctgccattttcattgtattcaaaataaataggactttttaagtaaatacatatatcagagcatggttttacaatgtactgtcttgaatgtcctgatgaaaatatgaaaaatgtaatcaggttaatttccatttaggaaaactttttatccttcaaactcaaatcttttgtgtagctaagagaagaatgtattttgctctgggagagaaagactaatcaacaggatcccattacttcattggtaaagatagtcggatactctcaccacttttaatacctttagtattacagttgatcagcttacctttacttgatatgatttatttctaagttcattcccctgtgttgtagcttatttcaacaattccaactagccgtttaaaattcctcaaagaagctggtcatggaacacaaaaggaagaaatacctgaggaggaattagcagaggatgttgaagagattgatcacgctgaaagggagttgcggcgtggccaaatcttgtggtttagaggtctgaacagaatccaaacacaggtatgggcctggtagagaggtaggagagatgatgggagccagggctttttgacctggggaggaggttcgagtgtgctccttaaacttcctctctagccttcccaacccacaaattgtattctcttgaaaagtaatactggtgcctggaatgagtgagacttttaactgattatgaaagaatgtgtctatatgcccctaagctccttttttcctagctcccccatcccccacttcatctcaaaatgctattcttgcctatatgctgtgtaaaaagtgcctttttctttttatatgttgatagatggaatggtcctttctcttgttctctctctctcttgctgagcaagctgtcacaatctctgattccttgcagatggatgtagtgaatgctttccagagtggaagttccattcagggggctctaaggcggcaaccctccatcgccagccagcatcatgatgtaacaaatatttctacccctacacatgtagtgttttcctcttctactgcttctactactgtggggtgtgagtgtgtgttcctaagtgcatgaaattaacatttcctacttcacacacctaacgtttctcattttctccttaatgtttgaattcattgttcaggctttttcataaagctttcttttcgtaaagtggattgagacctcaaagtgttgtcgttgttgttttatttcttagagggctagataacaggtggaacaattgcaaccaaagattagatgcaatctgtgagcttgtctctgtgctaactctgatagttaatatggggaataaaattgtagcttagaacttgtgaaactactataaatttttgagtatatgcctttaaacatgtttatattgcatgtttcctaaaagcatgtgatttgaaactcatctaacagaaccaggaaattgcattttcaaagctaagaataaatttagcattttgacttttgtccaatttggaaagtaagttagtagcctgaagacaagttttcagtatgtatagccagttgcttgccttcttaacctgaactttgccttgctttgattttttttttttttttttttttttttttgcttggttgtgcagtggtttcaggggaaatcactgtgtaaatttaaaaagtttctgtggtatttatggtttggggtgktttttttttccatttgtatagacaatttagttaaaaattgcatcatagataaraaatgttctgttaagtttcagtagaagtaggaaaagtatactattgattaatcgttgaaccaataaatgttgtaattttcaataattgactaaaataacattttctttcaggtttttagtaaatagcaaactttctaaaagccttataagctataaatcttactgaraattcatggcgcattctcaatatattggaggcattaaagatgtaaaccccaaaatttacagagctacctaaggttagccttgaagtagacagagacctatcttttccatttggtctccagccagcgaaggactagaggaaccttgagaagctgcagagaggatgaattaagggagaaaacagtgcagactttccacttaatgcstgtttkttcygtatttacttaagtatattttcatttgatattttttaaaatgtggtgaaacaggcacagtaagaactgtccctgttttacaggtgtgaaaactgccttagagtttaaataacttctctacgactaataagcagaggccgcatgatgyaaagcaaagtgttccaagtgactcgctaacattaagatattaaatttacatagagggacagctagaactcttcyttttaaaaattacctacctgaataaaatggtaaccataaattgcctagccttaggcctgatacaataaaaatgcctcttcctccctgtatctgtggatttcaaactatgcctctctctctggtgctccttaccacctagccctagatggtaaatgttccacaagcctttatggaaggcctaccatgtgtcagaactatgctggaacctccagaacctgcagcctagtaaaggacaaaaaaaagtagttggaaatttctacatggtagtaaaacacaaactgtcttaacagggtccttagcctaccctggaaagtcaagaaaaattgcctgaaggaggtgactcccaagatgacccttgatagaattcaccaaatgaggcctcagtgattataatctggtactaaaagaggaataaactaagggattgataatagtctggtactgaaagagtaataaactaagggaagctgaaatggaaagtaagtatctgtttataccccacaagaaggagccaaactaagactttatcctgataaacccccttccctcaaaattttaaatttgaaaaattcaaacctacagacaagttgaaaaattaatacatgaaaatctttcacctggatttaccacttaatattttatgacactactttatctgtatattaataaaacttttttctgagccgtttgaaaatggcagataccagtgttttatccctaaatacttcagcatgtacctaagaattcccgtatataatcatactttattatccaagaaatttaacattgataccatattatctaacagacagttagtattcagatttctctggttgcccccaaaatttcctttatagcttttttaatccaagaaataattattgacagtatgtgtgttatgagtctagtctccaacctgtattcattccctgcctttattttttatgacattgacttatgaaaaatccaggtgaattgtcttatgaagggttctacattccagatttgtctgattgattgctactgattagcttcatattaaactttttcgacaagtttatctcatgggtaatgtgtatcctattcgtttttatttaccaatatttaaataattgtttttttcatttagagggatatcagatggctttaggtgtactatacttattatatttctcagtctgattgtgttccaagctttatattaaatatcaaagcaatcataaacttttaagacaggcaggcagacacatatatgcacacacctctgcacccaggcatctttttttccatcccaggctcttttttctgatgcacagttacatatgaaacctctgagtttctgggcccatgtggctaggggagcagatacttcagggaagtaaaggtgcacttaagagagtggcaaaggaaagtttgtagttgttgctttatcaaggtttgagatgtttacttctttattctgtgtcctatgttcttggagttatycagggagtaaatcatatctcgttaatacagttgtcattatacaccaagagttgcagtaattatgttgctgttaccataaatgtctttcaaccttgttggtggagcattgtcttaggtggtacagaacatcagccaaaatatagaactatgttaatatatttaatgaaagatttcattttatcactgtgtttctgccctaatatggaatagttttagaactacctatgggtgtcaaaattatttaacccttattgggtgaccttgcttagctaaaatagaagaaataatccatttagactttgtcaaatgctrgactcaaacatctctgaagagacctttttcccttcatttattagtcagatcttcactcttacaggtctctagagaaaacattctgtagtttttttctatttataaagtatatcattctaacaccagtttttaccattagtagatttttttttcctgaataaataaatacacattcctggaaatgagaaattgagagaaaatttggttttctaggtgaaggatcagcaaactacagcttatgggccaaatctagcctgttgtctatttttggaaataagttgttactggaatgcagcgttgcccattcatttaagtaatacctgtggcagatttttcactataagggcagagttgtataattatgacagactgtataattcacaaaacctaaaatattttactgtctggcacttcacagaaaaagtttaccaacccctgttccagatagataagaacattacacaggtgggtctccttttgagaaaatttaatatgcaagtacccaactttggaaaacaatctagaattttgtttctagttgcaaagtatcttttactgtaccattgcaattctttaagttagtgcacatagaaaagtagtaatgaaaacaaatttcagaagtgggcaatttgttgtagaaggtaagatttattggcttgtgattagtattttagagctctctcttctgtacaatgttttaggcagtaaacaatgttattttctgctattaaaagttaggatggtatttagaaaaattggttttgtaggtacatgatcttgtttggatttgttatatttcatatattgtttaccttgataatcattttcagtttcttaaaattcatgattatgataakcacttcagtttttttgtttaccatatgtgcttcatgcagtatttttgttttttttttttctctgttgaacagtttacttttacagaatatttttgacacaggaattactgaatttttcttaattctgataatttcgaggggtataagtatgctccacagagtaggtttaaatagwtaataaataggaattgaattttaaaactggataaaataaataggcttggattttcaaaagcctgtaattaagtttacttatatttctacttaaattgaattattattaatatagtttccttcctacctaaagtattgtgcacaaaattattattttcctcacagttactgtactgtgagaattttacatacagaaagtaataaagatcagagcaggtgtgagccagctcagtgtcatgccttagatcaagagtgctttcttatgttctttataagtagaaagtaaaacaactctggttcgatgattcctggwtaatctgagctttattgtatgtatctcgagaactgttctttgaaaattgaattgctttcgagcattgctgaactggcctagtaacgtgctgaaactaaccagwcatatggcttaaatagatgtgtcagacaaaggaagcattaaccttaatcttatggaatgttttattcaagtgaagttagggataaagtaaatgatcgtatgtttttgtcttctcttgacttccaaggaacctggaattgggagcccagaaacctaggttttaagactctttagcactaattaggagttccttaacaagtcagccacccatcctctctgttgctcagttttattatttatgaagtggttagaaaaaaaaaatctctaataytgttcaacaaattcagataggaaaaatcttctcagaattgaagttttgctaagaagggatttaatctttctttgcctgccaccggtgtatgtgtgtgattgtgtgtgcacatatacttgttgccctcacctttacactctgcccctcttagagcttcactaactctcaaatctctaacttaagtttacacttttcttctgagctctagatattttccaaatttaacatgtttaaaaagtacatttatttccccccgattcttcactgctcacttttataccgactgattacaaagaaaaacagatkgaaaacacacacatacacagaaagcttaactgttgttctatcttcagtagcagcagcaccagcaaccttatcaaataagcaacatcttcagggttgtcttgaacagttctcatcacccatcaagtttgctggctgatcctctaatttgtattctcctccgtgcctacgggctgctgataccaacaaatttttttttaraaagttatctttttgcattttaagctttacagtttgttattaggacagtcaggatacttgctgaatgttcacatgtataaaatgtgaattttaagacttcacaataaaacactgaatgaattactataacgttatatttagcaaacattgtttacattccatatgtagaacactttacatcttagtaaaggggaagaggaacaagagcaataaaagaagttgaaaaatatttgctgctattcatcagtcaaattaaggaactgaagtacaagcaatcaaatagaatggaattataaaagatggtaaagctgcaagacattaatagaatagatgcttgctgctccaagtgtggatcatggaccagcagctttagcatcaccttggaggttgttagaaatgcaggactttaggcccctgctgaatcagaatctgcattttaacaagatccccaactaatttgtatgcacattaaagttcgagaagccctggcctcgatacttgtgacctaacattgttttaagtttgtagtgtgctaacgaatttaatctcccacaacaaccccgtaaggcaagtaccattgctatttcccattttatagttgaagaaacctgtttgaccgaggttcctcaggtagtaagtggcagagctggaatttacacccagacattttgcttttgtatttctcagttgactatgctgtactctctatataaagggctaagtgaatatgaactaaaagcagcttacaaatagggcttggcaaataaggaaagacaacttgaaggtgagatgtgggtgcatggccctaaactctacattacatttttttaaacacattcacatgttcatttgaagaaatgtattattcattattgctgtctaaagagatgaatttggtgaccgcatcttttttctagaatgtcaaagtgttatttatttctcttaacaatgagtaaatgatgtctttattactaaacaggatttattagaatcaaagcaaaagcaaacactgtatttgaattgatacatagtaaatgctcaactagttggattttgtccttttttttctaaatctgaatgacgcttgagttaatagcacttaatgtcagtgtgtgcactgatgtttttaagtttgattgcccactaatctttttcatttatacagcagactgagaggaagatgaattgttgagctatctgcttaggggtgaaaatactagaaaacttttaacactttgtgtcttcttgggaaatttttcacagaagaatcccagaggatttgtttttgtttttgatctattctttccagataactgtagtaattgatttaagttttaatctgttacagagaaaaacactaaaactttatagacaaatgatagacaaatggcatatactcaaatatttatagctgtttaatggcattttatagacatttatttgggttttgttcttatttttgtttttaattaagggagtagtggggtagatgtgagttcattgtggcattcagcttatatttgcttggctttttcatggtcggtgacaccctaattcctagcatgataaatagtaaccctttgtgcttgattttgtttaacttatttgagttgttttcaaaatacattctttttaatttaaaaaatcagctaagcttgtgtatggttaagtttttgttttgttttgtgtttgatttgttcttttagggaaaaaatcctataaaatggctattaaatttttagccaatgacaatgagattttcttaatattactttgaattctttacctcttaattcttagagtatgtggttttgttgttctgtagtgtcttactaaaatattcatttttttacagtgtattgcaagttccactgcattacatgcaaatatgattcactcatacctagctgtttgtggattcaaactcataaatgaaccatttttaagttgttaatagtgtactgacatatttctgtattttctgatatttacagattcgagtggtgaatgcatttcgtagttctttatatgaagggttagaaaaaccggaatcaagaagttckattcacaactttatgacacatcctgagtttaggatagaagattcagagcctcatatcccccttattgatgacactgatgccgaagatgatgctcctacaaaacgtaactccagtcctccaccctctcccaacaaaaataacaatgctgttgacartggaattcaccttacaatagaaatgaacaagtctgctacctcttcatccccaggaagcccactacatagtttggaaacatcactctgattgtaagctgaatgttaacacactagctgcattgtaaagaaacaaattgaaactgggtcttttcacatattgtgatggacaagctagtattcttgtctttggacttcaacagaagacacacttgtacgaatgtagatttatttttttaaaaaaaaaaaagcaaagctttctgccagactgagggtgctttttggggggtgggagaaatgaactgacagataaacagtaactcagcgtaagtgacctgtggatcatcagtagtacccaagcatggtcctgaacagtgtattagcagagctttagtttatctcagtcctggatgggagagagagggaggagtaaaactgggcaagacaaagagccctggatcgttgaattgatagtttaatttctgctgttggctgttaataatttggattatttatgtttataaatgatacagatctgtttacaaggtttgtagatactttttttgtycctgttcatagatgggaagcttccttataactgatgcagagaaaaattagtccttcaaatactgctgtattttcaggaaaaaaaaaaaaaggggtgtttctattgaaactgtactaaatttttgcctacaatttaccttgttaaatattgtagataaattgctaatactaatagccaaatagataacactaatgctttgtttaaaaaaacgaaaaaaacaaaacaaaacaaaaaaacatgagcagtggtgttctaatgaagttatgacatctgtcctaattagtttcttaaatacatttactacttaatggttttgaagcaactgtttaatttttaaaatttttgaaaacttgctaataaccttttgttcagaatttagtagattgtttaatgcaggacatcaactacataatgaaagatgcttgaaatgcttttgttatttcaggcaaatcaaattaaatcagactatcaaactacaagagaaccttagtcttttttgtttttgtctaaacatgttagtttagtgatgtcttggtgaactgtgagtgaactgtattgatttttctaatctttagagaccttcacacagcatgagggctgttggcattttgaaaaaggttaataagtagaagcatacatgttttccttttgtttttgaaacttgtttgtaaacataaataaatatgcccttttattaaataaattcatggcaatgtttttttaaaagacatttcagcttctttactcagttctgcatatacagtgcatcagtctgttctctttgaccacaattggaatacatttcaagatggtaacagccccatgaagtaccgctttaattccttgctggtaatctaatagaatcagattaagaaaattaacacaattttaccatttgacatactcttcattgaatttagtttgtctaaaatagtctcacaggtaaaaaacataacaacaatgaccaccattgtctttgatacatttattttaattcttaagtggccaaataacagattaggtaaaatgagattacatgaaaaggttctaaaatgatatatttagatgcaataattaaccatatgctagaatgcccacctctaagccaattggattctttagctctctttttctttccttcatctaccttcttctcttttttgcctctgtctttaccctttagaaactggcatgtgttagggcccagatttcaccagatacacaatcctcaggctgacataaagtttacgaggactgctactataactgagagtgctgaccaagcaaagaaacatttagttgatggtgcttgatatttttggtgggtgggggaaatctttttctcaccatcaaatctttgcagtaatcctctgcaggtcttagaaacacattggctctgtcagcatttgtaattgtacatttattcatcaggtatttatagtgaatcatactgtaaaaaagaggtagcatgatatgctggaaagcatattagactaggagtcaagacctggtttctagtcttggttttgccattaatgtgctgcatgatcttgggaaaatcatttaccctaaataagggtggtggactatcttgaagaaccctttcaactctaaaaattgaccctatcaactggagagcccacaaggcatagggaatagagaaaagggaaatgttttcagttttcttttttattttggttatgcttaaatatgaatgtaattaccaaaagatttagaagtgcatgtgctttggaggatttgtattgagcttttacagtattcatttttcaactcaaggcaatggctttctacaccaactctaatccataaacgggtcttatgacatctatgaagtagtagcaagacatgcttagtgtgtatttctctctttgagacactgtaatttctaccagaaatttccagagcattatgtaggtagaaaaaaatgcaagcaagctgttaaagatcttggatcccattatatagtatgtatagctgaaatctgtaattcaatcactttttctcttttatcctctaaccaaaaaattgtttaattttgcatcccaaatgtttttaatctttgtatattttttaaaaatccttttctcctcatcattgccttttttgtggttgtaaatagacttacttgcactttgaagatgagttactccttgtcatcttacaaatatgtgatatggtaattttcataacagatgtcagttttgaaccaagaattggtgatttgtttataagaaaaaaactggcttcatttctgtgaaattgctctttgaaaatttctttttacacgtgtaagccaactgagataccgtgatggtgttgatttctttcaatgatgcttaccatctattttagccactgagccttttattatttgtctatttgtaaagtttatttgtcttaactcatttaataaatatactgtttatctgtttctgaatggggactgaactttttggatattgatattgatttgaaaatattttggaattttttctacttgaaattttagaaatctaattgaaaattctataatgtacttgaaatgttatggttgtgttacagtgaatcactcttctaataatatgcatgatcttgcctctaaaatgagagtgggtacattgtccctactctccaacccactgtcctcaacccttatagcacaatagatcatttctgcagtctatgggaatgtaatctgctggttttagtacagattagtttttcacattagctgtaagagcttatttttatttcattatccatacttgtcaataccagttatctgaactctatggtaaaaattaataaaattatccatagttgttttttataataagttattaatataaactagcaactttgttgaaatactgagtaaactttaaatgatgatgaataccatatttttcagttagtataaatcattagtaaattattgagtatacttaagtaccatatttgtgacatgaaagatattttccattttgtcaaattgggttttatatatatattatgtattagaattgaattttgaattaagttctctttgtaaaaaattagctgagaaagaaaggggagtttaagcctttgcatgttgacattgttccttccccgcgcctttaagattgtgtcttattgcagctgccttctttctttaacctgtgctactctaagactcttatgctcaaacccccatcaacttttatcttttttaattagtctgttaacactcatttatagaccaaaataaaagatattattaatagcataattatactacctcactaaaaatctgaaaaataatctttcttttagaataagtgtttttataccataaagactgtttcatgtggtcaggaagttgatagttgtgtttctgtacttttcttcatcagtatgtgtcacaaaagccaggcattgtggctcatgcctgtaatcccagcaattggggaggccaaggctggacaatcatttgagaccatcctgagcaacaaagctagatccccatctcaacaacaacaacaacaacaaaaaaatatatatatatatctagtggtggtgcaaggtgcaggtagtcgtagataccagagtggctgaggtgagaggatctcttgaacccgagttcaaggctgcagtgagctgtgatcacaccactgcactctagcctgggaaagagtgagaccctgtctcaaagaaaaaaaggaaattgcctttatgcaaatagtttctttttcaaccgattgatagttttaccccttaaactcaccattgagtttgcttttatgctttacatctaagaactgtttaacatttttcctactaaagtatttcagtagacatgttaaatctgtattctgttatttcaaggtattgttgaacagtataataattgttccaaagtagggaatcaaagttaagaaaatgtgcatatgtgcttatacagaatcagtctctggcacaacttccttaaccaccactacatcctagaaaaacaagttctcaaatcagtaacacatagtctgggtttgggttcagtgcagggaatccctaggattaaggattcattttttccaaataacgttttcagatcattagttataagcactgatactgtcgttagctattattaaaagggacatgtcacaacataaattagtatttacggagtactgggtatatactaagcactttacatggattatgtaagcaacctggtaaacattctgccattttacagcagggaaataggcttaaagagttcaggtaacttactctaggtcacatggctaggtagtagagctgggattcacacttgaggcagaccatttcaagaggccaaaccagtagccactggtctttactgcaggactagcatcttgttaacctgcatcagggcccaaatatttgaacagttaaaaatctctgcctgactagcatcttgttaacctgaatcagggcccaaatttttgaacagttaaaaatttctgcttaactcttaagcgtttccatcattgcacttctctggtatcaaacgcttctgagaggatcttaagaatcttcacagccttcctgggatagctcaaaagactgaggcagaatcacctattaagatgtataatccaagctttcctcatgatcagacctcctctagccgaagagtcaaagataaactcggtagaatggtgcttttaatagcatattttgaatagagaatttcattatttagtgcttttaaaatgggtgtgtttattcaaagtcttatagatagcccaataatttaacctgctgctttgtttcctagatagtttggaatgaaaataagtataacagtgagacactctgcatctctgcattttttggttttgaagcttgtgagactaaagaataggatgttttactttcaattaactttttattttgtgaagaattattttgtccttaaacagtattttccttgatgaaaattctttttttttttttgagatggagtctcactgtcaccaggctggagtgcggtggaatgatctcagctcactgcaatctcctcctcctgggttcaagcgatttccctacctcagtttcccaagtagctgggactacaggtgcacaccaccatgcccggctaattttttgtattttagtagagacagggtttcaccatgttggccaggatggtctcgatctcctgacctctccacctcggcctcccaaaatactgggattacaggcgtgagccaccacgcctggccaatgaaaattcttagtgctataatatttagtcctattgcacattggattttaaatgatccatttttaaaataagaaaattgccatttttaaactactgtcttgataccattttatattaatgttatttgctttgtaaatggttccccttggtctgtaaaaattaggtgccgagttttataatcttaaagatatctttgttaagaaaaagtatcttaaaacattgtcctggaggggaggtgggcaaagtggtgatttgggaaggttttggatgtgttggatggattggtgattgaagagactgagggtagagatgtaaacagaacagttaaaacattgagttgtacaggtctggcgtacagagggaatagactaggataataacagcaaaagtagagagaatagaaaagaaagagtacttgaaagcatagatgaaatatctgtagcaaaacaagaaacctagttgttggcatttcaaggcatcacctacttttggatttgttagctacttatgtgtagaatgaaagaacatttaattaggtgaccccttaattggcagaatgattggattaaatatcagtctggtagtggtttcaaagcattgtttgcagatcttgttcatgtctttcagattttctgtgaaacagttgtttcaataaggaagtagaaggaaagcttgtcactgtcttgggcaccattaagctgggaagggttgagaataaactagatgacaaaatcaggagtcaaactgatatgtgatgagatgactaaaacaatagtttgatatagatagatgtaaaatcctgctctttgggacctaaagtcagaaacaaaatgacaagaggaggcagatgtctgctaaaatgtggaaaaaccataggtttggttaacagaatggaaaaggtgcgttctagagtcctgaatcctggccttgagggacataggaaggtttggaataaatgcaatgaggaatgttcctgaaaagaataagagacaaaagctagtttgagcatcagtgaggaaaaccaggacgtgagtatacattttgctcaccagcaagacagatacactaaaactgaaagcaggtatgaagttgaaggtggctcaggtttaggtaccaaggtaacataacctaaagaaagcaaagccatctaggtcagtcacagcaggagcgaggtggccaactcgagcaaataactccaagaagctatgaatggctcttcatttgctccttaacaactctaacctcagatagttgtcacttccctctctttttccattgctatgagcacattatatgttcatgtgttcttcctgctcctgtaaattcctcgaggccccttttgtacttgtatctcttctcaatgcttgcaccaccctgcctcaccttcctcaacacaacagatgtgtaaaagaaggtgcttctccctccccccccccccccgccaaaggaaaatcacctctctgggagagggtgttgaggctcaaagagtgaatctctgaggtgtgcgaagaggcagtattttttcctagcagttcaccagaactgggttctaaacggttccaactcttataccagcttttaatatcttcagccctcagtttcctcaacaggaatatgagtattgcaatttctgccctgctttagaagttcagatgaacttgaaaatgtgaaagcgcttttaacaattacaaagcacagtataaggtaagcctattgactgagcaactgaaacctgtgaagaactgttcctgcctcctctaagaaatttggcttaaataaaaaatttcagagttgaaaaagacccttaagtcccaactgggtcataaatacccatgcattatgaaggttacccaggagattcatctcattagaataatagtgtttgcatccatttccattttttctgtttttagtcaattttcccttctaaaaagaagcagcttgctttcctctgggtggtaaataaatgagggtgctagtgatccagtcacacagatttttattacactagagctgctctggtggtttgagaccattaccaagttttaattgctctttctgttcccagtcatatctttattcccataataaaccatgggatagatcagtacttcccaaactttgctgtacattggcatcacttgggagaactttaaaacatactggtgccaggctcccagctcaggcattgtagtttatggtgtggcctgagggagcactggcacttaaaatttgattcccgaatgattctaatatgcagccacactttgggaactactgagtaaaacagagggaagcattgagaaccacaatgatgaaatgcaagaagttaatgagcataaaagagaaagtatacaggtgagtatattaaacttaggtttttgttcttctttttagagacaggttacagtcctagctcactgcagcctcgaacttctgagctcaggtgatcctcctgcctcagcctccctgactagctaggactacaggtgcatgccaccacacccagccatttttttctttttttttaactttttgtagagagggagtctcactatgttgcctaggctgttctcaaactcctggcctcaaacaatcctctcatctcagcctcctgaagtctgggattacaagtgagctgctatgcccagccaagcttagtttttttgtttttgtttttgtttttgttttcatttactgttattaaaaacctgaatttttggtggaagtttacttataccaggttgaaaacgtctttatctcatttttttagaaaaaaattatgaacaaatttaaactagtgggtcttatgaaagcaaaataaaaggatttcttttttttttttttttttttgagacggagtctcactctgtcgcccaggctggagtgcagtggcgcgatctcggctcactgcaagctccgcctcccgggttcacgccattctcctgcctcagcctcctgagtagctaggactacaggcgcccaccactacgcccggctaattttttgtatttttactagagacagggtttcaccgtgttagccaggatggtctccatctcctgacctcatgacccacccgccttggccttccaaagtgctaggattttaggagtgagccaccgcgcccggccaataaaaggatttcaaaatcaggtcatgaaagtttacttttaatttctagt

SEQ ID NO: 95352 - DNA, 20648 bp, Homo sapiens
  misc_feature (1)...(20648): n = A,T,C or G
tgtttataaccctgctatagtatgtttaacaagcacaaataccagaacttgtcctacttgggtgataaagcaattacaaattgcaaaaaaaagagggaaactatgggagtagccctcaaattatctccgaactgatttacccattcactcacctagaactgcattaaaaaacttaagacagaagagtattttattctcttcgcaaaaatttgttcttgtcagtatcaaattaagagatgtaaatcaggacttatcctgattaacatttatctccttttacaactatcaaagaataaatcaacagtataaatcctctttttgtgattatagtttcacattgtcaatattccctctattcataagcttgaaataacttactggaataatcattcatttctaaacataaatgaaatacacataatacagtgatttataaatatatttggtatgcttagttttagaatacagtatagtatactttattttggagatttaattacagaaaaaaacttctgaatagataacatggttcaaaattcagcaagtgcaaaaagtatacactgaaagttcttgtccctttgtcctgcaaccctgaggttccctttgttggaagcaatcagtattacgagtttcttgtatatgcttctagagagttcttccgattgcaaacaactgcaaatacttctgcacacctttgtttttacaaacactagcatactactctgcacattaccattataattgtactacatttttctcgcatcacatatgctagagattgttcccaacacggaacattgtgcacaaagagcatattcagtcatcttttacagccacagagcagtccactgtatgcagctatcatgatttatctaaccaatccctactaatggacatttaggtgtttctaatttttagctatcacaaacaagtagcattagtatgctttaaaataaaacaatacggccaggtgttgcgagaagtcagggaccccaaacagagggaccggctgaagccatggcagaagaacgtggattgtgaagatttcatggacatttattagttccccaaattaatacttttataacttcttatgcctgtctttactgcaatctctgaacatgaattgtaaagatttcatggacacttatcacttccccaatcaatacccttgtgatttcctaggcctgtcttcactttaatctcttaatcctgtcatcttgtaaaccgaggaggatgtatgtagcctcaggaccacgtgataattgcgttaactgcacaaaattgtagagcatgtgtgtttgaacaatatgaaatctgggcaccttgaaaaaaagaacaggataacagcaattgttcagggaataagacagataaccttaaactctgtccgttggtgagccgggcggaacagagccatatttcttttctttcaaaagcaaatgggagaaatatcgctgaattctttttctcagcaaggaacatccctgggaaagagaatacacgcctgggggcaggtctacagacggtcccccrggcgtggccatcttttatggtctgtagactgtagggctgaaatagacctcagtctcccatatcgctcccaggcttattaggaagaagaaattcccgcctaataaattttggtcagacaggttgctctcaaaaccctgtctcctgataagatgttatcaatgacaatggtgcccaaaacttcattagcaattttaatttcaccccagtcaggtggtcctgtgatctcgccctgcctccatttgccttgtgatattctattaccttgtgaagtacttgatgtctgtgacccacaacctattcgtatactccctccccttttgaaaatccctaataaaaacttgctggtttttgcagcttgtggggcatcacggaacctacagacatgtgatgtctcccccagacgcccagctttaaaatttctctcttttgtactctgtccctttatttctcaaacctgccgatgcttagataaaatagaaaagaacctacgtgactatcggggcaggttccccgaaggccaggcacagtggtccaggcctgtaatcccagcaatttcacgagtggagccaggtggatcagctgagcccaggagttccagaccagcctgggcaaatggcgaaactcttgtctttacaaaaaatagaaaaaattagccaggcatggtggtgcacacctgtagccccggctacccgggaggctgaggtgagaggatcacctgagcttgggaggttgaggctgcagtgagctgtgattgcaccactgcactccagcctgggcaacagagactctgaatcaaaaaataaaaataaataaaacaacataacataaaaacaaaaaacacacctcaaattaccagctaggatatttacgtttcagacccagatcaattgcaaaatcaatgttcagctctcctggaaaagttctcatgtatggacctgacctctatcagttgattgtcttagctcaatcttacaatttggtctactccataagctcactcatttggttaagtaaacaatgtctacagttctaacaattatttttactaaaatgcataattatgtgatagttatacatataccaacctgttatgtgagacaagctgacctgcaagtagtccaaggccagtgaatcaattactgcttgtacattgtgtgcatcatcttcttgactcctaggaataactatgaggtctggggggggaaaaaatcacataattttgtatccatgagaggccaagttttcatctcattgtctctgactaggctactgaatatgctcaactgctataaaggctctgcccaaacagaacatgctgtaaagtacagataaagttaataaaccctgaactctacacagcagaatctttactggttgagtatttattgattgaaccgatttatcaatattagactggttgaatacggttgaatatttattacaccatatatatatatatagatatatagatatacatgaatatgctttacaagaagcaccatgttaaggaagataaagtggtccctaaattcaaagacagctaatagtctaataagggagccaagacatgatactttaacccataactatgggctactttctacgaagaaaaaaaaaacacagcaggcattcaaggagcgttcttatatatacacatatgtatgtttatttattatttattgagacagggtctcgctctatcgcccaggctggaatgcagtggcgtgatcttggctcactacaacctccactttcccggctcaagcaattctcttgcctcagcctcccaagtagctgggtttataggcgtgcaccactatgcctggctaatttttgtatttttagcagagatggcattttgccatattggccaggctggtattgaactcctggcctcaggtgatccacctgcctcaagtgatgagcctcccaaggtaatgggattagaggtgtgagccaccgcgcctggcccttatatgtccttttgaatagccaactagaattattggtataaagatttaaaaggtcagcacaggctggacgtggtggctcatgcctgtaatcctatcactttgggaggtagacgggaggatcacttaagctgagttggtaccaccctggtcttgaacatagtgagatggtgagcaagatgaaaggacatatgcgcttattaactgtcttggtaaatgaggttcatcatctacaagcatcaattcttatccctagcactggttaagtaacagaatccaataaattcccaagctccactcaattttacaacctttgaaggtacatttacagaaaagatgcaactttcacaaggcagtagccatgattaggttaagccgtgattatcaggagccctcaaactgatctgctcaaggccgttattatgagtgggttccacagggtattccttaaggaatacaatattataattatacaatatgtgatattaaatacaatttaatatacaatatttattttaatattgtatattaatatagaatttaatatgcaatattaaaaaaagaaacaagcaaagagaaaatgaaattttataaatatcaaagaatctaactaaaggactaaaaacttttggcctaagatataggcaaaattactcctgcttttagtattcttacctggtaccttttctcccaaaatagactgataaagagcaataaaaacattagcatcacagtcttgaagttcatgtattctcagatgtatatgacacttaaaaagaaggttattggcaatggttacccactctgttgggaaaaagggggaaagatcagtcttaaaaaccaccagaaaaaaatcacacagacatttaaaaaatccaacaacctcccccccaacaaaaacagacactgaactttgcagaagataaggaatttgattgttagagaatttcaaagaccctttaggcatggtttttaaaaagatgtatttaatttcttgggatgatttccagagtgctgtaatttctacatagtcaaaactatactgcaaattcaattgatactgttgcagcctaaaatcttaagttacttatataagccttacatgggtgtttttagttaaaacatatttacaagtaaacaggaatattatgtcataaacaacagtttaatgataatccgaggttaccagaaactcattaatggaggctgcttcgcacttgcaatagtattggtcttgtgtttacccaattatcttgtgcaagtcagggtttctctggtgcyggaaaaagtggtgattaaacttaggctgttaagaactggtataataacaacatcaacggtaatgcatttgttagtttttcttttttattatatcgatctatatgaaagaaaatatgggaagtacatgaagctcagaattatcaatactgttgacgtttcctgcgtaccacattctcctctcccctagatattgctgggatttgcaaagtttaacggtttctgtaccaaaagtaacttagcttaaaatacttgttccttgaaatgcctgggaattggtaggaaagcactttcaatcggtattagaaacaaacatctccactatgttctggacacgtaacgttctggaaacgaatgagagtgtattttccatgcacataatccccctccccacgcccatttctcacagctggccaaaccatgacaactggtttgtacgcagtccttgtgaaaaggatgaaagcgtcctagacaaccaaattaattcgctcttcaaaagcggtgctagacaaagcccatgactctagagggcactgaagagaaaaaagcacaactattctacaggggcatattctactattctgcaggggcataataaatcttaagaatgctgttcctttaaagaccaatacaaaagcaggtacgacctcagggcccatagtgcaagggcggagggcacacggacagcggctagacgccccacagaaagacaagtccggggacgacccttctgaccgctctttttacagccaggacccaagtgtcctaccggcctcgccccagtgcctctctctctcccacagcatactgctgttccacggcctcgaagcgaagaggtggtgaagctgagagaccctatccagggaacccgccagcgcgacgcggcgtctgaaggtcacgagccccgccgacagcccagacccagtccgggctagcccgaggcctccctggaggtggacggtttcagtccacacatactgggaccccagggagacactcaccagcatccgagcctgccatgtttcagaggcaggtcgccgccggactccgacgcggccgggaaggcgacggtgtcctggaaggaccgatccacgcagacccgacactggggcgcggacgcacgaaccaaagcgcggggaaggaggcgtgaaagaaggacggacgttaaaagagcttctcgccgctgattggtcatcagaggagcacttcctttcacaggacgtgaaacgggggcggtttgggaagtttagagaccattctccgccgaccaaaacccstcaaaggattatcagacacgcgggtcggacggtccacatcagccggcagcccgggcgggtcccggggtgcgagcagcgcacttccggtgagctatttcgttttgtatccctccgccgacgtcaacgggaaagtagtgcggaccgctctctcggtggtccggggtggtacagccacgtgacaacgccaggccccgccttccccctcttttggttacagacgtgagggctctttggagacgtaaacatctccgagtggcgagggtgggcggggctgggcttgggaaagggcggggtggcttgcttgaggtgtggaaagaccagaagaaggtgaggtcaagagagtgcagaatgaggcattccaatggtgggtgggccctgacctgagagagtggcgcggggaggggtgaaagsgckgcgatcctggaacgccagcgggcgttgcggcctatgcgcgaggggcggggmgattaggtcatagagcggctcccagcgttccctgcggcgtaggaggcggtccagactayaaaagcggctgccggaaagcggccggcacctcattcatttctacsggtctctagtagtgcagcttcggctggtgtcatcggtgtccttcctccgctgccgcccccgcaaggcttcgccgtcatcgaggccatttccagcgacttgtcgcacgcttttctatatacttcgttccccgccaaccgcaaccattgacgccatgtcgggttattcgagtgaccgagaccgcggccgggaccgagggtgagtttgggagccgagctgtcaggcctggcgggtggggggatgggagggcgggtcagggtggcggccggcgggggctttgcggcttggacttggcctttccgggctatcttgggacttcctttcccgaaggcttgcgccattttgatattcacgtcacagtgattggaagagatttgacgrtgtagtgtcttcaagcttgctttttgtgtggggattggggagcygtcggggcggctgccatttggtagctgttgagggagttsagagggagcgtattgtgcggatgaaagcgggacgcttcgaggcagacgaaggaacatctgttaggtgcggystttcggkaggtgtttttggggtggccgggcattctgtgggagcgaggggaccacttccaaagccctggtgctgttgggrtaggagggcggccggcatcagccatgtggctgagtcgcgagtacaaaatgccggcctcggacatggcggcggcgcctttgttaccccgcccggcggaggagctcaaaatggcagcgtcgagaaaatgtggcgcagagagaaatgcgagacaaagggggaagcgccgccccagcgggaacgccgcccggccgactccgcccgggccgggactcctcccccggtagtcgccggctcctccttttcttttttcctgcgttatataattttgattcgttgatccggagctctaccgcggcgttcccccagctgggtttgctagcagaagtgtttctgagaaaacccttgttctgttatcgctgactgtactgtttaggttcttaccayyaaagctgtttggttccaaaacggccatatgagtaacatcgtcgtgatgctcttcggttcatgtagccttgttattgctgatagtgaattgctaggctggtggggaagattacagtaaccacaagaagtggtgtgtgccagaatcccaaattctggcatgtgggtgacaagtttccgacatgataaatccccggcttccgacatgataaatcccaggctgtttacatgacctaagtaatgtgtacttgggactacgggaaatgttaactgtggctgttgagagagagagagattttcacgaaggacagtgctaggtttacctctcgaagtctgttttcagtggtttttagcttgtgccaatggatgacaaatctatacagaaayctrggtatagccatttgaaaatgtgaataacgttttttttcattccaggtttggtgcacctcgatttggaggaagtagggcagggcccttatctggaaagaagtttggaaaccctggggagaaattagttaaaaagaagtggaatcttgatgagctgcctaaatttgagaagaatttttatcaagagcaccctgatttggctaggcgcacagcagtgagtaaattcatgtggcttcatcaggctgtaactcgatcrtggattctagtaaatgaaattctgacaggtgttttgcaaataactcaattttggtagagttacatgttctgacttcataattgggaaaggtgtgactcacttttggatataggtggctttgggatttttacttaaattaggttgagtataacaakaaattttttttttcataatagggtgttcataggtgggtccagattaaaatgaaggctactttaaactagttactaaattatgaagttaggggcttatcaattacgtatttasstaggggtggtgtcatgaattttaagactgttataatttgttttgcagcaagaggyggaaacatacagaagaagcaaggaaattacagttagaggtcacaactgcccgaagccagttctaaatttttatgaagccaatttccctggtaagtgctacttttcagttctacctacccgtgtttttgtttccacctaccccctctttttcttggcatcactaatttttactaaatatctgttactaattatagcaaatgtcatggatgttattgcaagacagaatttcactgaacccactgctattcaagctcagggatggccagttgctctaagtggattggatatggttggagtggcacagactggatctgggaaaacattgtctgtaagtttgggagaactcttgagttgatctgatatatgcaagaaaatgtaatggtaatttaaaaacgagtattttaatgtgatttctgtttgtccccactttcaccctaaatagtatttgcttcctgccattgtccacatcaatcatcagccattcctagagagaggcgatgggcctattgtaagtatatatttttayttttattagaagcataatgtgtagattttagactacatagctaaagatgtaatcatttgtggtggttttatatagaggttagctcaycctattcagctggagctgttttgggtattggacaacacatgaagaaaggatctgctagtataataagttagcagtttaaaactagtatccaggtttgtgctgaaagctgtttstctttccttagtgtttggtgctggcaccaactcgggaactggcccaacaggtgcagcaagtagctgctgaatattgtagagcatgtcgcttgaagtctacttgtatctacggtggtgctcctaagggaccacaaatacgtgatttggagagaggtatgtaatgaaaagggttttatttgtcattggtgctaaatatcctaggtattgtagttacacttacgtatttaattaaaggtgtggaaatctgtattgcaacacctggaagactgattgactttttagagtgtggaaaaaccaatctgagaagaacaacctaccttgtccttgatgaagcagatagaatgcttgatatgggctttgaaccccaaataaggaagattgtggatcarataagagtaagtgtcctttgaaatatgtgatcaaactgaattgtgttttcactcttaagagtctgatactaatttttccccccaaaatccattagcctgataggcaaactctaatgtggagtgcgacttggccaaaagaagtaagacagcttgctgaagatttcctgaaagactatattcatataaacattggtgcacttgaactgagtgcaaaccacaacattcttcagattgtggatgtgtgtcatgacgtagaaaaggatgaaaagtaagttttattaactctgttatatttgcttcctaacaactttgctgtaaaattgagggatcattgtttggtgagttgttttaggttatttcagttggtgtgatttcatttagttagcctactaatcctgaaaatttcttgaatccttcaaataatggcygtcaccatttatagctttcctatagaaggaattcatgtgtcccctggttgacttaaggaccaagggtcgaactgctcgataagtggattagcaggcgtttcctctttgacttccagccrtgtaaattgaacttaatgttttgctgaccataaatgtgtggccctagcaatggtcttttaaaactcaggatttttcctttctctctcctattattagacttattcgtctaatggaagagatcatgagtgagaaggagaataaaaccattgtttttgtggaaaccaaaagaagatgtgatgagcttaccagaaaaatgargagagatgggtatgtgtgagctcctccattgaagcagattgattaaaacagcttaggaaagggcaaacttggatcacgagcagtggatttttttcatatctgatagtgaatttaactttttcatttctggcgaaattaaagagatctgtgaccaaaagtggtcaagcactggagtctgaggttttcaatgtgagtttaataacacaacttgtcttttaacttaggtggcctgccatgggtatccatggtgacaagagtcaacaagagcgtgactgggttctaaatggtaaatatttcaaatgaagtatttttcccccttacttaacctagctagaattctgctcagataattgatcatgtatatgccttcctttgtagaattcaaacatggaaaagctcctattctgattgctacagatgtggcctccagagggctaggttagtacaaactcgcattcatggcttggtttcccagaagatctccatttaacttttttaaagaaagtttattgctttctttaacctgcattttttctaagttttttttcacataaaggtgctgtctttgtggcaaggcctaggcatgacaatcggaggactcgagggggatggaggactagtgatcggctggctgcttccagtcgattagagaggtgaaaaagctgaacgtgtgccagtaatcttcaaaaggcagaacatatcacctctgccccgtaaactgttctctccgagggaaaaaatggaagttatcctcacagttcactgccgtggtatttcttctgtcccatgctttgcatgactgccatggtacagccttgtttcaaactgttcactgtgatctgtgggtctttgagtttcagtgagtttgctgaaatgtcgaagaagtagttccaaacttcaatgttcaatgaaatttttgttcaagtttgaaatggagagagcagctttaaaaggtactaagccttttacaaattggtgagtactggcacatgagatctagagcaggagcaacttctcacacatagtaagtgggaaaagaaagtgctttgaaagttcctccctcacctacacagtagtcgtcatgtcgagacctgccagagagagacacattctcaagtgaatcctggcttcttggaagcgcttgcctagacgagacacagtgcataaaaacaacttttgggggacaggtatgttttcttgcagctgcggttgtaaggtcttggcaagacaagcagtgtggccagaattttgaacttctgatgaatgtgtaatgcaaaggaccttgtacatttttttgtttcaaggtcctcaaaatgagcacatgaagaggttgctgtgaaactttaagtggccctactgcgcagaagcattcagatgtcacttgatgatctgtaagggaacttgctgatttgggaatgtgcttagggaacacacattccttttgacagggtctgtcactgggtgggtgatgaattatacagatgacatgtgcttttttttcttttttcaacctcaatggtattcctacaggaaatggataaccattttaactgtattttttgcagcccgtaccttcttgggaatacaattgtctaactttttatttttggtctggctgttgtggtgtgcaaaactccgtacattgctattttgccacactgcaacaccttacagatgtggaagatgtgaaatttgtcatcaattatgactaccctaactcctcagaggattatattcatcgaattggaagaactgctcgcagtaccaaaacaggcacagcatacactttctttacacctaataacataaagcaagtgagcgaccttatctctgtgcttcgtgaagctaatcaagcaattaatcccaagttgcttcagttggtcgaagacagaggtkcaggtaaggatgactgataggaaatgttggtagttacgagtcacatcgttgtctacaaatccatttaaatggtattggagggtgagtaaaaccttgaatgtgaaaacttaagctgaaaaattgtaaaaacatttcacgcctaccatgaatagatctgtttctttctgtccacaatgatttgtgtcatagacataattgatcaatttgcaattgttttcttgacaggtcgttccaggggtagaggaggcatgaaggatgaccgtcgggacagatactctgcgggcaaaaggggtggatttaatacctttagagacagggaaaattatgacagaggttactctagcctgcttaaaagagattttggggcaaaaactcagaatggtgtttacagtgctgcaaattacaccaatgggagctttggaagtaattttgtgtctgctggtatacagaccagttttaggactggtaatccaacagggacttaccagaatggttatgatagcactcagcaatacggaagtaatgttccaaatatgcacaatggtatgaaccaacaggcatatgcatatcctgctactgcagctgcacctatgattggttatccaatgccaacaggatattcccaataagactttagaagtatatgtaaatgtctgtttttcataattgctctttatattgtgtgttatctgacaagatagttrtttaagaaacatgggaattgcagaaatgactgyagtgcagcagtaattatggtgcactttttcgctatttaagttggatatttctctacattcctgaaacaatttttaggttttttttgtactagaaaatgcaggcagtgttttcacaaaagtaaatgtacagtgatttgaaatacaataaatgaaggcaatgcatggccttccaataaaaaatatttgaagactgaattaagtggaaattgtactttattttatataatgtcatgtaaaactttgcttaagatggtctggttttttttttgtttttgtttggttttttttttccatgaaaacaaatgactgttcctttttatttaatttgggaggcagggggaatcagaaggcccttctttataatgagctattcatattgcaggagtcagaatgaattgatacaggtgaatttttagttacaggctaaattgcataaaagctttgtcagcttccagcatcaggggagtcatttaatagcctttttccttatttgctagtatggttaaatgagaaaatagtaaaatagatacaaagtcatctatatagtgtgagaacgtgggtgactttttcaaagtttataatttaaaaagctccaaataactggctttttcaagagacttatactcatgctcttggctatactgtgaattactgaaatgttgaacaaacctgtgaaagacatacattagccctttaagatggccaggagctaagcttgagtctcctttactgaatttcgttcttagtgcaggttacttgtagattctagtcttcacaggctccctggggctcttaactagtcacactgggagtcatgaatgtctttccaataattcagggaattctagagatcctcaaactgtaaggtctattcatactcaacacaaggaaaaaacctcattaaaattaatgactaatcaggaggcaacgtaaccaaaagcacagtgaatgaaagttttcatggtaggttcaacatgggtttattgctagaaagatccaggggatagctttaggtttaacttcggctcaccaacgtaactttctaatcatttatttcagtaatagctagaagtgggtctgaatgttttcccagagtctgatacgtgtttttttttgccagaagagaggtcttcaggagacttcatttaaattctgattattaaactgaggctttaattgatgttaatgccttatgtcaaatgtaaagttagaatttgctagggctgggatagggagtgatatttctaggacttagacattgaaaactaattcagcctgtagtaacctggatggttttcaatggcatggttagtcaaattcatggttttaaacttagaagcagctttcgggggagagggtaggttggagcatttattacatattttactgtttaatgtcttaaccgtgggccttttaatttgtaaacactgaaatgattgttgggctgtggaaaacatttacctatttaccttggaagttttaaaagacagtccactttttagcatgtgtgttgtgtccagcctgtggtcgtcttaactaataaatgtgatttttctccccattctctctttttatttatttgcgtataggccttttacctggtgtgagttcctgaatgtggaaaacacctggcagtagtacccagctttgcagttaattactatctagctggcctttttttaaacccttgtatacacttgtaaagaagaactatttcctgaacctggtacagcactttactaatgataaaactttactcctgaattacattaactcaattgctaagctgttacccctcttaatcaggtagtagtttggtagtctcacagtgaaatgtagattgttcctttttccctgaacctctttaaaggttttcgtaactgaggctggtataagaaatcatggactttggaatcaaacttcctcagtctgggtataccacttttccactttctgggtaggtcttaaggtctcgacctatttaaatagaaactgcaaaatcagaaacctgcaatttaatcatgagtctcttaataataacagtcacaagtctcattgttttgatgaacccatagaaggggcccctggaagaaattgcacgtacgtggttttctctgacaccaggagggtttaagacatgtcagggccccttggtttatttctagtgcattcccaggtgaggcagatgctgctggctggggactgccctttggaagccactgcaatatttaaagtgaccataccactaccctagtcacgaagcctatcgcccccctccccggaagcttaagcgtcaagacaacggctctggggttaggcctaggccacctggcggcagcatttgcctagttaagaaggcctgggcttacaaatcaccgtaaaggactaaaactgtttaaagggaaaccaaatgccaaatttagtccaagtgcttgattgaggtgtatatagaaggtgatttggataatactgaagtattttaattttctggactgcaaaacagtggcagaaggaagtgactcaagtggctacaccacggttataaataggtgggaataacctttactggtgcttacgaggaaagaaaaaagtcaatctgaagggaggggcgcgacgcgaacggcaagctagcagagaaccatccgagccggcgtccgccatggtgggcgggggacggctgcggccggaacgcagacatgcgcttccggggtggggcctgccgcccgcaagcacgctcacctccgttgcgcctgcgccgtggcctctccggattctgttaacggtagtggtggcttgttgggatccgttgagtgatgggagagtgtgctctttaacttcggagagagatgcgctctcgtgtagccgtcagggcctgccataaggtctgcaggtgcctgttgtctgggtttgggggtcgagtagatgcggggcagccggagctgttgacggaaaggagtagccccaaaggagggcatgtgaagtcgcacgcggagctcgaggggaacggcgagcacccagaagcccccgggtctggagagggaagcgaggcgctgttagagatctgtcagagaaggcatttcctaagtggaagcaagcagcagcttagccgggattctcttctgagtgggtgccaccccggcttcggacccttgggcgtagagttgcggaagaacctggccgcagaatggtggacctcggtggtggtgttcagggagcaggtattcccggtggacgccctccaccacaaaccaggccctttgctacccggggacagtgccttcaggttagtttctgcagaaactctacgcgaaatcttgcaagacaaagagctgagtaaggaacagctagtagcatttcttgagaacgtattaaaaacttctgggaaactacgggagaaccttcttcacggtatgcttcacgatttcatgcttcaaaacaggtgtcgggtggaaaggcgaggcagtcttgctggatcttggggattgcaactggccctgtattcccatgcaaggaagttagttagttctcatctttttgaagtagtcggatatattaacagtgctctaccctggagaaaactggtccatggaatcattgctgttccttaaacaatctgtccgaaggacctgggaacgctctcaatttcacggggcaacttctgaacacagtgctgtcatttagtgcaatgtagtctaagtgcataaggaactacacagacattttgaacttttcttagatttattctaagtaaaaatgttgaaattataattctgaaactatttcatgtatatcataggataaatcaaggccaggcgcagtggctcacgcctgtaatcccagcattttgcaaggcagaggcgggtggatcacctgaggtcaggagttcgagactagcctggccaacatggtgaaaccccgtctctactaaaaagacaaaaattagccggccgtgacggcgagcgcctgtaatcccagctacttgggaggctgaggcaggagaatcgcttgaacccaggaggcagaggttgcagtgagccgagatcacgccactgcactccagcttgggtgacaagagcaaaactccgtcttaaaaaaaaaaaattcaaatagttgggttagttgttattaggaaccaagatattcattgtaaaagaagagataatatgtaaaagaaggtacgtataaactaatgttaaatatggattggtaaattaaatatgaattggtaaattaaaattgaatatgggtctcactctgtcacccagactcgagtgcagtggtgtgatcatggctcactgcagcctcgacctcgggctcaagtgaacctcccacctcagcctcccaagtagctggactacaggcacatgccaccacacccagctaatttttgtgttttttgtagagatgaggttttgccatgttgtccaggctggtcttgaactcctgagcttaagcaatccgcccatcttggccccccaaagtgctgggattacaggtgtgagccacagtgcccagcctcatgatttttaaaaatatatttcctaactttcttcgtttaaagttcctagaagcaatgaccctcagtagcaatgagcacacctagtgcccagatcctggttcctttttttttttttttttgagacagagtctcgctctgccgcccaggctggagtgcagtggcacaatctcggctcactgcaagctccatctcccaggttcacgccattctcctgcctcagcctcccgagtagctgggactagactacaggcacttgccaccacgcctggctaattttttgtatttttagtagagacggggtttcaccttgttagccaggatggtctctatctcctgaccttgtgatccgcccgcctcggcctcccaaagtgctgggattacaggcgtgagccactgcgcccggcctccagatcttggtttctaagatgaaccagtactgggagaaatggctgattccgggtctggggttagggaaagtacaaggtgagtttgaaacactttatggtgctaaaaagcaaagaattgcttgaagactaatgggtcatataaaaaggtcacagatgctggcttgaggagggttgtcactggccacatctaggacaaattgaacattaagatacatattaatggtaatggatcataacacattgactaaaatctaagagtcaatagtattaatcaaaaacaaataattgaccctagaggtcgggggcggggggaagaggtagagaaagcttatgtttttacagaagctatggaataaatgtagaaggaaagatacattagaaaattcaccatttcatgatattgcaaaccccgatatcattgattcaagcaacagtcatcaatggattctaaaatactgggtgaaatactgttggggagcaggatattattggggagtggatatttactaccttaaccaagtaatcaaatttggtgtcttcagtagtggaataatttgataacatgttcctcatgttatgatgcaataagatacacacatctactatgtagtattttgctaaaaatgattagccgaaattaaatcataaggaaacaatcagacaaatcccaaatgtgagacaatctatgactaacctggactcacatcaaaagtcagtgtcattaatagcaaaattaagggggaaaggaggcaagggaaatgttctagattcaaatggatgaaagaaacctactcagaatgcagtacatgaatcttaactggaaagagaacagtaaaagatatttggggtgaaaattggaacaactaaaatatcaccatatgttagattatattgtggtattatggttaactttttatggtgttataatggtatataggaaatatttttatttttagaagatgtatgcggcagtatttgggagtgaacaagaaaaaaatgtggcaaaatgttgataattgatgaatctaggtaaagggtatacaagtgttcattgtatatggatgtttattattttttcaactttcttatagatttgaaaatctttgnnnnnnnnnnnnnnnnnnnngcaaatgataccactctcttcttcagataacatgttattctccataagtttcttcctgttgaccttttgatgcaaaccaggcttcccatagctgtcttaggcagcaactagttggctgatttaatacttcctgacagttcatgtaaacaacaggtccagttgtctcagacaaattaaccaaataagattcaacagtaatatttttaattaagttatggtgttgaggcaatcagacccttacaatctttaaagtgtctttttttgttcaattttaaaactatgaggccgggtgcagtggctcactcctgtaatcccagcactttgggaggccgagttgggcggatcacgaggtcaggagatcgcgaccaacctggctaacacggtgaaaccccgtctctactaaaaatacagaaaaaattagccgggcgtggtggcgggcgcctgtagtcccagctactcgggagggtgaggcaggagaatggcatgaacccgggaggcggaggttgcaatgagccgagaccctgccactgcactccagcctgggcgacagagcgagactccatctcaaaaaaaaaagaaaatcttcaaactaaaaactcagggtgaaactacctagaattaagtggtgatctgtctttttttgtttttttttaagacagggtttcactctgttgcccaggctggagcacagtggcaccatcccagctcactgcaaccttggcctcccagactaaagtgatccacctcccagctttccaagtagctgggactacaaggcacacaccaccatgcctggcttatttttgtatatttttagagatggggttttgctgtgttgcccagtctggtctcagaactcctgagctcaagcaatctgcccacctcgacctcccaaagtgctgggattataggcgtgagccaccaagcttagccaacatctgtctttatgctgtgttaacgttattactactattaatgtgtctattgacaaaaatgatttgggtttgtggactagatgtatacaatgattgatttatcttttgacaggtgccttggaacactatgttaattgcctggatctggtaaacaagaggctaccttatggccttgctcagattggagtgtgttttcatcctgtttttgacactaagcagatacgaaatggtgttaaaaggtataaaaagtggcaaataacttggccttgtatttaaatagtcaaaaaccagtcatttccacttgggataaattatataattttcagataagctaacttcctgatacgttttatatctaaagtattggtgagaagactgaagcttcgttagtatggtttactcctccgagaacttcaaaccagtggcttgatttctggttacgtcatcgactccagtggtggagaaaggtactgcaataattacctttaatttaatagttaatacataaattgtcttaatgtgtcagtggtaattcttctgacatacaagaaattatatttgatgtatgtagctatta

SEQ ID NO: 95353 - DNA, 56063 bp, Homo sapiens
atgccaccacaccagggtgatttttgtatttttagtagagatggtgtttcaccatgttggccaagctggtctcaaactcctgacctcaggtgatccacctgcctcagcctcccaaagtgctgggattacaggcgtgacccaccgtgcctagtcgattttcattttcttctttgtgctttctatattttccaagttttccaaaatggacattttaaaaatgtattaatttttaataataaaaagggggtggtagttaggtaacatggatacacactaaaaaatcagaacgtgtggaacagctctcaacagtcacattttgaaccaagcatttttgtattaagtgtgctggggtagttgtgagatccaagacaaggtatcatacatcaactcactatctgatcaccagtgattcactctacaaaatggcaatgtgttccactctgaaacacttctggtatcattattcttttgatgtggtcctcagagagttttaaatgttttttatcctttgttatttaatatatttttctataatctttccaaatgaactcatccttcagctgaaagacgtaatagttctaccccaaaatattaaagtaattgaagtgaaacaaattttagtttacctgcttgtcagatatccaatcgcggaggcagcataacaagcctacgagaaaacaacactgggacttgagcatattgggatccttatagtacatttatgacagcaacttactattaaataatagacaagaacatagtggtaaaggcagaattaaaatatttccaaccttagtaataaatgttctacacataaatttcaaataatggttatctaaattttagtttttcaggaaatttgttcatatgtatgttattcaaaacatcctcttacaattgcttaaatatctgcaggatcaataggaatgtcctcttttattaacaatattggtaatttgttttctttcttttattcttcatcagtctcatgaggggtttatcaaatttatccatcttttcaaagaacaaatttttttagttcttcgaaaatttttgttggtttttctctattgtttgttttctatttcattgatttctgttcttgtatttattatttcagtcattttgaatttgatttgcttttctttttctagcttcttaaaatacaaatttagaacactggtttttaattttctttactaataatttgtttaaaatgattccaagaactgctttagttataggttacaagtttgagttgcatcttttcattatcattctattcaaaatattttctactttccattgtgatttcttcttcaacccattggttaattaggatctgtagtgatacctcctttttcattcctgacattggtaatctgttttctcttttattctcaatcagtctatcttgaagtttattcattttgttaatcttttcaaatatttacaaaataccaaaaagtatgttgcttaatttccaaaggtctgagattctttttagtgatctcttattgagttccactttacttccacatggtcaggtgacatatactgcacgctttcaatccttggcgatttattgagatttcctttatggcctgcatatggatagtttttaccttgtaactctacttcagctcataatcaggaagagagggggcactaaattaaatgcacacaagataacctgggaaaatgctgagtgctctctcaaattcttcttagtctgggacatcatttttttcccagtattatttcttctcatttctttagaaataataatgaattgcgtatttcctagccttcattcagctttaaatgaagtagtatactgtcttaaagaactccacattaacgacataaatgtggaaaaaaaaaaaaaggaaatgtttatggatcataatcttaactggctctactatcatacacccactgagaacctgcacaaagactctgctcttttcctgtgtcgctattctctactggccccatctctctttccttttgcacataaggccaaattcacattaggagaataagacaactcctaagaaatgcaggcatgtaaatacctgctgcaataagaacactttatttagacacccaaaagaattgcccacttatgatagctaggtaagaaatgttgctaggcaatgcaaaatatacaacaacacgtaacaaaaagtatattcctctggtaggaaatgtcaaaagttgagaggtaactgttttgttttgttttattttgttttgttttgttttttttttttgagacagagtttcggagtttcgctcttgttgcccaggctggagtgcaatgatgcaatattggctcacggcaacctccacctcccaggttcaagcaattctcctgcctcagcttcccgagcagctggcattacaaacatgcaccaccacgcctggctaattttatatttttagaaacggggtttctccatgttggtcaggctggtctcaaactcctgacctcaggtgatctgcctgcctcagcctcccaaagtgctgggattacaggcgtgagccaccgcgcctggccataactggttttatgaccataaaagatctgttcctctactaaactacctccattcacaggcagaacagtgtacatggtacttagagagtggactctcgagccaatctgttttgatttaaatcccagcttccccactttctactgtgtaattttggcaagttgctctaaatctctgtttcttcatctataaaatgaaaataattcaaagcactgctgtgaggatgaaatcagttcgtatgtgtaaaacactcaaaatagtgcccacacacagtaagctctcaagaacaatgaacttgctgacaatctgcctacttgctggccaattggtcagtatgtcttgattactctatggatctaatcaaagacaatgaagtcacacccaactacatctttctctttatcacaaacatgtcctgaatgccttagcctgttttcatgttccctctgaatcattctgtcactacccttagttcaggtaccatttaagtcttcctttgactaccatagagtcaggatgcttgagggacatatgcactgggatgttccaccaacatctcaaatgcatgtgttcaaaattgaacatcacctttctcctccaagctggctcttccctctatattcccagtctcagtcacagacaatatgatctacacaatcaatcaagtaagcccaaaatctaggaatcatctccagaggagcctgcctcctctttcctaactggttaatgcctgcttatccttcaggacagctcagacatcatctcctgtgggaagctgagcctgggtactccttctctgggctttatagcaccctggatatctctctatcacagcacttaccaccttataatacaattgtctgtgtctgtctccacagcttggctgtaagccccttaaagccaggaactatcattcatctctgtatccagcacccaacacagcacatgggacctaaagaaccctcaactaagcttataggggctgaaataaaacttagagacagaggtcgtgctatgttgcccaggcagcctctaattcctggacttgagtaatcctcctgcctcagcccccttcgtagctgggattactggcatgtacaaccatgcctcgcatcatctttctgaagtacaaatctaattacatcgcccacctgtttagaaaaacctttagtctcccccattgcctactgttaaaaaaaaaaaaaaattcaaactctttttagatttcccacaacctcccctcaacctacctaccagtctcacagctcaccatgcctttacctaccttgagggaaccacatgaactaacattacctctacaggcaatcttctctgtcctcaaagagaaccagtcaccccttctgtgctactacatctattgtgagagttataatagatgagtctttttctgtaagtcttaccctcaccttccaggactgatcaacgtgaagatcaagactaaacctcactccttctttacatccctctctcctacaggttatgtagcacaatccttagtatacagtacttagtcaataaatgtttgctgtatgaagaaatcagtggcagatatgtcatctctacaaaaacagttaagtataggttccattcataggtcaatagcttcattttttcacacagatgaaagaacagaatgttgttctaacaaagacaagtaaaatgtagaagcaacagaaactcaaaacctcctagttttaagattaaaaaatacaaatctcaaaccttgtagataaagaatgtcattcaataaagaatgtcattcaataaagaatgtcattcaattaataaataatgtataatattaagcatctacaccacgtgaaagcacaaaccaagccaggcactgtggtgatataacaaatgaatcacaacttctgccctccaggcactcatgtatgatggcaaaaggcaccacttagggtggccaggcagttgtttgggcaagaggaggcaagaatttaaattagaaggcaacggtgggagtgtaaagcaggaatatttagcctcagctggactgagagtatgtgatatcacagaagtggattcttgacctttcaagcccgcactactgagagaagagcaaggtggattggcagaggatgcacttaaagtggattgacaaaacgtcgtatcttccttatcctgcttccaaataagcctctaagaaaggtggcagcatgatgtggtggaaaaagcatcaggctaggatctgagccatctgagtttccatcaaggcactaccatttgtgatatcctccaccctgccccgaaccaatcatacaacaaagccttggccttcactcatttatcccacaggtaatctctgaacacctttcttatgcaggcaccacactaagcactgggggtacagatgtgtcgtgaagaaataatatccctgctctaatggagcttgtagcctaatagggaagtcagactttactcataaactgtccattccaatcatgacatacagtatagtagtaagagaatggactcagacccagaatacgtgggttcaaaccctggctctgctactaccagctgtgtcaccaaaggcaagttttacttaacctgtgtcttttctcatctgtcaacttggtgtaacaacagttaatattcaacagtgattgatatgatatatgtaaagtagcagaagagtggtaagcgctatctgggtgtttgcaatgcatacctaccgctattactgatcattcccagtaacgcattcagccacctgagtccatactcaccgcttgctcattcctcatcccgatgtacttgatgcctagctgctgggcagcaatggcgatttcggtcactgggatgcctacgatgccaaatatgtactccacatcctgaggaacgaagaacaggggagtaaactcccaaggccccaccatatcgccacatccttccctccctcccgggcgctaaaaggaaaaccccccgacccccatcgcccatttctactcgtctccaagacaacatcgcggtccccgccagcttccgtaggagcctttcattccaggaaggtccatcgtacttgcgttttcagggcctgagcgatgactttagcaccagacacctgctcctcgctgcgctctgcgaagttactgtccggcatcttccaccgaaaagctctaagcactcacgcagccggcaaacaagcggaatcatccagcaaggcaaacgcgaagtcggcagcacgccacctctggtactgcacctctgacggacaggagggcaaccaactgccttaaacaacgggaaggaagaggcggtctaaattcgtccacttcccgggagaggtgagaatgtaaacacgcgcgttctccaatcagaactgcgctctcttctcggctcctccattcgcscgccagaatgccagagggaggcgggactagcaggagattgctgcctatgcaaagcaggtaagaagccgaactctgaggcctctcgccattgtctccgagtcggycagctggagcgttttcggggctgtaaagggagaatggcgcatgcgcatattcagggcggaaggcgcgctaagagcaggtacggagggggcgtggtgcggcgcggagggggtgtggtaagggcgtgcggtccagaccccgccccgggcgcccagttggacttggggagggctgcgcaaaggctgccgggagctgggaagcccggcgcgcgtcgtttgctggggctgtttgtgcgttgctgctgtgctaccgcgttgcgttttctaggcatttacttacacgctttgtggtttacgctctcataaccttgtggttttatagtccttaaattattgtagcgcacgttacttaaatccagaagcagatgtgtaccccagcaagagataaaatgacgctcagagtcagtagatccagaccgtgcctgagatcctgaatcctgtttcctacccactattcagccattgggtcacaagcgatgaaaagagcaccttgaaggtagtatagagcactgttttctccagcccttgctactaatccatattactctccgctaatatctttccaaaattaggaactatggcgtttcataattcttaggttgggtccctacctacaaccagccctgcacccgatagccttttaaaacatttttgtgtgaaaatcgtttgcaatgtgcaatatctgaaactactgccttggagtcattagaccctctgctcagtgacaataaacataaaatttccaattgtaatraacagtggaacttttaattttttgaggatttggagtcattttaagcaaaaagaacagtgataagtggacagtaaagagatgagaggggagtgggtcatgggtagtgaaatgagtgagaagcactggaagtgaaacgatttctaaacccagacattttcaaactgtagtcctgggtcttttcaaaaggtcttcccctctttttctcaacccctcaaccccaccccaagcagaggagagtgaagtggttgcctccctgcatatgtggacggtgttagtccattttcatactgctataaagaaatacccaaaactgggtaatttataaagaaaaagaggtttaatggtctcacagttccaaatggctacggaggcctcacaatcatggcagaaggtgaaggaggagcaaaggcatgtcttacatggtggcaggcaagagagcgtgtgcaggggaactgccctttataaaaccatcagatctcatgagacttactatcattagaacagcatgggaaaaatcccctccccatgattcagttacttcccactgggtccctctcaccacatgtggggattatgggagctataattcaagrtgagatttggatgaggacacagccaaactgttctgcccctggcccctcccaaatatcatatcctcacatttcaaaaccaatcatgccttcccaacagtcccccaaagtcttaactcatttcagcattaactcgaaagtccacagtccagagtttcatctgagacaaggcaagtcccttccgcctatgagcctgtaaaatcaaaagcaagctagtggctgggcgcagtggctcacacctgtaatcccagcactttgggaggccgaggcgggcggatcatgaggtcaagagatggagaccatcctggtcaacacggtgaaaccctatctctactaaaaatacaaaaaattaggcgggcatggtggcaggcgcctgtaatcccagctactcaggaggctgaggcaggagaatggtgtgaacccgggaggcagagcttgcagtgagctgagattgggccactgcactccagcctgggggacagatcgagactccgtctcaaaaaaaataataaaattaaatttaaaaataaataaataaaagcaagatagttacttcctagatacaatgggtgcacgggagtgaggtaaatatacccgttccaaatgggagaaattggtcaagacaaaggggctaaagcccccatgcaagttcaaaatctggcagggcagtcaaatattaaagctccaaaatgatctttggatcattttgacttcgtatctcacagccagatcatgctgatgcaagaggtgggctcccacagccttgggcagctctgcccttgtggttttacaggctacaaccccctctcccagctgctttcacaggctaatattgagtgtgtgcagcttttctaggcacatggtgcaagtggtcagtagatctaccattctggggtctggaggacggtggccctcttctcacagttccaccagcagtgccccaggagggactctgtatgggggctcccaccccacatttcccttccacactgccctagcagaggttctctatgagggctctacccctgcaacaagcttctgcctggacatccaggcatttccatacatcctctgaaatctaggcagaggttcccaaacctcaatttttgacttctgtgcacctgcaggctcaacaccatgtggaagctgccaaggcttcaggcttgcacygtctgaagccaggcctgagctgtacattggccctttttagccatggctggcatggctgggatgcaggacaccaagtccctaggctgcaaacagcagggggaccctggacctgacccatgaaaccatttttcctcctaggtttctgggcctgtgatgggagggcctgttgtgaaggtctctgacatgccctggagacattttccccattgtcttggtgattaatagttagcttcttattacctatgcaaatttctgctgccagcttgaatttctccctagaaaatgggtttttattttctactgcatcgtcagtctgcagatttttcaaatttgtatgctctgcttcctctggaacactttgccatttagaaatttcttctgccrgataccctaaatcatctctctcaagttcaaagttccacagatctctaggacaggggcaaaatgccactagtctctttgcatagcaagagtgacctttactccaactctgaataagttcctcatctccatcagaaaccacttcagcctgaattttattgtccatatcactatcagcattttggtcaaagccattcaataagtctctaggaggttccaaactttcccacattttcctgtcttctgagccctccaagtctctaggaagttccagactttcccacattttcctatcttcttctgagccctccaaactgttccaacttctgccagttacccagttccaaagttatttccacagtttcggctgtctttacagtagtgccccactctctgcattaccaattttctgtgttagtcccttttcatactgctatgaagaaatactcaaaactgggtaatttataaagaaaaagaggtttaatagattcacagttccacatggctggagagacgtcacaatcatggtggaagatgaaggaggagcaaaggcacgtcttacatggcgacaggcaagagagtgtgtgcagggaaactcccatttataaaaccatcacagcttgagacttatttgctatcacaagaacagcatgggaaaaaccctccccaatgattcagttacctcccaccaggtaccgctcatgatatgtagggattatgggagctataattcaagatgagatttgagtggggacataaccaaaccatatcagggacccatctcagagggtgacttctttcaagtctcagagtgtatctaaaaagaaaatgcagattttgtattatactctagaatgtatccatattttaattttaaaatgacatttattgagatataataaagatacaattcaatgtccagattttaaatgttagatgagttttgacagttatatatatatatatctatgaaatcaccacccaaaataaaaatgacattttaaactgcttacctgtcaagtaaaattgacattccagaaagatgtgaaacgggctgggcacaatggctcatgcctgtaatcccagcactttgggaggccgaggtgggcagatcatctgaggtcaggagttcgaggccagcctggccaatgtggtgaaaccccatctctgctaaaatacaaaaattatccaggtgtggtggcacatgcctgtaatcccagctattcgggagactgaggtgggagaatcgtgtgagccagggaggtagatgttgcagtaaaccaagattgcaccactgtactctagcctgggtgacagagcgagaccctgtctcaaaaaaaaaaaaaaaaaaaaaaaagatgtgaaatcatctttgcactttgagtagtccttgacacaatgcctcctgtccttgttgaagaagtacagacttccccttccatcatgtattatttatatcagtaccttttgtgacagtctctgcccctgttgcattagagtcacttggaaagctttttccaaatagttacttgggccctaccccagatctcctgaatcagcatcttaggacaagtcaggcacctgtattttttaaaagctgctacctgattttgctttgcagcccagagttgagaaccctagctctgttttcatgccagaagcatgagttactaattaaacatatgattgcctgtcaccaaagtaatactgttgattaatttggattgacaggttcaagactgatttgacattgacagaacaagctgtatcgatggtagtcagttcacygggcctacttctgtgtcaaaagaaacagtgacagaaccactcagtatgaagtgcaatgaaaactgaactctgaattggaacaaataactggaattcagttaactggttttgcaaaaggataaatactcaactggttgttttctgccatttaacaaagagaaaaatcattgggattgtttaaacttgctttcacctttgcacctttcagttcaggatgcagtgttcaattgttaacttgggcttgatgattcagcagaaagaartgatttgagttctggctcactggattaacagggccaaggagcaagtcctttgcaatscaattgtaattacagccagcttgtccaacccttggcccaggatggctttgaatgcggcccaacacaaattcataaactttcttaaaacattatgagatttatgcaccgacccttttttttgttgttgtttttggttttttttttttttttttagctcatcagctatcatttgtgttagtgtattttatgtatggcccaagacaattcttctttttccagtgtggcccagggaagccaaaagattggatacccctgacaggattccaggattcttttgtaatttctcagaggccctctgtgcatactccgtaaggactatccacattctttattactttcattggcaataggtataaaattttatttgttggatattttactgaaatgttacttgtttttgcttatttactgattggtgggaggaagtcaaaggatgaataaatctaacctttttaaaagaaaaggctaaaatactcataacatgctctccaaagagcagagctagtcatcaaagaatctgcataccaattactctatttgtaggttctggatttgagattatgaaaaagagcaaattggtggttttcttctctctgggccagggagatatccaggcaaccaggtaatttagtaagaattgcaaatatagtgcctggagacaatttattctctaaagactgcagcttctacaggcagtaactcttaaagcccccaaattgggatagtgcattttaatttccgtatactaacaaggacactaaaaatccttgtgattattttaaagcataacactagctgaacttgtgattaagtattctcacaaatgtattatcaaaatgtgaaatgtttacttatcaaatgaggaaatgaatcaaggtcatttgtgatacattatagaagctaaaaatgaaattgcctgacataagataaaactgatactgaatatcttaaaaataaaaaggcggaaacaacaaaaaaaggagtctatgtagaacactattttttatagcaatgcaaaaactgtacagccggaaatgtgttgtaggaaatatgtcaacataggaagtaaaataatgtaatgaaaaggttctttgaataaagtgggttaaattgattttctttgcttctcattaaatctgtggacttcagagtaccaaagctcagcaacaggcttgaaacaaacccagtgaaaagcaactttattattgagctgaggattgatatcartaataactcattaataaaaaagcttgataataaaaactcccagtgcctgatgccagctgacagacactgggagttttcccaggtaccctgtgacctagagaaagcttggattcctgcctttggcttgggctggcaagccctgtgcctttactctacattttaatgccagggagacctggaactggagaagggagtgctgtgggaagaaaacagaaggaatgttgttcccttgttttagctttgtgttcatccattatgggttttgggtttttttgttttttgtgtttttttaagaacatttgagatagtttgacagcagcagtcattacatcactgacgaggacgtttacttgtgtaaaatgcaccaggaaatagtgacaactgtatgttgtgctatgaggatgtaagagatttatctcaaatggcttagaaatcaaaatataggtcagtgcggtggctcacacctgtaatcccaacactttgggaggccaaggcaggcggatcacgaggtcagtagattgacaccatcctggccaacatggtgaaaccccgtctctactaaaaatacaaaaattagctgggcatggtgatgtgcgcctgtaatcccagctaccggggaggctgaggcaggagaaccacttgaacccaggagttggaggttgcagtgagccgagattgcgcccctgcactccagcctggcgacagagcgagactccgtctcaaaaaaaaaaaaaaaaagaaatcatagtatttctccgtatgatggaattccatactcgggggagtgtcccacagggtaggcaagcagctatcacccatgtaatatggtactagtgttgaaatattttctgttttcacttgcttcttctgccattagcattcattacagccctttcctttaactttttaatttgtactttattgctttgttttgataataatctattctccatgtcagcaaaacaaagatttatctctagggaagaatctctgagtgattcccagggtttgggggttgaactggggacatcttcatgatgaacttaagcccttaaacttctttttacatcataacgtttgagttcttctttggagcttagctgtgatttattcttttcacttcaaaaaaaatacatttaacatttatgacatctttcagacacatgaataggatcagagattaatatacacccatgtacccagcccctggcttaagaaatacatcacaaatataatgaaacccccgtgtgtcctttccccattacacctcctttcctgtcctacagaggtaaccactatcttgaatttggtgtttgtagttcccacattatccattctttagatgatcgatatttggtcatttttagtttttttggaaacagtgtgctctgaaattcttgcatgtttccttcttgtgcacatgtgtgagagtttctacatatatatcaaggtggaggtcatcatcatttgatctccaaagtattgtaccaatttatactcccaacatttgtgtatgagagctaccctttctccatagtctcaactgtggagctttaaaaatttttaaatgtgaaatggcttctcagttccatttctctgactacaaatgaggttaagttatatttgtatatatatattggccatgcgtgtttctttttctgtgaattacgtgtttacatctgttgcacatttccttattggattatcttttgctttttgatttgtagatgtcctttatgtattctgaatgctaattatttgtcttttaactttgttaatagtgattttagaggtataaagggtttttttatagtcacatttgacaactggtcttccttattttttttttaatttttttatttttttggtaacttgctaaagaaaactttttgtaacctgaggttatgaagatttttttctatatcaaaaagtgtaaagttttatttttcatatttaagtcactacctggaattgatttttgtttgttgagaagtaagaatccatatgtcaattagatttgctgtgtaattaaccaccccaaaacttagtggcttaaaagaaccaccatttatttaacatatattcctatgaggctggtctcaactgggctcacccatgtatctgttagtcagttgccagtgaactgagtcactcagcccctggaggttagctggttgtccactgggatagcgggcatattgccagtgagccacatagctctaccactcagcaggctagctggacttcttcattggatggcagcaggttgcaaaagggaatgagcctcattgtgcaagcctctatgtgcggtgtttgctaacatctcattagccaaagcaagttatgtggctgggctcagactctaagttaaaggcattcgagttacatgataatggaacatggatacagagaggggagaaattgctggccttttttatagtcaatttaccataacatccagttgtccaagcaccattcataatatagttcattctcatcccagtgatacataatttcccctctgtggaatgtcaagctcgcatatttatgggagtatttctgtactctctgttcttttcctatcctaacaccaatcccacactatcttaatttctgtgtttttaaaataagtcttgatgttggtaggacaagtagtccctggacttcattcttttgaagccatcttgtttattatattaattttaagcaactagaggggatggaagaggaacctttagattaaaagagatttaaaagatagggtattttttaatggacaagactaaactacagtgtctagggatgcacattgggtgataaagctattttaaaaaacaaagaagtgatgagtataaaagtcagggtcatggttacttgatccctcatgggtaatgttgtcagatttagaaaaaaaaaaaaaaacaggactccaaaactcccagttgaatttgaactttagatgaacaatgcataattttttttagcgtaagtatgttccaacatatttatctgaaagttaaatttaactgggccacctgtattttacctggaaaaatcctgattttattcaaggtgataatgcagtttacattgcccagccttccttgtagctaggagtggtcacgcgtccacacatgggccaaagcaatttaaataggagtcactgggcagggcttttaggaaagctgatgaaactggcaagtaccctctgtactcttcctctgtacaacatgataattggagttgtagaagtcattttggaaccacaagatgactctgaaaatggaagctacatgccaagaagttaggcccagaaagagagggatcctgggtcctacatgactcttgcctttgtcaggttttattatcagatttttatcacttcataagaaaaaaatgccttcttttactatattctcacacacattgagtagcattaggattattttttcctttatagttagaaagaattcttctagaaactatttgggcctgttttgagggtggagaatgggagggaatgattgtttgataactatttcttctatgattgttggcatggtttagttttttcttttatccgaagttttggtaaaaatatatttttcagtcccagctactctggaggctgaggcacaaggattgcttgaatccaggaggcagaggttgcaatgagctgagattgcaccactgcactccaacctgggtgatggcgtgagacagtctcaaaaaaaaaaaagaaaaaacaaataatgtattttttttctaggaaactactcgtctaaattttctagcttatcaatataggattgaatgaggtgattattcttttttaaaaaaaattcttctgcatttatagatttctctttgttttgtatatttgtttctcttttttttcttaattaggctagccgatcatttgtctttacctttttttttctctaaacaacaactccttggacatacttattcattctgtcatttttctgttttctaatttaatttccactcttatttttatttccttccttttgctttcttgagcatgccattactcytttcctcactgttaccaccttttgttagttttacaatttctacattgccagagttaataacatttgcactgtgttctataaatataatcctcatgtttattttacattcaaggctcttgccagtttttccattcacctcttaattggccgaagattaccctctatgcattttttcaaagaaggctgatgagactgatgagaataatagtccctgagttcttatattttcatacctattatctggtttttttctttacttcaaccataggttggcataatatataatttctggcttatattttattttctggaaggattctataggcttttactggcattgatgttattgtagtaaagtctgaggacagcctgattattttgcccctaataaatacccttgatctttttatttagcttcccaaatgattcttactttatctttgaagatcaagaattttgctaggctatctgccgatgttgatgttctgttcctttctttcttgagttttgctatctcttttcaagctataaattgaaatatgcttttatttctggtgagttttcttcaattacatctttawttttttttttttttgcttcattatatgttgtctattgttgtataaaaatttaccctacgacctattcagcagcttaaaacaagacccatttattatctcaaagtctctatgtgtcaggagtctgagcatagttttactggatcctctggtcagcatctcacaaggctacagtgaagttgtcagctgacctcatggtctcatctgaggctgagttttcttccaaattcaactgatcgttgaaagaatgaatttccttgcagttgtagtattcatggtggcttgcttcttcaaggtcagccggggagagagtgtgtctgaaatcttggagcaccccagttctttttttaaagacctgattaattcagacccaccagggtaatctcttttgattaactagattaactggcttgggattttaactacatatgtgaaagcccttcacctttgtcatattctattggctagtaacagagtacaatttccacctgcactcaagaaaagaggattatacaaggagtcaccttagggtgtgtccaccacacattatttttttcttttatgcattttccaattatgcatatgatggatctcgttcactgttctccctgtctatcattttctgtggactccttttcaattctgtatttccattcatgttgcttatttatttacagcatcatctgatttcttttgctgcttctatctttgccataatttcttgatgttttaattttttcttctgcttctttcctgagccctgccagataatatttcatctgtctcccagctttctattccccactcccttctcccttctctcttcttccctcttccccctccttaccttctcctcttctcctcctttcctccccttctcccctttttccctttcatcttttaattctcttggtctattttgtgcttttatttaatataagcagttttttttcactcgtggcagaatgttttgtcacagtttttatttgtgttgtggcaattttctggggtataacctttgttttcgtatagtatctttcaaaagatcttgagctttttatttactcatttttgagtgagtttttcctctactgtaggaggtttatgtgtgaacaaggccattctggttcacagttattttttcttagcacmtttaagattttgttttcttacttctattgttactcttgaaaagtctgctgttttcaaatcaccatatctttgaaggcaatctctcttccctctggttgcgtctaagatttttttcttcttcaaatatttcgtgttctggtttctttatgttgtgtatagatttctttttggttgtcttgaatctatggatttctgtattttattattaaaattctcacctattataccttcaaacatgtgtaatgtgtcatgtgtcattttatgtattttctccctctttctttctttyttttttttttttttttaagtcaaggtcttgctctgtcgcccaagctggagtacagtggcacagccgtagcccactgcagccttaaactcctgggctcaagcaatcctaccacctcagcctcttgagatgctgggaccgcaggtgtacaccaccatgcccagctaatacttttttactttttgtagagattatattgcccaggctggtcttgaattcctggcctcaagtgatcctctcatcttgacctccaaagtgttgggattacaggcatgagccattgcacccagcctctattttctccttctgaaattccaattagaaatatcatggaacatcatatatgtcttccatgtctcatcttctttttttcccttttgtcatctctgtggtacattctaaacaaattttttaatgattctaacggccatgccacaaaatgtctccatttggttttatttgacaatatctttttctttttttttttttttttgacacagagtctctctctattacccaggctagagtgtagtggtgtgatcttagctcactgccacctccgcctctgagctcaagcaatcgccctaccttagccacccaagtagctgggactacaggcatgcaccaccacacacagctaatttttgtattttttgtagagatggggttttgccatgttgcccatgctggcctccaactcctgggctcaagttatcttcctgccttggccttccaaagtgctgggattacaggcatgagccaccactcccagccaacaatatcttattcttttacctgttttagagtcctctgagtacttctttaatcaacttcagtgtacttatttgaaaattttcactagtaatccttccatctgaagttgttgggggcctgattttgctgtattctttaactttcttgcataatatttgcttccttgtgtgttttgtaattttgaattttgagctcttgtttaccttgttcttcaacccaggacactcagtcttcaagaagagagtatgtggataggcttttccaggcatcttaggactgataacatctcaaaatcactttgtgctcatttcttggcatagagttacctgggtcatgtatgttgtgagtttttgaatcatgaacccacataaggaaaacctttgattatgttggttatgactttcaaggagtactattttcccctgctcagagcccaagatgagatgtacaagtttctacgtcagatagttactttggcaggcaggcagatatttgtttttgtccatcctttcaataaaggaatcattccttaaggttcctagctatatgcacagatctcactccaacctccacatcttgtctttctgtccttcatggtctttaaaatctaaaccccttggatatcaagattgggacatgttccagtatcacctcaccactccagttttcagttacttgwttttagtttttattttttaaatgctttttttaaaagagaagttttatgctcacaataaaattgagcagaaagtacagaaagtttacatatactccctgtcctgatacatgcatagccttccctgttatcaatatcccagactagaatggtatgtttgttataatcagtgaacctgcattgacacattattataacatgaagtccatagtttacattaggattcacttctttctcccttaacacttggcaaccactgatcattttaccatctctgcaattttgctttttccaccactggaaatgttacatattggaatcatacagtatgtagcctttacagattggtttctttcctttagtaatatacatctaaggttcctccatatcttttcatggcttgatagctcatttctttttagcactgaataatattccattgtctgaatgtatcacactttattaatccattcacctactgaagaatatcttgattgcttccaagttttggtaactatgaaaaaaactgctataaacactcctgtgcagtttttttggagacataagttttctactcctttgggtaaatacaaagaatacgattgctgaatcatatgataagagtatgcttcattttgtaagaaaatgccaagctgtcttccaaagtggttggatcattttgtgttcccatcagcaatgaatcagacttcctgttgctctatattctcaacagcatttggtctttttaaaaattgttttgggccgggcgcggtggctcacacctgtaatcccggcaattttgggaggccgaggygggtggatcacctgaggtcaggagtttgagacaagcctgaccaaaatagagaaaccctgtctctactaaaaatacaaaaattagccggtcgtggtggcaggcgcctgtaatcccagctactcgggtggctgaggcaggagaatttcttgaacctgggaggtggaggttgcagtgagccaagatcgcaccattgtactccagcataggggacaagagcgagacttcatcttcaaaaaaaaaaagttttgtttttttcctttcaccaaactaagcatttagtcttgtcagtgttttggattttgactattctaataggtgcatagtggtatctaatttttaatttgcaattcccttgtgacatatgatgctgaacatcttttcataagtttattgctatttgtgtatcttccttggtgagatgtctgttcagatcttttgcttattttattttatttatgtatttttttttcgagtctcactctgtcacccaggctggagtgcagtggtgcaatctcggctcactgcaacctccgcctcctgggttaaagcaattctcctgcctcagcctcccgagtagctgggactacaggcacgagccaccacacccagctaattttttgtatttttagtagagacgggggtttcactatgttggctaggatggtcttaacctcttgacctcgtgatctgcctgccttggcctcccaaagtgctgggattataggcatgagccaccatgcccggccttttgcctattttttaatcaagttgtttactttcttattgttgagttttaacagttctttgatattttggataacattcctttatctgataaatcttttgcaaatattttctctcagtctgtagcttatcttcttctgttcttgatagtttcatttgcagatcaaaagttttacatttagtgaagtgcagtgtatcaattctttcttttttgtccaacacaagrtcatctagctattctcctatgttatcttttaagagttttatagttttgtactttatatttagatctatgatctgttttgagttacttcttgtgaagggtataagatctttatctagatttgttttttacatgtgggtgtccatttgttccagcaccatttgttgaaaagactgtctttgctccatcacattgcctttgctcctttgtcaaagatgagttaactatagcctggtgtgcastggtacacacttgtagtcccagctgctcagtagagttcaatagttttctttaggaggctgaggtagaagaattgcttgagcctaggaatttgagtccagcctaggcaacatagcgagacctcatttgtaaaataaataaataaataagaccagttgactgtatttatgtgggtctatttctggattctctattctgttccatctatttgtctgttctttggccaattgataaaatatcatgttgtcttgattactacagttttataatgtcttgaagttggtagtgtgagttttctgacttcattcttcttcaatattgtattggccattcttggtcttttacctctccatgtacaatttatttttatgtatttatctagagacaggtctcgctctgtcatccaggctggaatgcagtggcgtgatcatagctcactataaccttgaactcctgggatcaagtgatcttcccacttccatctgctgaatagccaggactataggcacacaccgccttgcccagctaacttaattttatttttaattttgtagagaatggggtctctctattttgcccaggctggtggtctcaaactcctggcctcaaatgatcctcctgccttggcctcttaaagtgctgagcttacaggcataagccactgctccatatgcagtttagaatcagtttgttgatacctacaaaataacttgttgggatttcagttgggattgtgttgaatctatagatcaagttgttcgcaagaactgacatcttaacgatattgagtctctgcatttatttagtgctgctttgatttctttcaacagagttttgtagttttttcatgcagaccttaaacatttttaaaagatttatacctaaatatttcatatgtagggtacgaatataaatagtattatggtttttaaaatttttttcttttttatttttttgagtctcactctgtcacccaggctagagtgcagtggtgcgatctcggctcactgcaagctccacctcccgggttcacgccattctcctgcctcagcctcccgagtagctgggactacagacgcctgccaccacacctggctaatgttttgtatttttcatagagatggggtttcaccatgttagccaggatggtctcaatctcctgacctcgtgatccacctgcctcrgcctcccaaagtgctgggattacaggygtgagccactgtgcccagccaatagtattatgttttaaatttaaaagtccactgttttttgctgatatatgagaaataaattgatgtttgcatatgaaccttgtatcctacaacattggtataataacttattagttccagatattttttattaattcattccaattttctacatcgatgacaatttcatctgtgaacaaaggcggttttatttcttctttcccagtttgtgtatcttttctttgctttttgcattagctaggacttacggtatgatgttgaaaagcagtggtgagaagggacatcattaccttgctcccgatctttgtataaagtctctagtttctcaccactaactgtgatgttagctgtaggtggttttttaaatcaagttgagcaagttcccctctattcgtagtttactgagagttattatcattccaaatgggtattgtacttcgtcaaatacatctatttgacatctatttttctgtgtctattgatataatcatgtgatttttcttttctttttttgagacagggtatcactctgtcacaccagctggagtgcagtggtacaaacacagctcactgcagcctccacctcctaggccatgtgatctttcttatttagcctgttaatgtgatagattacataaattgattttcaaatattgaaccaacctttcatacctgagataaatctcacttagtcatggtgtataatttcttctatggattgttagattcaatttgctaatatttgttggtgtaaaagtcattgtggtttttgccattgaaagtaatggcaaatgacttttgcaccaacctaaggattttgctaaggattattgcatctatatttatgagagatattgctctgtagttgtattagtctgaattctctagggagatactgggagaacccacccccaatatttcaacgtaagttctattttccataagtgtcagctggctgagaaataaagagagacagtacaaagagaggaattttacagctgggccgccaggggtgacatcacrtatcagcaggaccatgatgcctgcctgagtctcagaccagcaagtttttattaagggtttcaaaaggggagggagtgtaagaacagagagtagatacaaagatcacatgcttcaaagggcaaaaagcagaaccactgataagggtctaacaaagatcacatgcttctgagggaacagggcaaagggcaaaagcagaaccactgataagggtccaacaaagatcacagggcaaagggcaaaagcagaaccactgataatggtctatgttcagcggtgcacatattgtcttgataaacatcttaaacaacagaaaacagggttcaagagcagagaaccagtctgaccacggatttaccagggctgagttttcccaaccctagcaagcctgagggttctgcaggagactaggacttatctcaatccttacctcaactgcacaagacagacattcccagaacggccgtttatagacctccccccaggarcgcattcctttcccagggtattaatattaatattccttgctaggaaaagaatttagcgatatgtttcctacttgcacatccatttataggctctctgcaagaagaaaaatgtggctcttttagcccaaccccacaggcagtcagaccttatggttgtcttcccttgttccataaaaatcgctattattctgttctttttcaaggtgcactgatttcatatttttcaactacacatgttttacaatcaatttgtacagttagcacaattatcacagtggtcctgaggtgacatacatcttcagcctacgaagataacaggattaagagattaaagacaggcataagaaattataaaagtgttatttgagaactgataaatgtccatattaagatgaaatcttcacaatttatgttcctctgccgcagctccagctggtccctccattcagggtccctgacttcccataacagggagacagtgccaatgggatatatatagagagatatacgaaagagatttattagaggaattggctcacacaattatggaggctgaaaagtccaataacaggccatctgcaagctggagaccctggaatgtcaatggcataactcagtccaaggccgaaggcctgagaacccagggggctgctggtgcaagtcctggagtccacaggccagggagttctaacacgcaagggcaggagaggaagggtatatcccagctcctgcagataaatcaacacacttgctttttctgttttcgttctctcttgtctcttggcttattagatggtgcctgcccacattgtgagggtggctcatctttacctagtgcacttagactcacacactcatctcctcatgctgatcacaagcacatccaaaagtaacattttaccaggtttctacagtgttccttaatccattcaagttgacacctaaaattaatcctcacagtagttttcttttcttgtaatgtctttgtctgtttcagtattggggtaatgctgccctcatggaatgagttaagaagtattccctctgtttctgtcttctggaagasatagtagagaattggtataatttatttctgaatgtttggtagaattcaccaatgaacccacctggactgggtgatctctgttttaaaatattttgaattattgattcaatttctctaatacatataggcctcttcagattgtctgtttttcttktgtgagttttagtaaattctgtcttttaagaaattggttatcattttcttttttttttcctttgagatggagtttcgctcttgttgcccaggctggagtgcaatggtgcgatcttggctcactgcaacctctgcctccctggttcaagcaattctcctgcctcagcctcctgagtagctggaattacaggtgcccaccaccacgcctggctaatttttgtatttttagtagagatggggtttcaccatgttggccaggctggtctcaaactcctgacctcaggtgatccacctgtctcagcctcccaaagtgctgggattacaggcgtgagtcactgtgcccggacatcagtttcttaaattgacatctaggttatcaaattttggggcataaagttgtttataatattcctttattattctttcggtgtccatgggatctgtagttatgtgccctctttcattgctcatgtcagtaatatgtgtcttctctatttttttttcttagcctggctagaggcttattgatttttcttgatcttttcaaagaaccagaatttagtttcatttttctctattgatctcctgctttacatttcattgatttctattctagtgtttattatttctgtcattcttcttactttggaattaagttgctcttctttttctagtttcttgaagtaaaactttagactactgatcttatatcttaattcttttgtacatttctcttgagatttcttttctgacccatttgttatttaaaactgtgcagttttatttccaagtattttgggtatttcttgctaaatttatgttattgatttttagtttaattctactgtggtctgagagcagatattgtattatttctactcttttaaatctgttaagttgtgttttatggctcacagtgtgttttgtcatggtaaatgttccatgtgagcttgagaagagtctgtactttgctgttattagatgaagtagtctatagatgtcccttgtatacagttgattgatggtgctactgaattcaactatgtccttactgattttctgcattctggattttatccattactgatagaggggtgttgaagtttacagttataatagtggatacatctgtttctctttgcagttctgtccatttttgcctcatgtattttgatgttccattgttggcacatgcacattaaggatttttatttcttgttgaattaacccctttatcattttgtgacccactttttaatcctgataactttccttggtctaaagtcagctctgtctgaaatttatgtagctattcttgctttctcttaatgactatgttagtctgttttcatgctgttaataaagacatacctgagactgggtaatttataaaggaaagaggtttaatggactcacagttccacatggctggggaggcttcacaatcatggcagaaggcaaatgaggagcaaaggcatgtcttacatggtagcagacaagagtttgtgcagaggagcttccatttataaaaccatcagatttcatgagacttattcactaccatgagaacagtatgtgggaaaccactcccatgattcaattatctccacctggctccacctttgatacatggggattactacaattcaaggtgaaatttgggtggagacacagccaaaccatatcagttactattaggatggtatgtccatccatttactacacaatctacatgtgtctttataaagtgggtttcttgtagacaacatatagttgagtcatgttttttatctactgtaatgatctcttgtttcgaattgatatatttataccatwgacttttaaagtgattatwgatatagttggattattatctatcatatwtgttacttttttctacttgctgcctttgttcgtagttcctgtttttgtcttccagtctttttctgagtttkggtgttttaattgaacattttatgtgattttgtcacatgattttgtctgaaagtatcttatttctctgcttttgaaggttaattttgtaggatgtttatatggtttggctctgtgttcccacccaaatctcatgttgagttgtgtggcctggtgggaggtgattggatcatgtggatggtttctaacagtttagcaccatccctctagtgttgtgtcatgatagagttctcatgagatctggttgtttaaaagcgtgtagcacttcccacttagctctctccatcttctgccaccatgtgaagatgtgcttgcttcccctttgcccttctgccgtgattctaagtttcctgaggcttcccagccatgcttcttgtacagcctgtggaactgtgagtcagttaaaccccttttcttcataaattacccagcttcaggtagttctttatagcagtgtgagaatggactaatacagacgcacaatgctaggctggtacttttttcctctcaacactttaaatatttcacatcactgtcttattgtttacatgatttctgagaagtcagatatctttcttatctttgctcctctatagataagatgttttttccctctggcttctttcaggattttttctttatctttgcttttctgtaatttgaatatgatttgcctacatgtagatttttttattttttattttcgtttttggcagttaacctgattggtgttctctgagcttcctgggtctgtggtttagtgtctgatattaatctggggaaattctcagtcattattgcctcagatattgcttctattctttctccttctggtattcccattgtacatatttataacttttgtagtccactgtttgttgatttttttctttttttcagtcttttttctctttgcttttcagttttgggcatttctattgtcatattctcaagctcagggattccttcctcagccatgtccaatctactaatgaatccattaaagtgattcttcatttctgttagtgttttttaatctcaggcatttctttttttattctttcttagaatttccatctccctgcttagattacccatctgttcttgcatgttggctgttgttttttttttcagtagagcctgtggcatattcatcatatttattttaaattgctagtctgataattacaacatccctgccatatctgactctggttcttctgggaggttttttgagacaaagtctccctctgtcacctccctctgtcactgctggagtgcagtggtgtgataacagctcactgcaacctccgcctcctgggttccagcatttctcgtgcctcagcctcccaagtagctgggactataggcgtgtgccaccaagcctggccaatttttgtatttttagtaaagacagggttttgccatgttggccaggctggtcttgaactcctggccttaagctccttagcctccctaagtgctgggattacagccatgagccaccgcacctggcctaactctggttctgatgcctgctctgttttcaaactcaattttttaccttttagtataccttgtaattttttgttggaagttggactcgatgtactaagtaaaggaacagcagtaaaaaggcatttaattgaaatgtggtgggagggaatgtgttctattgtctttagggatctttagggagcctgtgtttatggactgtgaactttacaagtgcttctcagcccccaaccccactcaggcgggacagaatggggctagagttgggtatttcccttcccccaggtcagttaagctttgataaaaccccaataggtaaaaatagttyctctggaggagaggcctgctaaagaccagaatgctttgtttcctttccctcttcctctggcagaagcatgggaggatttttttctccagtcttcattgtgagaacctggtagaactcctagaggtaaaacctacaaaagtgcgggtgcctccatctaagactgggtccctctggagttgttttttgtttgtttgtttgttttgttttgttttttctgtttgttttgagacggagtctcactctcatgccaggctggagtgcagtggtgcgatctyggctcactgcaatctccacctcccgggttcaagcaattctcctgtctcggcctcccaagtagctgggactacaggcacccgccmcctcgcccagctaattttttgtatttttagtagagatggggtttcaccgtgttagccaggatggtctcgatctcttgacctcgtgatctgcctgcctcggcctcccaaagtgctgggattacaggcgtgagccaccacgcctggcccagttttaattttttattttgyatataagttcaaagccttccaaagtgtttgtttatgatttattttcttgttaaaatctgttcttgttcattgcctgtttataagtgttgtcttgatgtttattttttgcatgtacattttaatttgtcaatctgtttcttcttttatttcaactgttccaaattttagaaagttgtttcaagtatctgatacctaattctaatttatgctagcttttctaacatttgatattcaacttctgattttgagtttatttttgtgtatggcctaagatgctattattcctgttgttattcatccatcccagtatcatattcaatcaacctcccccaccaccaccactattttgagtgtggttgcattaaaaagcatgtgggcttttggtcagaatagatttgggtgaaatcctggctatgggtagcagtctccttctactttaagagtaacttcttcacaaaaggagctagatgatcctctgctttgcctctaatgctgaggaatgttgcacctacaactatcatggaagacgctgaaacctccattacccaatcctgtactcccagcaccctcagggagccccacctctggaggactcagacactcatgccaggtaaagctgtaggacagaggccaggcatggtggctcacagctgtaatcccagcactttaggtgagaggattgcttcaggcctggagtcgagactagcctgagtcacatagcaagaccccatctctacaaaaaattaaaaaattagtcacacatggtagcatgcacctgtagtcccagctacttgagaggctgttggggagggatcacttgagcctaggagtttgaggctgctgtgagctrtgtatgatcatgccactgtactccagcctgggcaacagagcaagaccctgtctcaaaaaaaaaaaaaaagaaaagaaaagaaaaagaagctataggacataggggagctagtcatatgtctgtcctactgagactctagatggcacaaggcaatggcacttgtgttagaaccagaatgcagctatggctgacttggaaccgtctgtcagaggaaaaaaggcatgcaaatagttactcatttgaccaaagcagaagaaaaccaaaatgtccaatgcctccaggaagaaaggcaaagatagagatactaatcatttctctacacatctgccatgccatgggtgaagaagacagccaagttggtgaacagatctggaaaggttaccatcattcttgattgagctctgccctccaaccgaacacccctgagcagccacggcatgccggctcaccgtgcttcccaccacgcatggatcaagagcacctccacaggttctcagaagctacggcaccaggacccatttgcctgctttttgctgttcctcttaagacagggtcctgcaatcacagctcaccgcaacccctgcctcccaggctcaagtgatgctcccatctcatccttccgagtagctaggactacaagtgcatgccaccatgcccagctaattaaaaaaawttttttttggtagagacagtgtttctccatgttgcccaggctagtttcaacctcctgggctcaagcaatcctcctgcctcaccctcccaaagtgttgggattacaggcattagttactgtgcctggcctctcttggtaattttgactatgccactcctaaatatatgcctcttggcctctgcatgagagaaggtggcctttgatgtgttatttccagcactgtggtttactttagctttttaaattgtttctttcataatttctactatcatccagcgtcagtgtttctagcctatcctattaagggttattcttttgttttgttttgttttgttttttgagatggagtttcgctcttattgcccaggctggagtgcaatggcacgatctcggctcactgcaatctctgcctccgaggttcaagctattctcttgcttcagcctcccaagtagctgggattacagtgcctgccaccacgcctggctaattttttgtgcttttagtagagttggggtttcaccatgttggctaggctggtcttgaactcctgacctcaggtgatctacccaccttggcctcccaaagtgctgggattacaggcatgagccaccatgcccagccccaagggttattcttttgatttggggarcagggttccttggccctattacccaccacattgttctccactctttgcatcctgagcatctccatctgcatttttcactcctgagtactggcagagatgagcacaagggtaatgggacttgatgtagtgacattgtatccaccacatgcttagagaggttacatccaccacaagcttagagattctgtatccaccacaggcttagagaggttgtatccatcatacagttatgttgcatccaccatacatctagagatgttgtgtgcactatacaatcagcaatattgtgtccatcatacatttaataatcacaaagccattacatggcccacatttctgagcacatcttccctgaaaattttgacacgtagttctaggacatcacattttccatgcactggttctttttcttctggatgtcaagccctcaggtccacattatctagaaggtgttctttaaggtagtccaagaaggaaatgggtaagaaatttcccaaaggcttttaaaagcaataccttgctgacactcattgaaactcatttcagagaatttgacgatggtttttggaagccataagcattccagaagaacagagtagctagaagtgcccccaccattcatgtgtcccaggactgactgacagtggaaaagctttatgtgtgtgtattttccttgctgcctggtcaaggtctccaatcaatagtttaagactttttcacagttcattttcgaccaccgaagatttcctttaactttcctgcaaactcaaatatgcatttaaaaataatctgtttcatttttgcaggatatggttgaaacatttttcagattatctagtctaccatattgccccccacctttttttaaatcaggaattttatttaagtaaaaaccaataacaacctggttcttcaatggtattcctgccatagctaagacaagcactgagtcctttaactgacctgcatcaaattgtttaggggagatttttccttctagtttgagtgtttaatgctttctttgctgcttattttcattaaatatggtagaaatactttgaaatctgcccagattccatcagccctattggagaggcacctgagaaatgaagatgatgtttctgactcataactttctttgacataagggaacaataggagtcagaatataggatatacattcctctatcttctactcaattggttctccaagtgtgactcagaccaggagcatcagcatcaccttggaatttgccataaaatgcagattctcagaccctattccatacctactcaatcaaaacttccaggcatgggctccagagatctgtgtgttcaagccttcaggtgactctgatggcgtgcttacatttgagaccctctgctctggtctgatcacccagaatctcccttgggagagctaccttgaaatttctgcttatttcccctgcagcgtattgaagactccacggtggttgttttgttttgttttgagatggaatctcactctgtcacccaggctggagtgcaatggtgcgatttgggctcactgcaacctccgccgcccgagttcaagcgattctcctgcctcagcctcccggagtagctgggattacagacacgtgccaccatgcccggcaaactttttgtatttttagtacagacagggtttcacctccgcagtggtcattaaagcttgaccactaaattgccctggttcttcaacatgcactaggcaggctggaccagaagccaggagacctggctcccagtctcattatcattactaaccagtcctggagttttccctcaccatgaagatggaatttttaccatctgctttctctgctttgtgtggcaggaagataaaaaaataataataatggatattcaaacggtttatattgcatgtaaaatgcaatgtggcattgattgtagatcccttaattcagacagatttccccacgcagacgctgtgtgtcacagggggaatgggcagcgtcactttttacatccagtcatattgtatgaaattgcaacaaattcaaaaagatgccatcgtgggagtgtggtgagtaaaaaacagctttcatgaaactcaaatcttgaaagtcagatgctttctgggtcttgtttaactgtaaaagagatagatgaagtattagaaatggagaaggaaaggggggaaaagccatccatttactgcttaagaatggctctgctattgcgatacctaaggtcacatgcgtagccacttgggttaatgatactcagtttgtccacggagtggcagtagcaactgtctgagaatcagtctcagccggggttccttctgtctatagaaagtgaaagacagactgttattcaaattccatgtgcaaaaaagccttcttacattaaatacctgggcatttcaggaagaagttttatttgacttaaactgtgaaggcagtttctcatttgaggaaaagaaagatataacgtgtttcagttgaaatgtcaagatcctttgattgcacatttggtttcctaggataaattattctagccaatggagcagaaactggctaatcaaaggcacagtgcacagttacacttctgtatatcattctctttttttaaaataatagctggaattttttttgaaagtgaaattacaatttaccacctcaactcagaggacatattagcttgataacttattcacagttgctggtgagttcaggcttaaatcatcagctgtcactcacaagtgtttacccttgaactttccgaatgagacatcaaacgtcttggtagtgggtgggtttaaacaaagctgcccacgcgagaaccattgtggagcttcttgttccaggggccggtcacggacaagctcatgaccagcacactcagatgtgacaatcagataacaagaggcaagagaagactttctgggaaataaaagatcatttttgtgatttctttaaattcagatcatataaattaggtgaagatagacattatttctcctgtttatgtaaaagaatttagacaatgaagtcacgraattcatgagaataatttaaagactgttggaacttcccaatgtttttcttggcattcagtcactacacatagaaatgtatactatgccggttcctaatgacttagcagttccctcaggctttgttccacaggatgtgacatctcctctgccaacttttcctgcctcctttcctaatcataggattgctattctccctgacaagtaaagaatgacaagatattttattaaaaagatgttttatttatcttttaaagattttttaatgtatgtatctgcctctgaaattattaagaatgccttaataataatccctctcattttatttcagaagacactattgtaatagcatggctaggaaggaaacacagctaattattaagatgaatcatttagcaaggtggggaaaaatcccttgtgtgtaaaaatatctagtgattgacatattaccaaatttacatgaaatagatttccatgtaattgagactgatttttcctattagatggaaagaaccttcctgatcaggactggtgttgggggaatgttttccttatgaaatcagaagcagagcttctgtagggccgtccaagatcaggatgcttacttcaagatgccactctgcatctctccccacctgccaagtgtttcctgtctcccagatgctttctattggcttattgtaaggactttgacttctgcgctacgtgaactggggagtcactggaagagtttcagaggtgcaccttggwagactcaggctttctctggatctcactggctgctcttatgagtccagaatggaagaggatgaggacaaatgcagggggatgttaggagaccactaagcaggtccctgtcatttctctctctgtgattccttttgctgccactttctccttgtccccttggctccagccccctgctgtccttgctgtttcttgcacccgcccgtgaggcatgctcctgcctcaggctctctgcctgccgtgctctcacctcgcagacccacgtgatttcctcccgaacccccttcaggcctcggtccaaacatcaccctctcatcgaggtcttccttgaccacactgcttaaaattgtccccctcgcctcaccttaccaccttcactgcctcatttctcctttgtgcttaatcaccatctcacacagttatccagagcacgagccccacgaggaagggtctgtcttgtccactgttggacccctgacacctaacccctggggctggcccacagttgggaattgcatggctgtctgaagccagcaccttcctggttctgctgttccctggaagtggggttcagtacaccccacgagccaaggccctcatctcagagggcgtgcacatggttgcctcaattgtgctttcacactggacccttcctgcagtttactctcctatgtcagatgcccttcaatgaaagcaagtacattgccaccttgtcacacctctagttaccattttctttatggtccaggtcctgaccagctctaaagatgggtcagctgctgtatttccaagaaccccatgacttccagggccccttgttcccaggaaggccccgcaccccagtcgtcccgtgcataacctcacgggccagcacctggtagctgctggaaggcttctgggggatgcctgggcccctccagccctacctctagtcctgccactttacaactgagcacctcccgctgctgcctgctgaacccttcagagtccttgccacaggccctatttactttttcctgagaaggtatgtgtgatgccaaagagagaaaagcagcatttgctaatttgggtaaaatgtttctttgggaagggcaaattgatgtacagttgtccctcagtatctgttgggactggttccaggaccccgtggataccgaaaccctcagatgctcaagtcccttatatcaaatggtgtagaatttacatgtaacctaaacacttcctcctgtacactttaratcatctctagatcccttacactacctaatacaaactaaatgctatataaataattgttatactgtattttttaaattgctrttattttttattgttgtgctattatttttattgggctccctcctccccctcccaccccagtaatttcaatccaaggttggtggaatccatggatgcagaaacaatggatactgagggccggctgactagacctatttttattgtaattactcattctcttctacctcattaagcttggttctttcaagcatgaatacctggttgaatctgcataacctcttattatcgacctacctttgttcacacacaaatgattgccacttagagctctcctaccgggctccttttgtaaaataaattttatcttctccagatagaaagaaatgtgataccttgcggattttgcggtttccttgttttgctggattgcaagtcctttagacataaacaaatgttctgtaccccgacatcggtggtacccagctctcagttgagaaagagatgtaatgtgaatgccactcttggccccaggcactcctcacttgcccccackggggactggttcataccctcctctcctggcctcagtttccatacctcttagtgaggcctttgcgttatacttcagaaatattgtcagtatgactttgaagatgaaagtttgcccccaaaatcactctctgttatcattgtgaaaccagagatggaatggaaaaatgggtttctgagacattttaaattattccttgcttgtctttagaggcaaaattcagataagaaagcttatcaattatacttttgtttctactcaaaaactcatgactgctcactcaaagactccttgttcttatcttaaaacattgtttacagtgtcccagatgaatggcaacaaatcctggggtttggtgtttggatggtacatttccctggggaaagaaataacagtttgagatggaacsgggttggggtgggagaatacttctcattctgaggaatatttaattttgccaagatgagcatttctagttcttagtctgttgacgaaaagagctatggtttgtttctggaacttttgataaaaaataaagaaatttgtagcctggggagtttggttttaaaatgcaaacacaggagttatgagttgagacttggacagggtgtcattttctttttaaagggcagcaatatgattctttgatttgtctttgttatcttgacttttaatccggattcctgggcagttgttcagccccaggacatctccatgggcaggtggcctggccttggcacactacccagtaaatctctgcctgagaggacgctttagctgggaggccaggctgatttttaaaggcagaattggactatttactctaaaacagtaatgcacactgtttagaaagaaacattcctattctgggaggaaggaggagacacacagaagtatcatttatttctagtcttttctggtagaagctatgaagctgagtttactctctggaaatttgtagtttattttctagaaaattgcattttatcactgcaaaaaggattttatttccaaatgagtaggcttttgagcaagagttttggagtcacagagatggggttaagaaagtgataatgtgcaatggcgattctcaagttcaaggagaaaaaataacatgcttttattgggatactttgcttgtctataaaagaaagtagctattggcatttatgtagaagtcagcagtttcttggcaccaaataaataattttgtgctgaataaagggagagttatccatagtatttattactaaccaaagaaatgcarggagaattgtaattcattaggttttgatggccaggaaagccaagctgtgttattagggtcatgacaatcacagacattacggatggctgacctgtagtatggatagagggcagagggtagagtgtgaaatatatcacaraattatgtcaaataatctggatagttactactgcttaaaatctaagtgcacagctagaaaagtgggtagtgacgcactacagtcttgctgaacactgggtaagaaaatcatagcaaacgttgagtctgttttggaaatgttctaaaaccagactattaacacagtgagccattttaaatgtggcttgctacgtgtttggagagaaacacatactcttttattaggaacatgaaacaaactctttgagccgcagtatcactgcgagtgagtttaattgctgggattaataaatcacagctgcaaacgttaaattcttggcaggattctttattcagctgttttccccttgccccattacattccagatttgtggtctgcattatgtctggagccagaagtaagcttgctcttttcctctgcggctgttacgtggttgccctgggagcccacaccrgggaggagagcgtggctgaccatcacgaggctgaataktatgtggctgccdtgtatgagcatccatccatcctgagtctgaaccctctggctctcatcagcygccaagaggccttggagctcatgaacyagaaccttgacatctatgaacagcaagtgatgactgcagcccaaaaggcaagaatgctcctcggaacctgagtttctctcatacagagcagattgctctttaccccttgatcagtggttgggtaatcccaggcttcctaccaccctctgaaaaagcatccaggtagttaacctgagttgagttagtcagttgaattaggagccttacccctcagagagtggtccgtggaccggcatcccctgggagcttgttagaaatacaaaatcttgggcggcaccccagacctactgaatcagaatgtgcattgcagcaggatccccaggtgatgctttcacatggcaagtatgagaagcccaggactagatccccagttctcaagtgtrgttgtacataagartcacsaggyaagtggtaaacactatggctgcccgggtcctggagagtccgttgtaattggtgtggaaggggtgtggactggcactgggattgttttaaggctccccagtgcagtctaatgtgcagaaaaatttgaagatgactgggcgtgatgacctctctgagtcattcgaagcttcactgaagtagtaagcatctgcaagaatgccgtttgctcccttcagactgtttgaggctcgtttccggtctctatgtcggactacgatcagtctgagaccttcgcccagatagaactgaccccaaactgacaaagggaaggtcartgccagcctttgtgaaggcttcctggttggcctgaatttcctgctcccttcaggaagggtggggacaaaggagaggcccccctgggggcaaagagggaaatatcagaggttgcctaagaaaatgccctgctggaaaacacaaacccgaagggaagtttgggctgtaactctggtggcagggtgaccaagcgcagctgcttgaggaagccctgctgtgcctcaacaggatgtaaactcattgtgagcaacactttcctgctctctgtgaacttaaagggcagaaccagcaggtcctgccccaaacagtccctgccttagagcagggtggtcgggatggcctggacagccacagcaattaaaaaattgcaacattttaaaattttagtctataatatatatacaaaggctatgtgtatggggtgggggggtgtttgggggcagggggtgtgtatgtgtgtataacatgatgttgaaagggaacttgaagacttggtccagcttcttttttttcaaccaagaccaacttttgcaagggtgacacttttctttagtcccaacctgacatacggtttctccttgaacaccttcagtggctcagactcacaggtccgtttgttccaatggtgggaacttctgaacaggtcttcctttcaatgagcagcagtcagcctccccgtaactgccaccacgattctatcgtcagagctaaagggagcaggaccgtgtcccttatcacggcatgccatcttctccacctttgaggacagctgtcatgatccccctggcatctgtcccccaggctgtatcctcagtcccttccacagttccttaggagactcagtttccaaaccttctactgaagacttccatgttttctctgtgctcagaactgtatgcagctatcccgattctgtctaataagggcagggtagagaactctcacctgtcgcattctagatgttgtccccagaaaactgctggcagccacatgtctcattatgggtgtataaggcacttgctgtcaactaaaacaccttttcacatgagcagacacacatgctgccattgccatcctgtacttataaattataaaggtgattgatttaagctgagggcaagacttcacatttatgctgttaaatttcatcattccagcctgttgggctatttagggatctttactgacatcccaagtatcagttacctttacgtcattcacacatatgatacacacctcatttatgtctatgctgaagtcagtgtaaaaaaaccccaggctgtgccctcagacctcctgatgacactgatctcctagagggcaggcattctcttgatagagatgtttgcctgcatggcactgagtccagcacctgaaatgtcatctgcctcttgcttccctcccctatccaccggaccattctgagacatttggcaaatgacacactgaaacccagactgtggctgtagaattctcctgcattcacctttcaataatctgcccccagaggaaacacttaacacggttttgttgaaaccacgccagctgcacagcatcactccgtctctatttgttttccaggggccaggattaagctgttgatatgatcacttttagaatttacagatatctcagctcccatacgtggttatatgttttttrtttgtttgttttccagcagcacttttatttttccttacacgatgacatgttgctggggcctattgttctcacataacagtagaaaaccaaaatttgttgtcatctcttcaaagaatcgagaattgcatacagaaaaaccttacataaattaaaaggatgaatacatttacaggtgtaaatgcaaaccactttcaactcagacaagtaacagcccatggtgttctggcagaaaacatcagctaagaaaggaaactgggtcctaagtcttggactttccaacccttacagaccggcagaacagaaacaactggttcaggagcccttgccagcctccagagaaatcccagaacacgcagccctgacgtattaataccctgcacagatcagagactgctggccacgcagactcaccaagccacagacttgtcttccacaagcactttcttatcttagccacaaagtgaccaagccacatgtactaagggttgaaatcaaagatatgtacagggtattaagcaaatctggttatatgttttaaaacaacttytaagacaaattgatggcaagtttgtgtgaaagttttatatcaaagttgttataagaggttcctgagcaaaccaattgaaatacagtcatgcattgcttaatgacagggatatgttctgaaaggatgcatcattaggccattgtgtcattgtgcatgcatcatagcatgtacttacacaaacctacatggtacggcctactatgcgcctaggctatatggtatggcccattgttcctaggctataaacctttacagcatattactgtactgaacactgtaggcagttgtaacaagtggtaagcatttgtatatgtaaacatagaaaaggtacaataaaaattcagtattataatcttatgggaccaccatcacatatgtggtctgtcattgaccaaaatgtcatcatgcagtgcatgactatatttctgtctcagtaggggcattcatagggraaaaacggagtctagtttcaagatgattaggctgggcagtcacttgggattgtaaccttcattcctcagaaggaaggggttcttgatctcattgagatctaccagaaaattgctgaagccatttatcaagaatgcaacttacttcctagataggattactcatcacatcagacccaaaattttgcccagctcaggtttggttcctctcctcattcctggttgataataatctagtatgtatacataatttaaatgttattctccatgaaaaaccaaagttttgtttttaataaagaaaaatgtctatccaaatataattttcaaaaatctgaaaagatgactcatacaaatatagaatgaataaagcttttatttaattcattaattaaggaaccagtaagatggtaaagctggttcaaaggaaaattcaaggaatggaaatgtgtatatcagtcagtccagtgattgttgaaatgaatttcctaatagatgcaaaactgggtaatgtcctatagggcaaaacattgtaatctttgaggtgatcttttaaatagcaaagtcaaacggtggtacattctccagctaattaaagaataattgagtgagcctattaaacagtaccctagtataatttggaaaggctgcatctccatcttgccttatttttaggtttgagataatttttctttacatggtcattgctaagtgtgcaatgagatgatactgtactggaaggaacatacattggtatagtatttctggaaagcagtttggcagtgtgtgttaagaacttaaaagtttaatttttaggccaggtgctgtggctcatgcctgtaatcccagcattttgggggtccaaagcgggcggatcacttgaggtcaggagtttgagaccagcctgatggtgaaaccccatctccactaaaaatacaaaatttagccaggtgtggtggcgcatgtctgtaatcccagctactcaggaggctgaggcacgagaattacttgaacccaggaggcggagattgcagtgagccgagatcacaacactgcactccagcctgggcgacagaccaagactctctctcaaaaaacaaaacaaaamttaaaactctaatttttawaccctttgatccagtaatttcacttgtaagactttattccaaagaaataatcaaaagatgcaatcaaagatttgtgtgaagtgtataattatgcaataagtgttttgagcacactatgcagatggtcaccacagttttctttttattacaaaaagttgggaacacttcaaattccaataatagaggataaattatggcgtcctcttaaatatgatgtggccccattacaaatggatttttgaaagttttttttttttccttttttttttgtggtggagtttcactttgtcacccaggctggagtgcaatggtgcgatctcagctcaccgcaacctctgcctcccgggttccagtgattctccagcctcagcctcctgagtagctgggattgcaggtgcccgctaccatgcctggctaatttttgtatttttagtagagacggggtttcatcatgttgggcaggctggtcttgaactcctgagctcaggtgatctgcccacctgggcctcctgaagtgctgggattacaggcgtgaactgccatgcttggccgtattttttaaagttcttaatgagggaagtcaagatgtaaaaccatatatttattattatctccattatatacacacatacatgtatacagagagaaaaagtaatgaaaataaccaaaatattaacaataagtatctgtgttatagaattatgattgttttttcccgttttccaaattttctacagtaaaacttttgaagcttttataaccaggaaaaaaatttaaaagtttgcaatgcattccaraaataagtgtctcaaactttgctaatttgaattgttcatgccttctctgcctgccttctccaccttcctccctggggctggtgttcccggcttgacattttaaaccctgtaagtggagagcagtggaagaatgatgccccagccctgagagctgagggcggccctgtttgtattttcttaggttgctgtagatgtcacagggagttccgggccatcacagccagggaacacaggatgttgccaggtgtgggaaaaggcctttagggtggtcagagtcccgaagggagcctcctaattcccagttggggaatggagatttcaagcgagttcttgtttccaggctgagatgagcacacttgcctcttacccactggcccagtggatcctaaccttggctacaaatgagaatcacccgggggacctttaaacaaacactgttgccactatcccacccacagtcaatcaaatcagactttgtaggggtggtcccggcatcagtggtttttcagaagttcctcaactgatttaaatgcacaatggaagttgacaaccaccagactgaagataccacgtgtgttaatgggcccaatgtattcaaggcccagtagttggccccatctcccctggtatcctaagaactctaaatcctttctagctattcgcttgtcaaactcctgagcttactttcaatggagcttacacattccctccttccctcacatgaccccaggcacagttaatggttgttcctagaggactttgtctttgttccttggggatcaggtggagtgagacagtatccccaagactaagatctctgaggagagtaaagacaccatctctgtgcctctggttcctgctacagagtaacttcctgatggttgccaaaagaatgaacagaagaatgaatgaatgcagcggttcttcctgccatctgataacagactattctttgatgttttcattttcaggatgtacagattatagtgtttccagaagatggcattcatggattcaactttacargaacatccatttatccakttttggacttcatgccgtctccccaggtggtcaggtggaacccatgcctggagcctcaccgcytcaatgacacagaggtgattcctgcctttttcctcagtaggctgagggtacacagaggtgatctaagtcagggaccagaagctgtgacatgttaactaagattgataggagaccttaacatccccaaaatccaacccaaactcccaaagatccatgtgccacaygttcattccattawagaatgtctgacgttacaaggcagttattcatctatggatctttccatttattaattacacaataaatacaggaatgtatacttaaaccaaaccaaaagtaaaaaaagaaaagttcatcttcaccacagcctgcacctcatcccatgcccttgcttagagaaactgccatcaacaatttgatgtgcattcagttgtattcttttctatgcatttcatagttattgacatcctcttttttttttttttttttgagatggagtcttactctgccacccaggctggagcgcagtggcgcgatctcagctcactgcaagctctgccttccgggttcatgccattctcctgcctcagcctcccgagtagctgggactacaggcacccaccaccacgcccggctaattttttttgtgtgtgtatttttagtagagatggggtttcaccatgttagccaggatggtctcgatctcctgaccttgtgatctgtctacctcggcctgccaaagtgctgggattacaggcatgagccactgtgcctggccttgacatcctctttttaagcatactatatgcttattcattttaaatttttgctattatatttttgtaaacatgttcaagtttttctgtaaaataaaatttttagaaatgaaatccctcaggccaggtgtggtggctcacacctgtaatcccagctacttgggaggctgaggcaggagaatcacttgaacctgggaggcaggagttgcggtgagaaagatcgcgccactgcattccagcctggacaacaggagcaaaactctgcctcaaaaaaaaaaaaataaataaaataaaataaagaaatggaatccctcaaaggatatgtacattttaaattatattaaagagtaccaaatttcccgcttaaaaaactttgatttcactttacagccccagtcatacagtatgagtgcctctttttccatcctttggtcaatgcaagatagaataatcttttgagcctgggcacagtgcttcacatctgtaatcccagcattytgggaggccaaggctggtggatagcttgagctcatgagttcaagaccagcctggccaacatggtgaaacctcgtctctacaataaatacaaaaattagctgggtgtggtggtgcatgcctgtagtcccagccactcagaaggctgagataggaggatggcttgagcctgggaggcggaagttgcagtgagccaagattgtgccactgcactccagcctgggcgacagagccagaccctgcctcaaaaaaaaaagaaaaagaagaatcttttgaatttttgccagtcttatgaaggtgagaaatgatagctatttcattgttgtaatttgcacttctctctcactaatgagattgagcatcttttgagatgttygtgggtcacttttctttgtccttctgtgaatcacctgtttatatcctttgcacattttcagtagtggttgcttttttcttattgatttatgatagctgtttattatggataaatataagtacttttatatttaaaaattgtgagagccaagtacaatggtgcacacctgtagtcccagcttcttaggaggctgagacgagaggattgcttgaggccaggagtttgagtccagcctgggcaatgtaacaagaccctgtctctgaaaaaaaaaaaaaagaaaagaaagaaaaaaaaaagaagaggaagcaaaaggaaggattttaaaaackcatttatttaatttatttatttatttatttatttatttatttatttatttattttgagacggagtctygctctgtcgcccaggctggagtgcagtggcgcgatctcggctcactgcaagctccgcctactgggttcacgccattctcctgcctcagcctcccgagtagctgggactacaggcatccaccaccacgcccggctaattttttgtatttttagttgagatggggtttcaccgtgttagccagggtggtctcaatctcctgacctcatgatccacccgcctcagcctcccacagtgctgggattacaggcaaaaacctcatttatttacacctttttttcctctaggtgctcyagcrcctgagttgtatggccatcaggggagatatgttcttggtgrccartcttgggacaaakgagccttgtcatagcagtgacccaaggtrcccaaaagatgggagataccagttcracasaaatgtcgtgttcagcaataatggaacccttgttgaccgctrcygtaaacacaacytctactttgaggcagcattcgatgttcctcttaaagtgkatctcatcacctttgataccccctttgctggcaggtttggcatcttcacatgctttgatatattgttctttgrccctgccatcagagtcctcagagactacaaggtgaagcatgttgtgtacccaactgcctggatgaaccagctcccacyctkggcagcaattgagattcagaaagcttttsctgttgcctttggcrtcaacgttctggcagctaatgtccaccacccagttctggggatgacagraartgrcatacacacccctctggagtccttttggtaccrtgacatggaaaatcccaaaagtcaccttataattgcccaggtggccaaaaatccagtgggtctcattggtgcagagaatgcaacaggtgaaacggacccatcccatagtaagtttttaaaaattttgtcaggcgatccgtactgtgagaaggatgctcaggaagtccactgtgatgaggccaccaagtgraacgtgaatgctyctcccacatttcactctgagatgatgtatgacaatktcaycctggtccctgtctggggaaaggaaggctatctccacgtctgttccaatggcctcygctgttatttactttaygagaggcccaccttatccaaagagctgtatgccctgggggtctttsatgkgcttcacacagtacatgrcacttactacatccamrtgtgtgccctggtcaggtgtgggggtcttggcttcgacacctgyggacaggaaatcacagaggccacggggatatttgagtttcacctgygggrcamcttcagtacttcctatatctttyctttgtttctgacctcagggatgaccctagaagtccctgaccagcttggctgggagaatgaccactatttcctgaggaaaagtaggctgtcctctgggctggtgayggcggctctctatgggygcttgtrtgagaggsactaggaaaagtgtgtggtctgtggggcggactctggccatcatgttgacagccttgcacttccacaggctacaagccctgggaccatctttctgccttaagggcaggagcccacttctgtggcaccagattccaccctgggaactgtggaaaaagtaggagaggcagattccctcagtgtcttcctcttaaacctcaatcatcgagacattagggggtattttctgttcacatttatctttttcaagccacatcttcctctaacaaatctctcagtatgcgattggtctcaagctaaaacaaaaataaatgtcagtttatattttacacatccacaaagcagtggcttggggtttttttttttttttttatcttgttgatcaagtgacacccaggacatgtaaatatttcataagccttaaacatttcctgaggtaagaaacaagctctcaaagcaaaagctcaattagaaatggcccttgtggggaaccttcccattctggtcgaccagaactctagccagatgaaatggcaatgctagcgccaccagcaacgtcagaaacgtagaccttaaagcggcttttaaaaatagaaaagaagcgttcctcacatctgccagtaatggaattttctgtcagtaaatggaatgtgtaggcaggacctggaataactggagagagtgcaacgcttcggggtgaagggcgggtggggactggaaatgttgagacgggggcagccatgggaaggtatgagtaatagaattctttctgtacgacacagctcatccagggattccagggaccttaataaatcacggtagctttgggcaagagttgggcacgttgcccgactgtgcaggatggattgatgctggtataatttgatctggagccctatagaggatctcgttgctttgcagcgatgcctggcaccccatagagataagttgcagggactgccgtgaagggcatgaagggtggcccactttagtcatgcatttattcaatcacccaacaggcacagagcaggagcttcccatgttaggaattccagatgcaaaattatcagactcaatatggtgaagacatttttaggccactgatttctgtgtaatttgtgtccaatatttcaaagccatttaaaaaaggattttgactgcatgcctagtagctgtttcagatcattttttaagtacagaatggataattagtcttcagtgatttgcctcttaaatgtggccatttagtttgaactcctttttagttattttaaacagtatatgcttaaacatcacacgattttataaagcaagaaaaatgaaatgatctccctattcccccacggtgtaggcctccagatccttttctggcttttaggcaggacaattaacaatgtggattctgcagtcagactgatggggtttccatgcatggcctcaccattaactcctcactggggagaccttgggcctcggttttttattcatagaatgcatgttgaataaaccatgtgggaaaaagcagagccagcaccagcccctgctgactcactgatccctcggaaaggtctgggatgagtcaagtcttcagggaataagcagcaaggacttggaattcctgagcaagccttgggttccccacgccctaggaagtccctctggaaggggagcaggacctctcccaccagatgacggagttygctttctcgcccagcgcagctcccaccaggcgtgagctggcagtccagaagcggccccagatgtggctayccaccgcccagtctgcttccctgcctcaaaccccarggagacagaaattacctaaaaatgcatatcattgccttatgccaagatgattcaaataagcctgagaaagagaggccagcgctaaatacagacttggcagaactacttcacccagtaaacatctaatcagcacctgcaggatcctcattctgcccttctgggcagagcaccacgaactttccctgagttattttctaccaacaatttagaatgaattgctcgtgaagtagaaatgaggggaaaagcaactaatggtggtagaacaaagtaatttttacaattaaaagaagtagctgccagatgacagaacaaagtagaggacgagaaaataaatcattttcagggaaaaaatatatctatgactaatggttgtgattatgtttttgtcgattgtgatcctgaaactcaggaagcaaatggcaatcttgaccacaacatggagacaggaaatcaaatgcatttttggctaaaccagacttgggggaagtggcttggtttgcrtggtttctcatgtaggtgcagctgtgcttttctgtggtttttctcacacgggaagtgagaggcacagtgagctgtattcacactggatttaaaagccctgttcttagagaggaaaaaaccaggcctcctcacagactgccaagtcccagagcccaccatgtctgctctcaagacacaggcctgtccagagcccctgctgagggaaacccacccaggccacttttccccacaggtggccctgcttggtacctgtgcccccaccccccagccatggtatattgaaccaggaggaggcacccagcccaaggccagccaatcagagcactggctagtagcccaggaggtgtccctgcacagaagatctcctcagagaggaccgatggtgagtcggccgctcttgattctcaatgaaactcagaaccgctcaagtgaaatgaccactcaaagaacaatttctcaacaaagtggatttatataggacaaaatagaaaggcataaaagtatgaaatgttttgtgcacaaaggcctagatttgagacaagagctgatgtggcctgaagatctgtgagtgggactgcttgggaggccatgttccttctcaggccagagaaaggtcctggtctcctggcttcagtctttcattccctaacctccctttgaatgttagttacctattcccacataacaaagtgccccaaaacttaatggcataaaacaagcatggacattgttaattcacccagttctgtggggcaggaaagcgggtctctcatgaggctacagtcaagatgtcagccgaggtgacagtgaagatatcaaccaaggctgcagccggttgaaggcctcactggatttggagaatattattgattaaattgcatcttccccaaaaaagatacgttgtagtcctaacccccaatagctcagaatgtggccttatttggaaatagggtctttgcagatgcaatgaagatataagttaaaatgagatcacactagagtaactgggcccttaatccaatatgacatgtccttatcagaagaggagaagacacacacacagggagaagatgaccatgtgacaacaggggcagagatcacagggatgcctctactagacaaggcacaccagaaattgcttgccaacaaacaccagaaattagaagaggcaagaaacaactccccacacacaacccacccctgcaggtttcagaagaagcatggctctgccaacaccttgattttggatttccagcttccacaactatgagacaataagtttctgttgtttgaagccacccagttcagggtactttgatatggcagacctaggaaacaaatacagaggatcacttgcaaaatggcccattcacacagctggcacgttggtgctggctgctagcaaaaggtctcagctcctcaccacttgggtctttccatagggatagctgagtgtcctcatgatgtggcccctggcttcccctgaagcaaatgatccaagagagcacaggtggagccatgatgtcttttattaactagtctcagaagtcacactgcatcatttggcaccatcttattgagttacacaggtcagccctgctccctatggaaagagacagagggtgttagatgcccagaggtgaacctcactgggtaccatcctgcaggtgggctgccactctgctcaatccaaatcacagctctcccgtttctcacctcccaacagttgctgttcctcaggccaaagttcacattctgcacagcctcagctccgcctgacctctgagctcacatgatggcccttactgtgaacctgggtttctggtccagccatagctacttctttaagctcctccagtgtgctgagcacagtctggcccctgtactgttgtctgcttgaaatggcgtcttctgatgaacactcatccatccttcaaggtctactctctcatcacagcttgtgactcttccactttttgaactggtgtttcccattcccagttcacagagccctttctcattgaactatttatctgagttccctctgccggaacatgagccatgcctagagtagccacctagtagtgagtgacagctctgtgctggatgcacataaatggtctcccttaactgccatgagccctaaagaaggtttgctacagctattttacagatggggaaaactgacagagagatattaatgaattgcccacatgcaaatatgtgctgagtcttggatttgcatctttatcgtgactccacggagacccaccctctaagaccagagccagtgtcctattcatcttttgtctctgcagcgttcagcatggcactgtcttggcttacaaaatctgctctatgcttgctgactgctgaatgaatgaatgaatgaataggtagtcacaaagaatgtttagaatgtttctcagacaggctgagaaaaaacacaacgaaacattatttccgtttggaaagtttttttatttttgtgttcagtactgaagtaaaacaaaaatctgaataacagctgcaccgttaaaaatgaaattaccaatatatgaactctaggcatcatgcatatataattttttgtagataacttttcttctcattttccttctcattctcttcatctttttctttttgtttgagcaaaaaaaaaagaatatattaactcgtaactggggagtctaagaataaattctcttcagccattgctgaatctaggggctcaaatggtgtctctggacacagtatcacactctactctgcactcttctttatcattttctcccacagacagactctcgtgtagttgcaacaatggccatgacttctaggcttcatctgcccctctcagcagctctagagaagaagctcctctttttacacagtccctaattaaagtctcagagatgaacaacctgggctcttgcttagggcacgtgcccatcctgaatcaatgatcggccagagagctgtgatattcttttgtttttttgagatggagtcttgctctgtcgcccgggcaggagtgcaatggcatgatctcggctcactgcaagctctgcctcccgagttcaagcgattctcctgcctcagccttccgagtagctgggactacaggcacgtgccaccacgcccagctaattttttgtatttttatagagacagggtttcaccatgttagccaggatggcctcgatctcctgacctcatgatctgcctgcctcagcctcccaaagtgctgggattacaggcgtgagccaccgtacccggccagggctgtgatattctgatcagccagcactgagtcacatggccactattagggtgagggatgataggcttagctctgacctgaaattcatggattgaggggtggggactgtttcccaggggaacactgggacagcgttaccaggggaaggggagtgggatatagttgggccaaaacagtaaatgtccacgaggcttttttcctctgagcagaaatttcactgtgatgccagtcaggtattgctgccgtaagggccatagcaggagggagactgcaaatcttgattgaggagatcttaagaacagagtgatttacacagctgtgggcaggatgtaggggaacccagaaaggataatgcactacccagcggccagcgacagcaggaactatgagcaccccaggcctgaaggtgtgaagggctgaaatggttaccagaagcaggagagggaagcttatggagagagcaggctggcgggagcaggggctgtgagagagacagccagaccgtagcggtgtgacaggcagagagccaggcgatccatatcctgtctcctctctcttctccgctcctgactcctgctgcggcttcccactggctggacccaacaggaaagcagaggataagagaatctggttggtgctatctagaagtcagtgttggggaggtcacagaacagaatggagaggggtagagtatgcagggaagataaatgcagccctggcatggttcttccagaacattctgcaagctcatggacca

SEQ ID NO: 95354 - DNA, 13507 bp, Homo sapiens
gacactatctctatcttccaaggctatgaaacattcaatccttgattacatagtctggaacaaggaaatttaagagactcttagagaattgtctctcaacagagtttagcctttagtaagagcttggacacctcatccattttaaatggtagagggtgaggggtggggaagatagattattggaaaagattctagtacctcttttttgcttacttttatttttttccctagcaaatcaatagatgaaggtatcaggtaaaatttaggagtgggcatcaagagtatatggtttaaagagagatagagctgcctagaagagaaggagagggttggccaaggaaatgtagaattattgggtactgctgaagacactcctatagtgtgtgatcataaatttaaccagtcaacacaattgcgattgttttatccaggttcatttcatgcttaagtgcagggaaaggtcacgcagagagttggctttaaccaagattggagtttttttttaggacagtatgatggagaaagaatgtggtaagggccttaggggctgtacactgacaaacccttaattagtatgaatacagtcatggaccatggaatctaggctggataaaaaggacagtgaggaaaggaagccccatgaaaaattgatgaggccaaaggatcagagttcctgctaggattaaagaagagttagagtgtattagaataagtgaactaggaagatagaaggaggtagtcaaataatggaatgcctaaaatcaaggttttagagtaatagtatatgagcatgggagtgggtagctaaggtggggtggagaaaaagatcattagagatgaggagtcaagaaactgaatgaccagagtgtcagatgtatcatttagtgcttgttgaagtcaccaagaataacaagtcacagtggagagacagggacctgtatgctaaaattttgaatgaatgagaggaaatgactgaaaggtcagtagatgattgcaacatagaggggtggcaggtgccattgactgatggcaaactattcctttatttaataaatatttatttacatatggccaactaattactgtggggagaacaacttaccacatcctcaaggattacatgctaattggaagataatatactcctccatcaaaaacgaaacagtaaggcaaacattgcagtatggtgaggcagaaataccacttgcctaagggtcagaaaatccgatttctattataagttccagctttgtcagtaattagctgtgagcctgggtaaatcarttaaccycattaggcctcagtttccacatttggatacagatgagatgattctcaagcttctgcagggcataacatttcataattctatgaaataaaataatagctatttcacacggaaattggggagaataaataagcacgactgtccagattttacagacagaagaacatgaaccacaaaggactacataatttgtccagcatcagaatgtaaagtcaggttcattgttgtttgtgttagatcatataatgcagagcagatggcctaatctgtgttggtgtttgtccactttcctaaatttttgtttgtctttccgttatctctatttggttctagctaggtcatgattgcttatgtcaaagaaacaaagaaaatacgacaagaatctgtaactgtaacaatgttgtttaacacaactttgaatacatttttacaggaagcaaagaagtgtgttgccctctaggaaatgtgtgttgctctgatgtaattaggttgacatacgtttccctggtagccaatataaggaatgggtccactaacccttgatatcagaaaattctggggttggattagatgtcaaggttgggaaggatattatttgggtaaaggggttcattaacagtttttccactataatgaatttttcctttatagctgtgatgttactcctacatttttgaatatgtacaagcatattcagtgatgctttgagatccaactgtatgctgggtactactactgtaaggactagtggctttgtggagagcaagagagctaaggtatgcgtcctatctccttttgttaatatatactgaatggcaaagatagacataaacaagaaaatgaataaataagatattttttcagagcatgatcaacattatgaagaatataaaacagagtaacaagatgtctcttaccatgttttgcattccccgcatttagaaaataagtaccacaagagttaggaccttgtctgttatatttatcaatgtatccactgtgccttggttagtgagttttggttgtggacttctttaggtaggacagtcagaaaaggtatctgtaagatgccctgagagctgagaagtagaaaataaggaattttcagccaaagatctggggaagagcaatgtaaaattcccaaggaagcaacaaattcagcatgtttaagaaacataaggaaggtcagtgtggctggaaagttgtaagggtagaagtttgaattttaatttaattactgtgataagccactataggtttttttttcctttctttcttttctggtcatgttttcttcctctaattttatttccttttttctctaaagaattttagtcagggattttaaatgaccttatttttatctttaaaagtttacccagacagttttgtagggaatagagtgagaatagcatgagaagaagcaagagatcagttaggagatgagtgttgataatgggctggtgcaggggaagaagtattgagcagtaattgagtttgagatatattctagtaggctgtgtgtggtggtgctttgggaggcccaggtgggaggataacttgaggctaggagtttgagagatacattcaaaagatagaacaaacaggatcgttcagctgttgttcttcaactgttgttcgacagctgattgattggatacggagtgagagaaaaaacaagaaagactccattgctttggtctgagtaatttggtggtagtagtgccactaacagggaaactgggagaggagcagagtttttctagggaaaatcaagcagttggttttgtccatgtgaagcttacagtgcctgttagatctccaaatggatatgtagataaaatggttgatatatgagtatggcaagatgtcagaactgaagatattatcctcctgtgagtcattggcatttagatgctatgtaaagctacaagactgagtgagctcatcaagggagagcatgttgatatgagcagcaaggactaagccttgaatatttttgcctttgaaaaatacagtattctatagactagaagtacattatttaccaggcaaatcagccagttttaaaaacccactttgtcttcctctctcagcaagtagtgggaggccatcttagaaggaagctatcctggtgagaagctctaatcacacagcagcccctgggacttgccagtatgtcatcagatacacaaagaaagattctggttccactatgcctctctctcatcctaagtcttccctgactctcccaggccacagtgatccctccttctcctaactcttcttcctcgttactttctggacctttgcagactttcttcctggtggtgtagctacttatgcagagcagatgctctaatatgtgtctgtttatctctatttatacaaagtttgtatttgtcttcttgttatctctaactaggcaatgattgcctatcacccccgctttcaacaacattataatttcctcaaggacaggatattcttacatgtctttctatcccttatcatgttctgtatttccccatttggaatgtaaataccacaagagctaggattttgtctgttatgttcatcactgtactcttgcagtctgaaacagtattcttgaataaacgcaaatagaatgaaggaatataaaagctgtttatagttgtctagacagatgataaagtgccctgcctaaaagcaagacttttacccttttccttggtagacataacctccacttttggtccccttttaacaccaccatatgcagaagtgtttcacttcatatcaccttcatggaatcttcccacaggttctgctgatgctcaagtaggtaagaataggacatatatttatggtctgtagaatgcatgtatgtagttgggatctgtggtagattgtctgcaaagatgaccatcaacaatttcgttcatctttgtatatgtacattgctcttcccaacaagagatggagtctgtttcctccccacttgaatatagatggccatgtgactagctttggctaatagaattcagtagaagtgatgttaatctaactttggggcctggaccttaagaggccttccaacttccagttttgctgtcttgagatttgggcaccatgtttaagaagcttggccttctggatgatgtaagaccacatggagagagagaagcctagctagcacccaactattccagccactgcaagtgaggtgcaaaacatgtgaataaagccatcttgtattctctagctctagcgaaactatcccagcttcctcaggagtcacgaagcagccaccccatgaagcacagacaagccattcttgaggagtcccaccttagttcacaatcatgacaaataatacttttgggggtgatttgttttaagccatacttttgggggtgatttgttatatagcagtagataactgaaataggatctgtttcaggatttcttttatgataaaacttccagaaatacattgcatttaaaagaagcacttctgcaatttgtagcaaaattatgatgcaattatattttgtcccagcagtcttccttctaggattctatcccaaagatactctggcaaaaacacaaagagacatattggctattcattgcaatactacctaaaatggcaacaaactttaaacaattcaaatgtatatcagcaggggactcgttgaatatgttatgtaacatctacatgatgaagtaatatgcagctatagaaaaggaatgaggaacacctctgtaaactgccgtagagtaatcaccaaggtataaagttgaatgaaaaaaagcaggcacagaaaattatgtatggtatgatatgccattgtttaacttttttttttttttttttttttttgatactgaatctggctctgtcaccaggctggagtgcagtggtgcgatctcggctcattgcaatctccaccttctgggttcaagcgattcccctgcctcagcctcctgagtagttgggactacaggcacgcaccaccactcctggctaattttttgtatttttagtagagacggggtttcaccatgttggccaggatggtctcgatttcctgatagcgtgacccgcccgcctcagcatcccaaagtgctgtgattacagacgtgagctaccgtacccggccgtgtaacttattttttaaagaaaagataaaatataaaaactttaggccgggcgtggtgacccacacctgtaatcccagcactttgggaggctgaggcggatggatcacctgaggtcaggagtttgagaccagcctggccaacatggtgaaaccccatctccactaaaaatacaaaaattagccaggcgtggtggcgggcgcctgtaatcctagctacttggcaggctgaggtaaggagaatcgcttgaacgcgggaggtggaagttgcagtgagctgagattgtaccattgcactccagactgggtgaccgcgagactctgtctcaaaaacaaaaaacaaacaaamaaaaagctttaaaagaagttattaccttaaggggagggagtggatggggtaaatgataacacagaaatataatcttaaaactctagactgtccccgcccctggcctgcccagcccgcggcagcagcgtggccgcggtgcagcatcagcatcagcagcagtagcagcagcgggcggccgcgtgggtgtttttgtcgggtctcggggtctggcagcagcatggcggactacctgatcaccrgcagcaccggctacgtgcccagggatgggctcactgtgccccagctcttcgtcggcgctgacggcctcacccacaacgacttcctgattcttccaggattcatagacttcatagctgatgaggtggacctgacctcagccctgacccagaaggtcacgctgaagacgccgctgatctcctcccctatggacactgtgacagaggctgacatggccatcgcgatggctctgatgggacctattggtttcattcaccacaactgtaccgcagagttccaggccaaggaggtacagaagatcaagaagtttgaacagggcttcatcacggaccccgtggtgctgagcccctcgcgcactgtgggtgatgtgctggaggccaagatgcggcatggcttctctggcatccccatcactagacgggcaccaagctggtgggcatcgtcacctcccgagacactgactttcttgctgagaaggacaacaccaccctcctcagtgaggtgatgacgccaaggattgagctggtggtggctccagcaggtgtgacgttgaaagaggcaaaagagatcctaagtgtagcgagaaagggaagctgcctatcgtcaatgatcgcgattaactggtggccatcatcacccactccgacctgaagaagaacagagactaccctctggcctccaaggattcccacaagcagctgctgtgcagggcagctgtgggcacccgtgaggatgacaaatactgcctggacctgctcttccaggcgggtctcaacgtatagtcttggactcgtcccagggaactcggcacatcagatcaccatggtgcattacatcaaacaaaagtacccccacctccaggtgactggggggaacatggtgacagcagcccaggccaagaacctgacgctggtgtggatgggctgctagtgggcacgggctgtggctctatctgcatcacccaggaagtgatggcctgtggtcggccccagggcactgctatgtacaaggtggccgagtatgcctggcactttggtgtgcccatcatattcaatggtggcatccagatcgtggagcacatggtcaaggccctggcccttggagcctccacagtgatgacgggctccctgttggctgccaccatggaggcccccggtgagtacttcttctcagatggggtgtggctcaagaagtaccgtggcatgggctcgctggatgccatggggaagagcagcagcagccagaaacgatacttcggcgagggggataaggtgaagatcgcgcaggatgtctcaaactccatccaggacaaagggtccattcaaaacttcgtgtcctacctcatagtggacatccagcaaggctgccaggatagcagggcccacagcctgtctgccctttggtccatgatgtactcaggggagctcaagtttgagaagtggaccatattggcccagatcaagggtggcgtccacggcctgcattcttaggagaagcggctgtactaaggacagcggtggaggtcgaggtggtggagggggtgcaccccagtgtccaccttcgggcactgcctccctccataactgagtggtccacagatttgcactacaggttccccagctcctttccagcgagagaggaggggaggtcctgaggggtctgcagcccctcgctcagcatcccctgcagtcaggacttttccctgggccaggctgccctgggagccccctgagcccagccagccagggtctcaggtgcctgcctcaggtctttcttgctgcagcctgctccagcccggcccccaccctggggggcaggcagcccctcctggcttctcctgtagagcacctccctgcccccagccccccaggaaatggtgctctcctggccctgcctctggcccttcccgggccgctgccccctcagccatgtggcacttcttagctcctgacctagaccaaggagtggtctctgcccccttccctggccctgggctacccttgggtcctgctcctcaggcagctcccctgtccctggccctggggaggaggctgccctggtcatggccacctgcctgtcattcctgactcaccaccatccccaggtgtaccattcctgccttctcctcagccgctgttgaaggctttaactttgcatactttgggatcacagttgtgtcattgtgtattaaataattggaataaatcaagcaggtctcaacgcctctaccaaaaacaaaaacaaacaaacaaacaaacagaaaacaaaagctctagaactctagactgtgggaaactatagcacaaataacctagtttctcctacaagtaaaatttaaagaaaacaaaaagggatggaatgggaaccttgtgattaaaaagaggaacttaaggggcattctaaccaattgcaatttatgaaccaatttgttttccaatttgaataaataaactgaaaaagtttgagacagggaaatttaaacactggttagacatacaatgctattaaggaattattatttaggtatgataatgatagtatggttatatttttaaaagaagctttatatattagacacacactgaagtttttaatggatgaaatgatattacactaggaattgctaaaaaataattagatgaattagtgaagttacggataaaacaggattggccgtgagttggtaattaatgaatctggatgattggttcattaaagttcattctattgtcttctttacttttgtatatagagtcatcccttggtatccatgggggattggttccaggaccccctgctgataccataatttgtggatgctcaagtctcttatataaactagtattatttaacctatgcacatcctctggtatactcaattatctctagattacttataataccttatacaatgtaaatgctatataggtagttgttatactgcattgttttttaatttgtattgtttttgttatattatttttattgttttttgaatattttaaaaagtttccatttttttgtttttattattttaattgacacacaagaatcatacatatttatgggatacagtgtgatattttgatacatgtatacaatgtgtaatgatcaaatcaggataattagcatatccatcacctcaaacatttgttatttcttcgtattaggatcaaatattttccattcatggttgaatctacacaaaagcagaacccatggatacagagggccaagtgtatttgaaatttttcaaaacgaaaagttaaagtaaaaaggaaagcctctgagacccagcattttaagggcactgaattcattttcttcacaatatcataccgtacatctattactccaagtaaaccccatctatataaaatggaagttatatctgtaaaaccacgatgagtatttagaactgtctgtgattgacatcatgtcagtgattttgaagttataatgaattttcagaagacaaagcgtttttgttattttgctttgttttgggcttttaaaaaaaaaaaaattccagtgtcacttttgtctcttagtaaaagttttacagttttaattaccatgaatagtctttctcctcttccaaacatgtatcatcattcattcactcaatcaacatgttcttcttttttttttttttttgagacagggtctcactctgtcacccaggttggagtgcagtggcacagtcacagctcactgcagccttgaccttccagcttcttggctcaagtagtccttgcacctcagccttccaagtagctaggactacagacatgtgccaccatgtccagctaattttattatgtttttgtagagacagggtctcactatgttacccaggctggtctcaaactcctaggctcaaaccatccttctgttttggcctccaaagtgctagaattataggcgtgagacaccatgcccagccttaagacttgttttttgagtgactacttttagagctgctggtattaggaaatggtgctgcgagctaacaggagtctgcagccctgcagcacacaactgtcaacatgcaagcccagatgcttacagtaccatggaataacagggctataattgaggtctttgaaaggacatagaaagggcctggttgctcttcccctagcaggagatgggaggagaaatcttgaaaggggatgttagagcctgttaagatgctgattctggggaaagaataccagcagactgggtatagcttattttggagggaagatgtaatctgatgctttttaggttacaaacttctttcattttcaaatacctgttatctcttctctgaaccaaaatgaatgacctatatcagtggttctcaaagtgtgatccctggatcagcagcatcaccattcccaggaaactggctaatgcaactgctcgagctccactccagacctactgattctgcaactgtggagctgaaccagtgacctatgttttaataagccttccaggtaatgttaatacttgctcatgttagagaatcactggtttagagaaaactagtaattgttccataaatttagtttaaagaaggagaaagaagcctgtcctttagccaagtttaaaaaaaaaaaaggctgattacagaggaaattttgagagcatctaaggttaaaaaaaaaaaagtttagcttggctggaggcctggcagaacagtcgttgtggagaaaccagtgcttcacagagagaaccgcaaacactaaactggatagctgctgtctgccactcaggagcaagtgcagactagagacttatggaggtctccagtatccttctctgagataccaatccttaacccaagaaatccaaggccaatagctaagtataaaagttattctctgagagtgagaatacctagattagggataatggataataaagctgtatgaggccaggcgtggtggcgggcacagtggctcatgcctgtaatcctagcactttgggaggccagggtgggcagatcacctgaggtcaggagttttgagaccagcctggctaagaaggtgaaaccgttcctactcaaaatacagaaattatccaggcatggtgcgtgactgtagtcccagctactcaggaggctgagacaggagagtcccgtgaatcggggaggtggaggttgcagtgagccgagatcgccctactgcactccagcctgggagacggaaccagactccgtctcaaaaaaaaaaaaaaaaaaaaaaaatctgtatgatacaatttttgcaaaaacttgtgtctatttcttttaactttttaaaatgtggctactagaaaatgtaacctatgtagctcacattcgtgacctgtattatatttcttttcacactgatctgtaaggcacatataaaatggagggtgggtaggagaaaaaaactgaccatttttcctccaggtctgaacagggcagtgggtgttcagaaccacaaatcatcatttcttatttctgtgtcatttgtatttatattgtgaagataactcagtaatatgagccataaaaattatatagcaaacatcttttatatccatgttcacaaagcagtttttcaatcctagaaattagactttccatcacgggagcatgaattgattggtaaaaactagaacatatactaatacgtaccaacaatagccactcccacttctcctaccttcactaggtcagacatagttaatcaggacattttttatttttatttttttaattttgtgagtatatagaaggtgtatatatttatggagtatatgagatgctttggtactggcatgcaatgtgtaataatcacatggtaaatgggttatccataatcaggcctttttttctacagatctcagacacagcatcaatgtccttatcatctctgctctaagaagctatgtagctattgagggatgcagtcatgatacaaaactaggtctgtttgactccagagactgcatttctttcctacaccatgcagatttccacttaataacaggtgcacatttatagttttatttctaattcagataaataaactgaccttctgatttataagccagtgtcttattaatttggttgatagattttatccctgagagatcaaataccttttgatatgctggcaaacttgaatatctgaccctgacaactgagagcaggactctagtccaggaatagcctgtgcagagcacacatgctcactctcttctcccttaactacagtagacatcgaaaatcaatttctgttgctcttttgtgttgagcctagacatagcctcaaaatactttttaacacagtgctctagaaagctactgccagttgacctgtgagaccctattgatttgctggtgtggatgatagtgacctaacaaaactgcttttctcaacatccagctggctttcctctggtgaatccctgtccttattcccttcttgctacttcccagagagtagataggttctaaaaccaatccagaaggtttgtgtacctgaggaaagtttgggaacctgaggaagaaaaatggcattttaggaagtctagactcaataggatgggaaaattcctataacatgttttttgggttttccagaagcaagctctaaacaggtttctacacaggtctgtttaaattctattatgatctgtgattttgaactcaacaggagtatggaatttaccacaataatagtaataataattcctgtaccagttaggattattttggctgcaaataatagaaattgccccccaaacagtagcttaaacaagatagtttatttttcttacatgtaagtaactccagaggaaggcaaacccagacttgtatggtgactctcaagccattgagaacacagatcccttctatcattttgtcattttaaagtatgtagaatggccaaccttccatttgtacgtcaccttatgggcaaatgtggctgcggaagtacatttgctgtgggaaggaagaaagaggaaggacaagaggatttatccagttctgtcctaagaagttgtggtaggctgaataatggctaccccaaatatgtccattctaattcccagaacctataaatatgttaccttatatgacttattagtcctttttcacactgccaataaagacatacccaaggctgggaagaaaaaggtttaatggactcacagttccatgtggctggggaggcctcacaatcattgtagaaggtgaaaggcacttctgacatggtggcagcaagagagaattagaaagacacaaaagcggaaaccccttataaaaccatcggttctcatgagacttattcactaccacgagaacagtatgggggaaccacccccatgattcaattatctcccaccctggagaattatgggagtatgatttaagatgagatttgggtggggacacagagccaaaccatatcagtgacaaaagggactttgcaggtttgattaagttagagatcctgagat

SEQ ID NO: 95355 - DNA, 27025 bp, Homo sapiens
ccacagtgcctggcctgaaaacattttatcttctaatctatatttattatattactgtttaaaattattttcttttttctagagtaaccatatatctcaaaaacacgcaatttgggcagcaaagaccacagaatagcacagctagaagagacccccattttgctgtatagataagaattcaaagccctggttggcttaagagtcatagatctgtgtttcagtccctacactgctgcttactaatggtgggaccttggggaagataccagatcatctcccccctttccaaaacaatgcctatgctgctgaggtagtggagattaaatgacacattctagagcccagaaaagtctccctaatagtacgtgctcaactaatgggaatacgctccagtgggcaatgtcatcaaggcaaagctagggccaaaaccttgttttctgattctcaaacttgtgtgtgcatgcgtgtgtgtgtgtgtgtgtgtgcatgtgtatgtgcacacacaggcatcagctgtgtaatgctcgctttataatattttacacttatgtaggtcttcgtagttttcagagcactaatttacatgatatcgtttgatcaccgcaacaacacagtaaaattaggtagtagtggtattatcaggccactttacacgttagagaagggaggctgggaaaagctgactttgttcagctccatggccagtcaacagcagaactggactcagcacccacatacctcatgcctccttatctagagatttttccaccctagcaaaaggccatctcaccttaatgccaaagagttttatgaaagttttatgaaagagtttctgaaaagttgttataaggaagagtgaaataaatactgtgctgggggtcataaatgacctaggtaattaacaacctgattagatagggaaaaactgaactttgagatgattgagcaaaagacaaagagaaaacactgacaaggcagttaacaacccaattcaaagacatatggagaaatgggggttggtggacacttcagaccactgtgtaactctttcctgtcagctaaatactcgtcactgagtgtgaaattatttcctgttcactctgcctctgcaacatcctaactgcatgtccatatttcctcagacaaggaaatcctccagttcttcaacatacttcaagcatcagctttactctttagtcaaaggggtatttttaagccccacaatttggatactattgaatttacttaccctggatacttgaatatacaaggcactctagtgttcctagaatacacagagttcagatttcttagtgatgaagagcatctaaaaaaattaccacaaggaaatgaaatgggacccatgactctttcattctcatatctgctgcaccccagtggctgttgctcctggacttcatggtggtgctttaaaactatttataccgtcagatttggagcatcttaaaaacctaccacatctctctcacaaactgacatctaatactctgattctatgaacagactaaaaaaaccattggagtgtacattttaagtgggtgaattgtaaccatgtgaattctatctcaataaaaccgtaaaagaattgaaagcagagtctaaataaagatatttgtacacccatgttcatagcagcattattcacaatagctaaaaggtagaagcaacccgagtgtctatcaacagacgaatggataaacaaaatgcagcatacaatggaatattattaagctttaaaaaggaaggaaattctgacacacactacaatgtggatgaaacttgaggacattgtaccaagtgaaataagccagacacaaaaagacaacaactctatgatttcacttacgtgaggtacatagtgtagtcaaattgatagagacagaaagcagaatggtggttgctagggggtggtggggaggatgaatggagagttgttgtttaatggtatagagttttaattttgcaagatgaaaagagttctgaagattggttgcccaacaatgtgaatacacttaatgctactaatctgaacacttaaaaatggctaagatggtaaattttgtgttatgtgtgttgtaccagaatttactgaaagtagggaggctgtggttcttgtgtaccattgcaaggcactacagcctggattcctgtgaaattccaaatgagcaatgatagaagagttttcagaacctagtatagttttagaagaaaggaatgttcatactctacttattatttatttcaaagttctctgggatgagaattataagccagttactctagacttttctgagattgatactaatatacacctatattgatactcatatatctattgattcatttattccacaaaagttgattggtgtctaggcatagtgctggataatgaggaaacattggtaagacattactaccccctacccccctaggtcttacagtctgacagattgaatcaattgacttggccttgtaaaaaatctcgaatatttgggcttttcataggacttttctttaatgttacttcacacagtcatccataaatgctgcagtgacaacagcagcaacaacaacaacaatctcttggtgtttttatgtacattcttgtatttggtttgattttatttgattctcaacttcaatcttctcttccttttagaatgcaggtttcttgagaataggccagtcttactcacctcgtatcctctaaaaagtctccatagctaacaaaatgccttatacacataacagcaaaacacttttgagagccatgctgagaaaacatagctctatctctagaccaaagtaataactactgattttggggtcctgaaactattccaaccaccaaagcagattgcaatatgataaggaaatatctgtaccacagtttggaaaatatattttaaaatgccaatcgtgattcttccagttgcattgtgtaatgtggtctctttttatgaaagttctttctctataatattgctaattctacagtaagtgtaactctataatatgtgagatttatttgcatgtagaagtttgcttatgactcagacctcatgttatgcattaataacacatttatctcatggcctgtggattgacttatatagatatcacattcaaaccagaagaaatatctagagttgggcagggagtagagaataagcgaggctgttgttagaagtattgactgtaacgatcatgaatagtattgttgttacattgcctattttaagatcctacaatcaaaggcctctaaaccagttatgcattcagatctagctatttaatgaaaacctattctgtacaaagygccactcatatattatttcattcatgcttcataatacatttctgatagaggcattcctagttcattttacagatggggaaactgtggactaaggttgaagaacttcccagtgtttcacagcctccaagtccaatgctgtttccacatataatactcaattttgaacattgtattgtgttaggagacttaacaaaaataaaaataaaaacaaaaaccctgcaagcagtgtatgttggtcaagagttgctgtttctctaaggtccagtaagcccttagctttgttttcctgaactttgagtttcagttgcacatcaagccccagaggtgggcaaatgctgatgctacaagaacagcagcaagtggcagcactcagggcaggagtactcatgctgttctgacattcctagccaggctgttgttcacatggagccatgcccagctcaccaaggacacctacgtctgctgacgcaagtcattcctccctgattaatgaaagtttaatgtccaaggttataaactgctgagaaggcaatagggaaagagctaatttatgagtctgcagttaccaaaatgtaagcagctctgctttagatcactgtcttggaatgagacaaactctccagctacctgtactgtgactctagacaagttacttgccctctctgaaccagagttttgttatgcataaaatgggggtaataagcgtttcttcagagagtcgctgatattggagataatttatgaaaagaaccaggtacatcatagactctcaaaaaaaggatagctattattgttgtataacaagaataattagtactagtagcatctctcagcaggtagaatgttttagctatggttctgactaccccagccctgactcctaacaactttcattacacccactctctattctttcatcaccatccacctcttgttcctccattctcctttaccaaaaatcatagaggatgaaacctcacatagccccaaagctggtcacattggtctgacaaatatggtagcaggtgcttcaatgagcccagttgaagatggggaaaccaggaaatgtgccatcagatactaagtggagtcaagggagctgayaggacctttccctggtctatccctctactatcctcaggacagggcttggtgggaacttccctagccaaatgagcctcaatattgtgtttcaaatacttcaatttccttcaatattcacattcagtgatgaatacttactgttctcagaagcctttgttttcaggaaaaacttgatggtggctgaaaacatgatggctctgcttggagggaaatgcttgttttcctctctctaagtataaatgctcattcacacctttcctggctttttgagaggtggcaaaatgcccaagattgattgccagttacttgtgttacctgaatgaggcccttgtgagtctctgatctaggaaaaacaaccaaaactaaaccaaaactctttttagatcacctagttccgtttattttttccttcattttgttgacatttcaccttttcatccataaattctggtgttacactctgcacaatcaagcatcttagttttgttttccattttatgaattattccagaggaacatgttcatgagaatttacccttttttgtaattacggtcattccatcacttttagatttccctcatttatttgcctcattcatcatttgcctctggaagcatataatatttttatttaccttttctggaattaaatttgggtttcatacttaggaaaaagccctgcagaatgaacccatacccagacagtaccatatttaggggtgttgatggcttagttcaatcactttaattctagtttttaaccaaatttgaagacaaaagtacaaaggttaaaagagaatgggaatacaaaacaatgatttctggcattaaatacatcagaaagcccagctaggttttggaggactggagaagatgggagagacaatgatttttaaaaacagaatgttttgaattttatttccaatttggacaaaattcacacatgggaaattcaaggattcagaatcaatttcttttattgaaagattatttaaatttaactataaattatagaataaattgttggaattgactactaatgatatactgaagataaataatgaaaatatagcattgattacctaatttggaaataataattcttgaatgcctactgcgtacagacactatacaactcacttaatgctcctgtgaaattgagatcccactttacagagaagaaaataacggctcagacaagtaaaaaacaaaaccaaaaacccgtcaccaagttcatgtgttttgtaagtgttacagctacactaacattcttcctagtatcatttaatggaccctagagctccatcattgactagctgtatgacttaagggaacctccttatcttccttgccttagtttcctcatctgtgaaatggagggtctggattaggaactccacggtctaaagacattccttgcagctttaacattctatgagcataaggagtatatgggcatgattttaaggacwggttgtttatgagccaatcagaggtgttgaataaacacctccctactaggtcaaggtagaaaggggagggcaaatattggaaaaaaaaaacatgatgagaagtctataaaaattgtgtgctaccaaagatctgtcttatttggcagctgctgcctcacccacagcttttgatatctaggaggactcttctctyccaaactgtaagtaaaaaagcttcctttgtatacctggacagcaccagtgaataaggggttaataatactactaagcttatagaagggaagattggtttgcctttgttttcgggaaaaacttgatggtggctgaaaacatgatggctctgcttggagggaaatgcttgttttcctctctctaagtataaatgctcattcacacctttcctgactttttgaraggtggcaaaatgcccaagattgattgccagttacttgtgttacctgaatgaggcccttgtgagtctctgatctaggaaaaacaacttgaacactcctatcgttaggttctaatcagtttttgagattcctgttcatttcaactctcaactctcttttcataacaactacttattktagtgatttatttacatatctactgccttatgtcattttctacattctcttcccacacctactggtaccgacactgaagtttctttgtcacagaaacaaacccttggagtattttgcccttcgccttcacccactgctcaaatgaggaaatgcaacagggttggaaacttcacagagcatagtcatcatttgattatgaatttccaaacccttcatgtttgacactttctagaacatttcctgctggccccagacactgtgaagaccctacagcttaagatagtaggaatcaaaaggttgtgtattttgatacatttgctctactatctgaaaaataggcattgtgagaatatgttgcctttttaaaaaataacttctctttaaatagttacctagrgctccattagacaatttggatgcaccagagcttgaactctgctaccctgctattcatcactttagctaaggcacatctgggtagcacccaggcccaggttagagccagagatactggggcagggaatggggaaatgttgaatatctaagaggtcytttggcttcattccaagtttagaggaaagagcaccaytcwggactcgttctgggctgctccgcgtgtgttaaagggcactggaaatcaggctgtcctaggactgccctagatcatcccactgcacttgtcactgggacattggggtggataatgaagctattggcagctttaagcatcatgtacaaaagtgctgcatgcagtgcctagaaatcatgggctatcaataaataagcctcctcatatttgccttaaaaatccatttgtcttgtacatagagaagcaaatgaactttctgctgccttctatttctccaggaattaaatatccatgttacaaataattatgttttcacagaacatcttcaaggaaggcagaaagaaccataccataggattctacctgctattttgctgaaggattagaaatagaattctaagtcataagccaataggatgtaacttgcaatcctagaacatcacaacttagaaggcacatcagacatagtctctctggctttagtttcctcatctctaaagtgacagggttgacgcaggtatctctgaggtcatttgtagctctgtttttctgtggttaccttctgttgttaatacaactttcctccagatttatatacatattacttgttacacatatgtaataaagtgcgtgataaagaatgtataaaatgaaatgtggccgggtgcagtggctcatgcctgtaatcccagcactttgcgaggccaaggtgggaggatcgcgtgaactcaggagttcaagacaagcctgggcaacatagcaagactttgtttataccaaaaataaaaaaaaaaatagctgggcatggtggcaggcgcctgtagtttcagctgcttggtgtctgaggtgggaagatcacttgagcccaggaggacgaggcttcagtgagtcatgattgtgccartgcactccaggctaggcaacagagcaagactctgtctcagaaaataaaaaagaaagaaagaaaaagaaaagaaatgtgagaatctctccaccctaccccattcttcagaggtaactccagagttgttactctttgtttatatagacacaaaaacagtatgggtatatatcattttttaattaaaaaataggaggacagtatatattgcatacttctctgaaacttgtttttcatttaataatataatgtgaacaacttccatcacactgaaaaaagttggcttgagatctgagagagcagaggcttaggagtacggaaatcgttctttgtcattacccatcccaggttgtcctcctgtctccttgtggtgaacattggcctgtgaccctgttttatgattaacagagaggtgacatttgtgctaacgtggtacagacctttaatcccactgtagaagtttaactccctgtaaacagtattagtttgaattatyattttcactgttattctggttgagtcagcatacccagattgaagaaaatagtttagtaataggcagtaaacagaaaaatggaggtcacttaggtgatttttttcattaaaaaaagagaattagtaatacattgcattttatagtgctttgtaaagaatcttcatgtttatcatgcaatttaacaaatatattttgagcaactacaatgagcagggtgctcatagatggcatttgagttacctggcaaagagacaaccagaacagttattatcaccatttaatccatagtaaactgagactcaggaagctgcctgacttgcctgaggttccagctagattaggcagagctggttcttaaaactaggtctgtctgatctgctagcagcaaacctctacataaatgtgtcagatgtttatgaataagtaatgtccatggtgtaatcacccacagcgtaaggtactctggggtgtcatcaaggacattaggagtcatccaaaggccatttttttcatcaagctcactctttcccttgaatggaaaggagtactgccccttatctcaacttgatgccttattagctatttgtccttggataaataatttacactctcttatattctttcctaatctattaaatgggaggggaaaagagcccaaccaccttctgggattattttcaagaaaaattatatagtgcatgtaaagccattagcagagtgcttgacaatacatgatcacttgttgttattattattattgggctgattttcccttttgtttcattaagaaaatatctttctttcttggtaattgtcaactcctttgtacaaatgcctaaactgagagagaaagtttgcaccttgctctgaagatcacacccaggttggcttttttcagcatgatgatctggaggccaggtccaaagctaaaagtctttgactccaatattacagctaatatataaacagggcaaacwtgctctgctggtggctgggacataatgggccttagaaggtcatcttctctagaaattgttgcccactagcttgtcctattaccccagtaacagcattgcagtttcrttcttttggggtaagacaagaacctctgttgaaatggagaggcaacaatgagatcatcagttataccttctcatgaattagctcagtggctactgactttttatatcaagggacagagtactgacagcctaccctgaagggatgcagaaaatgtggagaaatatatttgtcatgaggacaggactggatagggactctgcttcatcctagctgggaccttgaacaagtcagttagcttctctacgtcttagcttgctcattaattaatgaagataatacctgctataattacctcattgccaatggatcasatgagacctgaggtgtccctgggcttccgggaagtaatatgtagacatggagcatccaccctgtgctgagtgtattggagggagagaagattagagaaaggaggagaccctggcattggataggaagctacccaagataatcttcattaccattttttctttggtagsccaacctatgcaaaaagcactctttgtaacacccaaagtgagggctctttgagcttgcattttcaagattaacccaaagtggcatccgaacaggggcaacgatctccttcagagcacaaccactgtggaggctgcttggttagggggtcttcaagccagagtctccccttgctaaagcagtgaagctggagcagggactgccatacaactttagcatcctcataggcagtgagaaacccaagcccagaggcacttaggaaacatcctctctggtctgccccaagtggtttcatagagggttgaatataaggaaaaggaaacttgcacccaaccctctgtagcccgaggccaaatggaagttagctttaagactatgtatagatttctcctttcaagtttgtttcctggagaataatctgttggaactacagactaacagagcaaagcagaggataactgcagaggtcaagagcgacattgtcctggcctcaagccattaaggaaatccagtggcaccaggagtccacagaatagagagacagtccattactgcagtcccctctattagtcatattttagtgggtcactaattagctggttcagtgttttgattagtgattccaaaggcctgctggaaagcattctgtctaggatcaccatgaacattcagtaacccaccttcattcattgcagctaattgcaactaataagtgatgggggaaaaacaaacctcatttgcttatccacctgtggaaatgggtcagaggtgtcacagaggtctgcacagcatgtctgcacccccaactgtcttggtcatgcatccatctgagccacccatggttctgtgcacaactctcgcacactcttttccagacctgtcaccayggcccacygatttccagccctcacccaggagcagaagaaggagctctcagaaattgcccagagcattgttgccaatggaaaggggatcctggctgcagatgaatctgtaggtgagtgtaaaaagcagtctcatcatataacaacatattattttttctacacttagcaaaaacaacttgataatcatattctttatggaagtaaaggtttatgtacacgggagtgggagcagaagactcagtaagcgtagagcttttgagtcctgtaagtagtaggcacattcctgaaagccaaggaaagaggctcaagcccttcattttaagccaggggtcatttgaatccagccttgtagtaaggccagaaacttagtaactagcataaggtcagatacacaggcatctgctactagtgagaagtcagtttaaagtcagtttaaattcagttgagtcaagaagggcaggaaagtatctgcatctggaataggacagggcttatggatgggagaacctcaggatggcacaagggagagctgtggcagagttgcacagcctgccataaaatcacagaaccctgagaatcaagagcatgccccatccctccttctgcatgtacatccagcaagactgaggaccagatcagggaggctagagaggcctgagggccttccatatccacctggacctgagggtggcttccaccctgacctctatatgcccagcccacatactccctaactagccacctgagagcaaccagggtcttctccctggaacacaaaaaattgaagcaggagctttgactatctgaaaaaagaaagtcttgctttccactgtggtgagggtctctgagatgatgtggagaagggtgacaggaaagccctggcttgctccttatgctgcccttggccctcccaccataggtaccatggggaaccgcctgcagaggatcaaggtggaaaacactgaagasaaccgccggcagttcygagaaatcctcttctctgtggacagttccatcaaccagagcatcgggggtgtgatccttttccacgagaccctctaccagaaggacagccagggaaagctgttcagaaacatcctcaaggaaaaggggatcgtggtgggaatcaaggtgaacacctccattcacacctcacttctgctttgtcctaggcaaactccaagcacactggcaaggacagggccaacactctgaacattctcctcatcaaatttctcttctcacccttttccatcgtcatcttcccacagagaacaagatcctcttctagagttttcctccagtgccctcttctttcactcaaattttctacacgttcttaatctctttgcatctcaatctcatttcttaaaatgggaatctacctcatgatgttcttacagggatgaaatgactaaaagtttctaggctggacgtggttgcttactgctgtaatcccagcactttggaaggcagaggcaagaggatcgcttgagctcaggagtttgagaccagactgagcaacacagtgggaccttgtctctactaaaaatcaaaaacattagccagatgtgttggtgcatgcctgtagtcccagctactcaggaggctgacgtggaaagattgatcacctgagccctggaggtcgaagctggagtgagctatggtcataccactgcactccagcctggatgaccctgtctcaaaaaaaaaaagagtaagatcctgtctaaaaaaaaaaaraaagaaagaaaaaagaaaagaaaaagtttataktgcgtaattattgttaatggtaactatcataattattgaagcatttactattctatcttataactaggtcttccaatagtgcataaacttctcaaaagtgaaaactagtatccattgaataagagtttttaccattccaagcattcatttaattctcataacctctggtagtagactcaattattacccttatttagagatgaagtgagaaaactgaactacgaagagtaacataacttgcccacacaacaaggcaaggtcagagccagtttaggctaattctcaagctcatgacttttgcctttrctatgtagagagtagaggttgtatccttaattctctttacctcctgtactaacacaacacctggtgcatgcaggtgctcaataaatgttagggtagacactctcacagtgtaccttctaggtaacttcccttctgctatggactgaactgggtccctcgcactaatacactttactaattcaactccttgatctgtaaaagatgcaaactgttagttagttcaagagttctgcttgtgttttcctgacatctgacacctgttaattatttgtatccacagttagaccaaggaggtgctcctcttgcaggaacaaacaaagaaaccaccattcaaggtaaggatattgcccactgagatgaatcatgccagtgtaagctagaaatgaaggcaagtaaagaaggaagcaaggaaaaacaaaacacaactattacactggtcttagagccacacgtacctggttttcaataccagctcctccatttaacaactgtgaccttgggccagtcactgaaatattgtgagcctcagttctcctatctcaaaatggggatttctcaaaatgttgtggggattaacttagacaatgtacataaggtgcttaccacagtaccttggacaaagaagattaaactctgcacccggaagtattatttttagaaaaaaattagcagcagtagagtggaaagtccccacactttgaggtcagacacacctgggtttgaatcctggttctatcacatgctacctagataattttgcaaggtacttctgcccaagtagacaagcattaactcacaacattgggttagctaagcagaatttgaatcccagctctgtcactcttgagcaattcaaacttggtaaagttgcttaaccattaggascttcagtttccacctttgtaaaatgagtatcatattaactattggtttcttctattctatatatggagtagatagtatgtatgtcaaaacactatttattaaatctaagtcttctggttcagtgttgtgattaatgctgatatgcttggctgttttcaatcctcaagcacagtggattgaaagctaagcaaagggagaactccttccctttattagaagccccatggatcaggtacaaaggtacaaagaagcctttctctcttttgtgacttgcagggcttgatggcctctcagagcgctgtgctcagtacaagaaagatggtgttgactttgggaagyggcgtsctgtgctgaggattgccgaccagtgtccatccagcctcgctatccaggaaaacgccaacgccctggctcgctacgmcagcatctgtcagcaggtgctctgccttccccttgggctgaaaaagagtagrctagagttttcttcagagcttttcttttcaattatactataactacamatggacctccttttccctcaccagtatatcctagtggcatttttcacwacttttgctatagccaactgtggtagggaaagatttggtcccacaagccagtaggagtccaactaagctatgagttcaaaggataatgccatcaactgctgccctctgtcaaagctccataagctgtcttataagtgatcgggcttttgagggcagggaacttggttgtctatactccgtaacatccaagacatgatcctcttagattcctagctgaagagtgacagctctgaccgagttccaatccaaataattctttggaggatggtgaccagatgctaaagtttccaacacatactaaaatgtctctgggtccgagttaagtttgattttcttctgtgagtactatgttggggttactagagttgtggacagctggagatccccaattagaactctaaacactgcttgaatttcttcattaacccaacttagagacatctttcttaatgatttatgcttagatgccctaaaaaggcagtagctaggttctgaggcagctagaataatctctagaaagaaatacagtaattacgggtttgtatttattttttatctcattctgaaaaattctactgtctttaagtcatctatgtagtatttctccataatggcwwcaatttataccaattgcaactgwwgaatctcctcctaaggaaaggataacagtgagcacagcttcacttttgcttccttgattttcctttttagaakggactggtacstattgttgaaccagaggtaattcctgatggagaccatgacctggaacactgccagtawgttactsagaaggtaagttttaaatatgaaggccccaattctagttgaaaaatcttagttttaggtaacagctgttacttaacatataacagctgttatatctgaagtagcctttaggatggatagcatagagaaggtagggaggtgctcatcagcccttcacctttttggcacatggtatactccatatagaaaaagcacaggagttgcagtaccaagacttgggttggagaatccgcttttccacttgtgggatcttgggcaagtcatattatctcttttgacttcaattcaattacatgtacacaaagaaattttaaaataagacatgtggctcaaatgagaagatgtaattagaaagtactttattccatctgactttctaaattagccacagtggatctgaaagagggtggttctattcatacactgtgagaaagtaggagagtcataatgtcacctgaccttagtttctctacttggaaaattatgtggactgaaatgcaatctaagagcacttccacctctaaaatgtatgattctatgactactcagcttctgtaaacatggacagtggaggcccgtttagatgaccccaaatagctaaagcaatgcagtctcaataaggaatgacattgaccaagggagtaatggaaataaaggaatgaagggcttctaggaagcagagccatgcctgtcattcatgcagtgaatgagaagctagattaggggtgatgaagacaggccagtttagttgtgctcagtggctatggattgcaacacattggtctaatgaggcctggagattggttcagaagcttttgccaagcaacaaataagaattccttcatcctgcctccctgcagtgtaaatgtgccaaggtcaagtggctctatgactagctttgagtttcacctggtgggacctcttgtccttcaggtcctggctgctgtctacaagrccctgaatgaccatcatgtttacctggagggcaccctgctaaagcccaacatggtgactgctggacatgcctgmaccaagaagtatactccagaacaagtagctatggccaccgtaacagctctccaccgtactgttcctgcagctgttcctggtaaggccttctttcttctctaactcaaggtcttagccctcattctttggagagccacaagctttctgtttgtccagaaatctgcttctattcatgaaacaaacctctgttatctcacaggcagccagcacttcttctcccacttcagaataccaagcatcccaagtctgcccaaatgcccacaatccatgtatttcttcaacatttcactgccttccttacgtatttaaagcacttatctctagcccaactagcttcagcaaaagcaaactgatttctcagtttgctttaaggcaaattaagcagagaaaagactgagacattacttttctggyaggttcattgcttgctttctcaagcagggtatataaggtgggactaatagagtgaaatggcttctctcctaccaggcatctgctttttgtctggtggcatgagtgaagaggatgccactctcaacctcaatgctatcaacctttgccctctaccaaagccctggaaactaagtttctcttatggayrggccctgcaggccagtgcactggctgcctggggtggcaaggctgcaaacaaggaggcaacccaggaggcttttatgaagcgggccatggtaagatgctgccacctcttatctacttgatgatgttcacatttggggcttgactttccaacacggagaagcattgttttcttygggccaagaaggtatctaccratagtgtctattaggcatttgaaaatgtggcagtagaggtcagtatgaggattgaggctagagagaattttgaattatccacactagagtatagttgatgacaggagactgaaggacaatttcaacagaaacacttcagagggaaggagataagaggaccaagaactgaacctaggatactttttattttgggaagatgaagaagagaagcaaccaagaaaagcagcgattatattgtagggtgaaccaagcattctgggaataaagacagaagaatttctttctttcatgtttatttgtttgtttgtttgtttgttttgagatggagtgttactctgtcacccaggctggagtacagtggcacaatctcggctcactgcaacctccacctcctggattcaagcaattcttctgcctcagcctcccaagtagctgggactagaggcatgcgccaccatacctggctaatttctgtatattttagtaaagatggggtttcaccatgttggccaggctrgtctcaaactcctgacctcaggtgatctgcccacctcaacctcccaaagtgctgagattacagacatgagccaccacacccagccgggtaaacaatttcaaagggccaataataacatgctatagagagattcaaaagaaaggccaagaaaagaccctgagattggcatttaggagcataccagtgaccctcactgaaacagtttcaataaagaggaaaggaaaggtgcccactcaagaagtttttcagaaaaagacccagaaaggttgccaggagaaatgaggaccaacaaagtttttattcaaataataaccaaaatttttaaaatacgctttatgagccaagaactggggtgaacaaatgagacatagccatgtcctccaggaagcttggagtttagccaaataggagagagcttggcatgtttaaatgtaaagaaagaggagccagaggagacagtaaagatgaggagagtggggataattgagtggagaagaacttagaggagcaggactgcatgagactcaatattaagcataggtggcacagctggtgtaagacaaaaaggagggaagaggcagaaaagagaatacagttggaatcagctctatataagtcaagagatgtagcagttgatgactgattacagttgagggtatctgctgagaatgatgaagaaatggaaatttcaatactgacagtcggaaagcgtagaaaagcagttaaaggaacttgctaggaaattgatcggacgttatggccagacatagccaagcatcaggtaatgtgcagctgaaataagagtgagtgtgtggtagcttcattcctgagttttcctaacagcagtctaaagcatgcaggaagattcagaacgcaaaatagcggggtagaagagtgaaagtttaataggaagrtagaagagtgacaaattttaccgatagcctctgttagcttgctgaccatagaggaagctaggcaaggaatcaagagtagtcagaagtgtggtgatgaggccctaaagggaagraaggccccagggaagctaaatcatcatctcacaggcataagagaggtatcagattttcaaagtagtgctttaccttgactgtggaaagcagggtgcagcagtgctgctgtgtggctgatggactgaggagacctagcttacatgatggagggattgtgaaagcgcaggtcatcagggacatccacacagaagaagggaagctgagtttatcatcaagratggtgcttcccaagctccagtgtggatctgaatcacctgaaggtgattttggttttgttgtyatgatcttttatatttacacacaataattgtatagatctgtggggtatctgtgattttttatatatgcatataatgtataatgatcaaatcaggataattagggtattcactccaaatatttattatttctttgggtttggaacattccaaatcttctcttccagctattttaaaatatgtaataaatcattgttaactatagtcatcttactgttgtatcaaacactagaacttattccttctgcctaactgtatttttgtacccattaccaacctcttttcatttcccctacccccacttgaagcgcttgttaaaaatgcagattatgggtctcacccactgagtttctaattcagtaggtcaggggtaaggccagggaatttctatttttaacatgttcctaagggatgctggtagaccatgaaacacagttggagaaccattgatgtaaaatgtagaaataagtcctggagagaacagacaatagcaacactgactggaagaagtggtaccactgagtgacattcaaatattgtcgtaagtttcataattctgaatttatctttaactggaatgtatacaggaaagcaaatgatactacaataactaaataaaaattacatattcttctagaccaatataggtagaaaatggaaatgtttttaaaataaacatgtttttcttttggtatagtgtactatactagtgagaaatttttcaactttagtttctagtactgttgctgcaatattgttggtactgaacagagatttccccagtaactgacacaaacctcaagcttaccaaagaaatgctcagaaaactgggataaaaaggggagatactttatagaaggggatggtatccccagcaatattcagcaacattgctgtaaaaagaagaaaatctgagtgaaggtttgactggtttcccatgagaggcagacagggtcaaggtggggtcacatttactctaaccagtctcctctctcatatttgtcttctaggctaastgccaggyggccaaaggacagtatgttcacacgggttcttctggggctgcttccacccagtcgstcttcacagcctgctatacctactagggtccaatgcccgccagcctagctccagtgcttctagtaggagggctgaaagggagcaacttttcctcyaatcctggaaattcgacacaattagatttgaactgctggaaatacaacacatgttaaatcttaagtacaagggggaaaaaataaatcagttattgaaacataaaaatgaataccaaggacctgatcaaatttcacacagcagtttccttgcaacactttcagctccccatgctccagaatacccacccaagaaaataataggctttaaaacaatatcggctcctcatccaaagaacaactgctgattgaaacacctcattagctgagtgtagagaagtgcatcttatgaaacagtcttagcagtggtaggttgggaaggagatagctgcaaccaaaaaagaaataaatattctataaaccttcagctgctatcgggtttcacttttctgctcttgctgtccaaagactcagtgtatttcattacttttgactctactagacatgactgggtttcaacagtaaaggtcttcaactcttgctagtcattggaatcaagccgcaaaattttaaaaactgagatgctcaggccacaccccagctcaattaaatcagaaaccctagacttgggatcctctaactattagatttcttaaagctccctcagtaattccaatgtacagtcaagtttgagaactaccaatctaaatttcaagtttgagggtatttgaaaattaaagccattcacaatacgaagccagctaaaaatgtagaatgattttgagcaacttgtggagtataataagagaattaatgtgacttcaatgcttggagcattcttgttcaagtggcccaggtttggtgaaacaggactaccttgtcatctgcacgtccaggcatatttcgtagttttgcagtaaataatattcacataatgatactgtattgactttcaattttcagaattaacctatagttacagcacttaagacaaccagagttataaaagagaatttaaatattataactttggacaatataaaagtgatgatttaactgacagaagctaggaaatataagggggaggagaagtggaagaaagcaaagagagtcaggaatactacttaaaactgatgggttaagaaatagtgctttaattctatttaagtaataaaagaaatggatgtaaatcataaaaatatatatctaaaattaaaatattgatggtagtatgctaaatttcttaccttgaataatacaaagacaaatggtattgtgtagattaacaaatgaagaaacagagacttaacatattatttagaggaataagacagaattagccaaaggggcttactctaagacctgggagaaagacctgggagtcagggcacaggaaagatgacatttccttattacctgccctctacagtatttgaatatttatttccatgtacttgtcattacttttctaaaaacaactacagacagtcatacaagcaactcaagcctatatgagagatctattaagcccacggttttcattttacaggtgataaaaccaagtccagagaagtaaaattacttactgaggatcccacatttatagcagagctgagagattaaaattcaggtcttctgaactcaagtctcttgctcaaaaagtggatacacagccagagatcttacagggcaaggtgacaggctgtgttcaatatctctgccacccgtggtgtagtcttgtacatttctccttgtacatttcagtcaatcatcaagcacttcatctcctactatgtgccaagctgtcctaaaagcaggtaggtaacaccttgtgagacaaagcttttctgccagatagtttttatctagatcctactcagcatcgctgaattctttagatattttaagaggtatctaaagaaacctctcagattcttatcagttaaccatgaatttataatcaaggatgagttacttatatattttggtcaaggctgaattacattttactgggaatgaggatttatataatgcattttcctggctatcatctgatatattttccctactaagggactactgttgtctttgaaatattaatcccagtaatttcctcctttcacggtaatatgcagacaagtgttttacaaggctacagagttcaatttcgctgtgattactgagtgagtatttagtgacttcccagctttggttactttttcagatttactttagtagttattaaacacctactaaaactaaaacctggtactagacatgaaaaatagagaaatttcagctttagggcacaccagacaattaagcttaaatagctaagcaagaaacacacaaaccattgactgggggttggtaagtgggatggagagtcagggtgtagaatcagatgtctgggtgtaggaaagggagagatggcatttaggttggacattacaggagaacaaaaaggaaaggaattcatagagaggatactgcctgtgtgtaagaaaatacgttcataagtcactgggagaagaagacattttgaagctatcaagagccaaggccacacacgcacacacacacaaatgactaagttgtggaaagaataaaaagaggaatttgtttttactctgaagagggaagagggaagaaggaagggaatgggcaagaaaatgagggaagagaggaagaaatgagaaaggaaggaaaaggaggaggcaggaaagaagctagggcaatatgtaattgtggggaggtgacgggcttttgagaaggaggagaactattattaagcaatctaaagatactgtcttcttgtgaggaagaactgagtttctcatttgagtctacagcatgctttataaaaacaatatactgagatgattcgtaatgattcataatgtgaattaatttaggagaagcaaaaaacaactgtgacagtgagaagataagcttctagaaacttgcagcaatcttagagtgagctttaggcaaagcagaaatgggatttccagatcatctgacttagccctgctggaatgaaagactccagctgccgtctagatgtcactcacagtgacagaggagaaaactggggtccagcgtgctaaggaagttttccaaggtcacataaccagtcggtggtgagatttaggctagtgtgatttacaaagtcttcttgggtgggagtactcagggttcttcaaagcacaggttctagagtcagacagcatagattcaaatgctggccctgtcacttactagccatgtgaccttggacacattatacctttctgtcgttcagtttcttcctcaccaaaataagaaaaagtacatgatcacatattgtcgtaagaataaatgagttaatacatctcaataacaagttcacaatcccttattcacaattctgaaatctaaaaactctgaagaccaaaagttttctcataagttttagtaaattatttggtggcaaaatctgacctgaacctatctgtcatctttactccatttgatgagttgcagcaatattaatgtgcttgattgcaggtgcttcctgagaccctgcagagggagttacacaatatatttactctctaaaatctgacaaaattctgatttccaaagcacatatggcctcaaggctttcagataaagaattgtgagaactgcccttggaacagtatctgccacatttctagagtaaaagataaattgcccatgctcaatgcagcctggagggctcatgcaatgctaccaatcccaaagcccattttgaagagaggatgaattaagagagagaagtgatgcaaagctcaacacagccagtcacagctctttttctactgctcatataaacatggtattctggctggaaagcagtctaagcctcttgaaataatctaaagcactcagtactgggcatcaatatgtataacatacataaaaatcagccaacaaatactcttgcagcacctactgtatgctcagcactgtaaagatactacatggtccttctatgcttaccatggaaatgaggaagacaagcatgcagttagaaaacaaagaaaatggtacaataatgtgctaaattgcagtggcataggctagatgctgagatcaaaagggaaggaatattttatggaagagggaggattagctgaaggcagtttattattagttatgtgatcttgggaaacatagcctctctgagcctcagtcttcacatctgtaaaagaggcttgttttgagggcaatattttatatacagtgccagatacataagtagggaataaatattagttttccctgtcagctggctcttgaagaaaggtaaaggctcatgaatgagaatgaacatgaattgtgtgtccttactagagtacaaactatgtgttgagagaactatgggaaatcaacctggaatggtgaggctgatttcccataatggagtggcacatggatgggcagagaaccttagaaagtcttgccttgaagtgatgagaaatagggaactgtggatgacatttaaggaaagaatataagagcagtgctgaaaattactttctagaatgtagaggatcaagagggaaccaggagccagctaagtgtctataacagcaatccaatgtagcgcacctggccttttgtcggtcgggtaggtgagtagacatgacatctttagacaagagaaaacaacaaacaattccttgtatgtagcatagccattatcatcttaataaagtctgtttcattgcaacctgataggcaagtgcttgggacaaatgaaagctcaaaattctttacctagttctcaaaaagacttacatacatgccgggctgagtagtgtggtagatgaaaaatagggcattttcaatctaattaaactaaagagcttctgcacagcaacacaaactaccatcagagtgaacaggcaacctacagaatgggagaaaatttttgctatctactcatctgacaaagggctaatatccagaatctacaaagaaacaaacttacaagaaaaaaacaaacaaccccatcaacaagtgggcaaaggatatgaacagacacttctcaaaagaagacatttatgcagccaaaagacacatgaaaaaatgctcatcatcactggccatcagagaaatgcaaatcaaaaccacaatgagataccatctcacaccagttagaatggcgatcattaaaaagtcaggaaacaacaggtgctggagaggatgtggagaaataggaacacttttacactgttggtgggactgtaaactagttcaaccattgtggaagtcagtgtggtgattcctcaaggatctagaactagaaataccatttgacccagccatcccattactgggtatatacccaaaggattataaatcatgctgctataaagacacatgcacacgtttattgcggcattattcacaatagcaaagacttggaaccaacccaaatgtccatcaatgatagactggcttaagaaaatgtggcatatatacaccatggaatactatgcagccataaaaaaggatgagttcatgtcctttgtagggacatgggtgaagctggaaaccatcattctcagcaaactttctcaaggacaaaaaaccaaacagcccatgttccccctcataggtgaaaattgaacaatgagaacacatggacacagaaaggggaacatcacacactggggcctgttcagggccctcagggggaggggggagggatagcattagaagatatacctaatgtaaatgacgagttaatgggtgcagcacaccaacatggcacatgtatacatatgtaacaaacctgcacattgtgcacatgtaccctagaacttaaggtataataataatttaaagaaaagaaaaatagggcattttctaaacatagcactaattctttgagcagttcagaacagccagggctaggcagtagcccagggtctcaagtgtsagagaaatgtattctgccctcctaagataatcaaggtcaaggcaaccttctgcagctatgtacaacttttccttctcctgctctgttactctgtcctgttcagagtgcacttctgggttgcagggacacaatgactgtcatgtaatgtgaggatttacctcagccagtggactaacatgagaaacctgttcttagagcatggctcccagataggcaacaacacaggcaagacacacacaccatgttttatttgtgtgaatgaaatcacacaatcaaaattcagtgttttggaaagttaggtgattttccccctgtctcatgtaacacacgtggcttactatgcattcctcaagtcttcaagtctccttgatgataaagggctgcttgacgcaactatcaaactgacataacacctagcaggtatttttaaattttttaaatacatgttaattgatcttgtcccacttgtgcagtaaagcaaatgtgtctctcttctctttgtctgtgtattatggttatagacggacttaattttaaagaaaccaatcaacccacccctactacccacctggggccacaaaacacttttgaatgagggagaataatgtcaaatatatcaaatactgactgggaacagcaactttaaaaaaaaggattggaatacttggactggattgttttcaaaaaaggagttgaaatttattctgcaagcactgtgctcaactaggtgtgttctgtgtgcccctagatttgctgatgacatcctcctttaggaagacagatgaatgtgaaatgcctcactcatcaaaattacagagaaatagaatatttttgcctgtttttctttttgccaccaaagaccccttttacctgctcattttaaaattttatctaatcaataatttgcttcatctactttaagctcaattttctttcaaaattgtctcatatgttaatacccagaagaaatatgagtaatttcattaagttcatagttttacttcttgcgatgccataggagtaaaaaat

SEQ ID NO: 95356 - DNA, 91480 bp, Homo sapiens
atttgaaaggaatgactaataacttcacagtggggaaaactggtaggtaccaccttaaccaagtaaccagttaacctcacccaggcctggaacaaataaacataatgggccttttgcaaagcatgcactgagaggaacgtaacactctgtagccttcctggtgaaaaagataaagatacaggacaaaaagcataacctaaatttaatctaactctgatcatgggggaaacaacagatgagcccaaactgaggaacatttaacaaaacaaatagtttgaattctgcaaaaatgttaatatcatgtaaccagtacacagaggaactgtttcagattaaataggctaaagaaacatgacagctaactagaacacatgattctggattggatcctgaatggaatgtggggtttcttctttgttttttgcttaaaggacattagttggataattggtgaaattttaataaactctgagattagataatagtagtattatctatttccctaattatgctatttccttaattatgataactgcactcttgttacataagacaatgttccggttcttaggaaacacaaaatgaagtatttagggttaaaggggtatgttgtatgttacttgctttctgacagttcaggaggaaacataaaacagttgaggaatgataaagcaaacacagtaaagtggtgatatttgggaaatatggacaattggtattatttatctagtttttctgtaaatcagaaagtatttcaaaataaaaagttaaatgtgaaagaaattaaaataaaacctgttatgaggattaaatgagttaatgcttacaaaggatttagaatatagaccttaaaatattaatgattagatgtaattattattaccatagaattaagaagtggcaaggctacctctatctggcctatacacccttatccttaattccctcatctctgcacttcatcattcagagtctggagaaatccaatgagataatggatagaaaagtctttacataaactgtgaagtgctgtggtttggtgaatgtctgtaagcttggatatgaactcagattcttgtgtgcagctacctgatgatgtttgtctctattgctgatgaggttctttggactcagaaagttcaaataacatcactaaagggacaaagtcaggactaaaacccagagatccaactttcagttctgtctttttaatattggatagtgggctgcaaggagaagtttaggaaaggatagtttctttcacatactgacatgtttttctattgctctgtctggtacagctcattgccagctgaggtcaggttgtggccccaggaccccgcctctgaggccagcctctatttcctggacggcagcccacagactagcgcgggtgtcagcaagcctaagggtaaccagttgcattttggttttattgttcctactgcagatactgaaaatggcatcattcctatatctgatgctaaaaaataatgtttttctctccacctgaaaacactgacagaaaggtagaagaagctcctgctggccgaggattttgtctcctatacataygcaaatacctgaagcattttttttctaatggtggtctatttccttatgaacatttccaaagacaaagggaactacttttttaaaaaaatctatgggttggctaggaaacaaatgtttctacctgatcttgtcagtggataatgggttccaaaaagcaagaatctgaaattcttttttttttaaatactgatcggccacatgaaaattcgtttcactgattaaataggaggagcccagatatagattttcctttctgaggtactaatttctcaagcaagggaagaaatcaatgtgtttttgcaatgctacagatggaaaatctcaggtaaatcagaaaacgaaggcaacttgtttagagaaagtggtcctgaaagtttctatcggtgagttttcccatctgtaaaataatctatagttttattgtgaaatttgagtggcataatgaatgggagaaaaatatatttatatgaacaataggtaagagaaataaaatagcccagattcaccaatggtggagttagaagatatttattcttcatccctgtcccacctgaatgcttctcagctgagtaactgagcttcctgatttggttgattgttcatgatgtgcttcaagttcctgaaacaggaaggaattgtccctgtgaaagctcagctggttagttaacacagggtgagaaaaggagaattgaggaaccctgaatttaaaaaaagaaagaaaggaaattcatattattatgagcaaatggataacagcaagtggatttctgaatgctgcctatctgtaggaataagtttattgtgctttgttgttattgatgattttgtaaggaaaataatattatagtgccagaggtactcaggaattcctcatgaatctacagaccaataaaataattaaataatctgctccttgtgtctctgagtaattaaactaaagggtgccaaaatattttatttaccattacactttgacagaagcaatcatcagcatatagcttcctgtatataaactggctttgtggttcctttgggaagcaatagatttaagtcggtttagtgactgtgtatttactaccttgatcataagtaatgaactcaatccacttaaagttttacaacagtaatttgcatatttgccttaagatggtagtttttctacttctataaagttgactgttatttggacacttttatttaactcattaaaatttctttaagatatcaactttggcagtatttacgcagaaaggatagtaagtgtataagatatatatacactataaaaagtgtacaattttttctgtttcaaggtaaagtgttttaataatggccactgtcatttattaattactacaatttattaggtataacatgtcaggcactgggggagatgcttttaacacatgctctctacttacaacaaaccttgaagatagatactatataatttttttttttttttttttttttgagagggagtctctctctgtcacccaggctggagtgcagtggcaccagcttggctcactgcaacctccgcctcccaggttcaagcgattctcctgcctcagcctctcgagtagctgggactactggcgcttgccaccacgcccggttcatttttgtatttttagtagagacaggtttcaacattatggccaggctggtctcgaactcctgacctcgtgatccgcccgcctcggcctcccaaagtactgggattacaggtgtgagccaccgcgccaggctgaaggtaggtactattacatccattatacagaagagaaacagaagcccacagactttgcaaccccctctgcgcccctctactattaagaaggtgagtctttctgcagtatttcctttctctatccccaccagctatgggtctctatcaggttgtttgtttctgttttgttttggtcacttttaaccacactgtatgtatttcacatttataaaatataatttttcttttttttttttttttttttttttttttttttgagacggagtctcgctctgtcgcccaggccggactgcggactgcagtggcgcaatctcggctcactgcaagctccgcttcccgggttcacgccattctcctgcctcagcctcccgagtagctgggactacaggcgcctgccaccgcgcccggctaattttttgtatttttagtagagacggggtttcaccttgttagccaggatggtctcgatctcctgacctcatgatccacccgcctcggcctcccaaagtgctgggattacaggcgtgagccaccgcgcccggccataatttttctttttttaaaaaatatctgtgtaacacattgttcattcaggcagttccgcagaattccatgtgtcagacataattaatacaattggggaaatactgagtaagcgttttcggcccacacttttgtttgaacacagtgcattatacccactcgattttagtttaattcccgtgctgttttacatttctgtaaactctttgagggagttctgggcgcccactgtctagctcagagttccaggctaaggtaggcactaatgaatgctgaatgaattgggtagccagttaattgctttttcccccctaaaaaaaaagtctaaattacttgaataaaagtatttgtggatttttaaataatacatttaatggcagatctctgtctccaaaacgtgtgtccttctagcgactgagggtgtggggtggggtgaggggtgactaaccagtccccctgagatgggcccaaccttagcaatattatccatctacctgggattcccctacacctgaacagctctttgggtccgcgagagaaccagcggggtggggcacccaatgccaggagtgcgcgcggagagacacgctgaagttcacaggagagtatttaccagcaaacaaagggcggcgcggtttggggtcctaggaccagctgccgccgtctcgagaaaacgcaagggccgcggtgacaagtggacattccgcacgcgaccagaccgacactcgatgggcacctccccgcggccccgcccgcaggctccagctgcccagctcgcagccgcccactggctccggaggctgcttcaaccacttgtcccgccggcttctaccccaagaactttccgtccctcttggggttggggaccggcagtgtggaggggcgggcaggtgggggtctccagggagcaccgtcaccggacttggcgagctacccttcccaaatgaaaggtggcccgctcccaagtccatcccatatccttagagaagctctgggagcgagggccaggcggcagtgcggagcctggttgagcgagatgaacaaagggagctagcgagccggggaggatgctgcgctcccctgcgccccacccagccggctgccaggcgctgccaggcgcgcaggtagcccggccttccgcgctggcggggggaggtgttggacagggtacacaaagactcacttccgccggggcaggcgccgggactccctcctggccgcccacagcctgtgcgcattcctgcattcctgccgccgcccgggacccgagtgccccggaggtgtccaggcgcggtgccaggcgggtactgtgcaggtaaccttcggaagaactagggctggatggaggcggcggccggggagaaacacgcctttttaggcagccgtgctgccccgcaccgccccacgcagcccaagtctgcagtcactctccgcgacaagcagaaatccgcgcgcagccagggagcgccccgcctgcgctcgccggcgggccgagctgccgggccgggggcgcggggagggggcagcccaacttcccagtgcccggctcccgccagctaggtgagcctggagcgggaaggatgaaagggatcgcggagagggagggggctctggggcgagcggagctcgggggcggggcgcggcgcagcctcggtgcgtgggccgggaaccgccgcctctccccggggctcggggccgcggttcctctggccgcgggagccgccgccgcgctgcccgaaacaatgaggcgtgcagcgcggggctgagcgtagcctcccgccggctttgaggccgagccacccgctgtgccccgccgcccgcgcttgcagctgccgccggcgcggagcagcgctggccccggagaggtgatcccgcaggccgcctgggacgggagcgcggggcagctccgagaccccacggtggcaggaggaggactcgagcctgcggcaggacgactcccgccgcgcactcgccttctgcagcccccaagttccgcggcgtgagtcggggaccccggccagggtcccagctctagcgggcgccagcgtgagtgtgggagcgcgtagcgcgcgcacccgagcggctgccggggaataaaatgtgacacgcacgccttggactccagtgccgcgctgccagggggagcaccgagcaccacggtgtcgtgcgcttcgaggcgcggcgtgggaagaaggctggtaagggagggcactgggtaagggttggcgacgcctttcttggtggcgctgcagcctccgcgctgctgtgcgcggagttacactccgtgtttaggagcgagacccgtgtgtggggaatgttgaaggtggtttggggaaaagcaggaaattctggagaagcgaacgggaggacggcttgcgctttggggacgggcggatacagttgtgcccctgtggctcagtaaaggtgatcttttattttggctcttttggctctggaagggagtgaagatttttgtctttcttcagccaacccccgtacaaaactgcacttcttaaaggttaaagtgtgttctgttcatttctggttctctgtggctataatgtttggggtagtagggatctttagaatcctaaatacccgagtgttaattcttatgtagttggcaggcggcaaactccgcttttgggtttactttccgcggtgttacggagtggatatttgatgcattcttttgagtagggagtgtgacgtccatctcattcggatttgccggttctgtgttgggggactgagtgaagttaaactcaatggctcccgcaagtgctgccttccaaagagctgaatagctgtgtttggagaagctgtgctttccaggaatttaaatgagactttttgtgattgccttccaggtctctcctcctagtaccatatttgttttgtcaggctgaactttcaaagctgttttgtaatctgagaagcacttttggggggaaagtaatgcttggctggatttttgtgaacttatttttattggacatgcraaaaatttggcgagaggcaaaccatatttggttgaaatcattgtcttttgcaccactgccgttctgaccataaaggggcatgctgaccctcctcgccgaggactgcctgcttgggtgaggggggtctttggtgggctggaagcacattttgtatttagagaactttctgcacacttgaaaaaccccatgctggttactttgatgcttcccttttttgaaattctgatcaacattttttgccaacttgaaatataatttatgaccaaggaagaattccaataaagtgaagtgctatatatatatgatgtatatgtatatacatacacatatgtatatatgtgtgtgtgtrtatatatatatatatatatatatatatatatatgcgctgcaaatttagggttaaaactttttttaaaargaaaactgatgtgtggccttgaacctgtttttacccactctccttcccccattatttttctggaactgacaaccaaaatttttatataccacttgaggaattttgtactaatgcattaaaagaaactgttggcaaaggtgaatggatattgtgctcaaaactgatgaaagtctaaaataataggtgaagtgccttgaattttactgcaaagttaaaaaggcactctatccaatttttgccgcaatagatacaaatggtagcatcttacatttttgcttggtgctgtgaaagcttctggagttttgagttaaatgtcttgtagagattgtgataggagtcactgctttatatggagtactgagctccacagtttagagaggctttggatggatactcctggaaagagtgaggtcagagcaaggaccaacatttggtgagtttgctatgtggtgcacaggatctaggaagcaaggatacaaaattcaggatttttagactagaggattcaaagttgagacaatttaacatttgaaaatatgtgaatgatttattatgcagaagagggcagttatctgtgttgagtttctgatgaggataattaagagggaaaaggtttactctgtggggtgaagacataagttgagtctagggagttgtggccaatccagccagcaaagattaaatagcgaagggactgctgaaaaaattcctgtacgtgcttgtttctggaggttccacccccccacccccgagtttctcttctttctgagatgatttcagtgtgtgaggctctggtctattgcttatactgatactgactgaaattttaccctccaggtttagaatttatccaagcatttctcaaatgattaaatcttttctgaaagacaaactgatttctaggcttctgccactccttcttaggtaaataaatgataggttcctttccaaaaacttggagatatttgtcctctgggaagctcttaattagtttgcagattgctacctcatgggtgagactttgaataaaaatatcttatgcatgataataaggacagtctttgttaatgcatttgctctttaaatgtattgtgttattcctgattgattgagttttttcttttcctggattttctgtaatatgatcttaaaatttaattgcttaaattaaattaagtacttaattcagcatgcataaatgtctaagggaatcagatagtaccctcatggcaggtgtatgttaagctttgattttctaagcattgaaatctgaaatctcatcccttaaaaaaaatgggatgaaattcccaaatgactataaaagtaacaattgcatataattatatactaattttggaaagtggaagggaaacacagatgcatatttgcacagaaattttcaatgttcttacaccaatttttgatatcaatgccaaacactgaatgggctgtagatgaccagccactgttagtggattaccacattttcagtttaatatacctaccatttttccgaaagctctccttccaacttttgagaaatttctttctaaatgttattaagtacacaatgcgaagatatcagtgttagagaaacacggatttattatgccccttacaaaatttgaaatttacccttgcttggtcccagccacctcccacccctcccattgaattgataggggaacagttgcaattcaaaatacttggcatctacctagtccacaggtgaaatacatttaaaggggatgaartatgacctgggcagtcctaaggctttgcaggagttggtgatctggtccagctccagcattggtcctagccctggtgaaagcagggtcccagcagttgtgactattatcttcactttgccacctgcaggttcctgattatcccacagtacccagggcctactggttggttgggagaattgttctgtgtatggaaatgacatcagaggcatgctgcccactgcggaggacttctrtctggacggaactgttctgtgccatcctggcttctgctgccctctgtggtcttgtctagggaagaagtccaaattgaaggcatgcagtggctttacaaagctagaagcatgtgaaggctaggtttgtagttttgcactggactttcttagagagcaaaggaaagctattggccagtgcttctgcagcgaccagcactggagaaagacagccttatcagagctcagtttccaaggctggaaaaggaaggcttayattaaatcctttcccacatgtcttctggtgtgagattccacaaaaytgataattgtaagttgtggcatacttaaaagctaattcctgtgcagcctcaggagatggtagtaattcaaagaataataatagtaactaatttgcacttatgatgtactacatcctgccatttgctttgcacagattatcaaagtgtactttagccacaatcctgggaggtatcattgtgcccattttacaggcgagaagactgaacctcaggaaggtaaagtgccttggcagaactgggatttgaacctgtgtctgggtgtccaaaacccatgctattagactgagatcccctcaacagaggaaaacaagaatgacaactcctgtaattgtgtggggccagagaccaactaagactatcagttttcatgtcctcaaatcaggctgagcctgctggatggggaagattgtatatgatggaagaggatgtcagggagcccatgtatacagaaagcatgtgttcatcagaacctggaagcagaaaaggttttaagctgcaacttaaaaatgggctatgaaatgtggaatatccaggcagtyattattagaatgaaatttgggctgatacgaagcatgtcatatcaagtgaaatttccaaggaaaaatttaggctaagattcaagaaaatgatccatctgctttgagttactgggttggtaaggagagcaagttcaaaaagtagtctcctgggacatttaaaaatacattggctaaagcattagagaatacactgtaaagaaaaactctgcaatatcttgattataagtctttgttttcagaagtttataattcacactaagttctactctgggctgcttctactgtttgagcccgagagaaaaatgctttattaaatttaaaacaattggttttccatgttcaaattctacaaatttttcaagtagaggttcttgcatgttggtaattgtggtttctaaaatgacttagctttaaattaaatatgggaaagggtaagtctcttagataatccaatagctttcattattcagaagtaaaatgtaaaagtagcttctttgaaagtgtaatgatgacttttctgaaatgtaagtatattgctatgtgccaaaaacccataattgtgccactgacctcaaatgggtagaaaaaagtacagttaatatgggatttgttttctaaatgatagagctaacccagttacaaaatggaactgtacatttaggattaaatgaatggatttgtttgtactgttagaagagggatcttgctatgtaaattatattttaaaattagggaaactataccccattagaaatctctgtatgggcctggtgcagtgcctataatcccaacactttgggaggctgatgcaggcgattgcttgagcccaggagtttaagactagcctgggcaacataacaagacccccataactacaaaaaaattttcaaaaattagctaggtgtgagggcatgcacctgtagtcccagctactcaggaggctgagttgggagaatcacctgagccctggagtttgaggctgcagtgagtcatgatcactctgttgcactccagcctgggtgacagagtgagaccctatctcagaaaataaagaaataaataaaagaaattttcatatgaaaaagaggaatgtctttcaaaagaacacatgtgcacacatacacacacagacacattcacacacttgcaagtaggtaccagaggaataaattcctgcattatgtgttgttacatcagcaatcaggagtgggaacttgaattaggatacttcagcattaattgttgggattcatggctattgactaacaaagtcaggacaagagcctagcccttccaactaaaggaagaacattctttttcctatgtggcttatctctgggaaaattttatcttccaaattacatggcttgtgagaaaccaacaaaaatgtttaagatttaaactttctcttagtttattataaataggatacatatggaaaacatacttatgtgtgtacatatatgtgaatgtgaatgtttgtgtaaatgttctttatgacaayagcagacatcatgctcaacatgcaagaacctctactcccttggtccctttggtgaaatgcagaatgcatttgactgttgagactaacttttgagattgtcttctcaggcaggtccttcggggaacctggccccaggctgatgactggaatcctacatattggttagctgttctctgtgatgacagagatgaaccacttgagatgttttaggtcagccagaagttcaccaaatactataggttattcaatcttttttctggaaagcaggtgactatttggaattgccctgaattatagtgtcttttaatcactatagacataggcaaaataattaaaaccataagcctaagagttattttaaaagaaaattatatgctctaatttctaaggtaaattttaaataatttatgaataaatgggaaatagacaagtgtaatatggttttcttttaaaagtatgtcaatatatgtatagatatgtatataattggtctataattttattatatacattagrtatgtatataattggtctataatagtatataattggtctatatgtgtatataatagtatgtaattggtctatatgtatatatataatagtatataattggtctgtaagtataatagtatataattggtctatatgtatatataggtctatatgtataatgtatatattatagtttatagattatatatagattaattatctatatataatagtatataatttgtctatataattgatctatatgtataatagtatatagttggtctatatgtatatataataatatataatcggtctatataataatatataattggtctatataataatatataattggtctaatatataatttctattatatacattagatacgtatataattggtctataatagatatatatataattggtctataatttctgttgtttaaagggcagcttaccccctctgagtgacagggtagttaaaaaacattcttctgcctgatgttcaaaattagtagctgggaaagttgaactaattaagtaattggcctgagtcaatacttgatatgttagaataacattcatggggtgcctttaagtaggttatttcattaactatttgaggtgggagagtttccaaagttgaattgatagtagtaggaaagtgtcagaaaggtatggctttaaaataatgtgattgcttccgtaagttaaatctaaacatttgttacttgcttcactctacactttgccccacagagttaaaacacatcatgctgtattatcatcatatcccactaataccccatatatcaccattggatacatacacagaagaggcagggttaattttttttgtttggcattttttcagtattgtctcatgactgttaagcacggtattcgatgtagaaccagaagtgggtgaaaggaaagctttagactgtattacacaatgtgcctcttaaggggtaatggaaggactcctggcctaaggaaccttggttgtttctagatggtgtgtatctatcccaattataatttggaagcccatgagtataatcaagtgcttaatgtgtgtgtcttacaggtaaaactaaacaaactcattttactccatgtcgatccctgtctttcaattgcccgaattagctcaatcttgttcttaccacactgtgttgaaaatgagaggtgggtttatgatgtagaaatatagtcatccctcagtatccttaggggattggttccagtattctccatggataccctaatccatggatgctcaagtccctgatataaaatggcatagtatctttgcataacctaggcagattctcctgtatattttaaatcaattgtttctaggttacttatagtacctaatacaatgtagattctatctaaacagttacgctggttttgtttttttatttctatttgagagataggggtcttactgttctctccaggctggtcttgaattcctggactcaagtgatcctcctaccttggcctccaaaaatgttgggattacaggcacatgccaccacgctcagcctggtctttgtcttttacaatcagggtctcactctgttgcctaggctggagtacagtggtgcaatcatggctcacctcagcgtcaatttcttgggctcagacaatcctccccactcagcctcctgagtaactgggattacaggtgggcaccaccacacctggttactttttaaaattttttggagagacagggtctcactctgttgcccaggctggtcttgaacttctggtctgtagcgatcctcccgcctcaacccccaaagtgctgggactacaggcatgagccactatgccagcctatactgtatttttattggtattttattgttgtattcgtatttatttgtttttccaaatgtttttgagtcgtggtgggtggcatctgtggatgtggaacctgcggatgcagagggttaactgtgacgggcgtacagatttggtttgggaattactgtgtgcatccagcacctaagcaatagccactgaattttcagggtggtgggcacaacctccagccaggcaccagggtgcagcccttcaggtccctgctcaacccagacagtaggaccttggtcacaaggctgttccttagaactgttcctcactgaactgaaaggcatacccatattgattggtttgtttctcctttaagtaacattcagatttgtgtgtgtggagaggttgtagggaacagaattgtaggaaggtgctcacacctgtttttgtttgtttgttttatgtatatatggtgggtagaaaataaggattaatgaatgcagtaaggtatttgagcactcttgtttatcttgtgtaggtgccaaccaaatatttttatagagatgtggttaagcctcttggcatgttcaactgtgtacttcaaaataaaattttcttcatttggtactgacagtctctaaggtgggggagaaatagagactaagtcacaggccccattgtttatgatggtagaatgggaggtagatactaaattttaccaaaagaagctcataggtgctgatgtgttcagacgcttgggcgagtgacatcattgcacacaacgaaggtgtggagctcgcaggccttctatcgtgtgtatatacatgtatatgtaatattttaatccagatttactttcatgtgacattgtcagctccatgtaatctcacatgtcagagttcatcaacttcaggtacaaaagactgaggtggaatattgcccccaaaccaccttctgggatcgaaggtctgcaagaagccatcttggctatatccccaacttgaaaatcacagaaggccatragaggatttcctaaactttctgaaggtggtattgtagtcagtaaccactggtccatgggatgcattcccctcatagtcttcaacccagaaatgtcaaatgaacatctctgcatgatgtcaaatggaatgtgggaggagaaaatggtacaaagaaacatgtcatctttactttcccccacctaccacctttttttttctctaaatagactctttggagtcctgaacgtttctcttcctcattttctgcctctctaagcacatgtctttctcaccaatgtgctgcttctgtccacatgcggagggaggaagctgtggcgcctgctacctccaaggcacaggtttactccggcttttatgcagttaccctatctgtcttgttttcttcagctgtataccttaaccagaaaattgctacatgaaaaaattaattattaaatcttttgccagtgccaacttgcacagagcatgcgtatggtttgatgaattttcataaattgaatatacctatataaccarcacatcaagaagcaattcttaccaggaccccagaagcctcctgatgccctcttctggtcactgtcccccaatgggtactcactattctgatttatatcagagtagattagttttgtgtcacctgctcaccagtttatacttaaagtttaaacaaaataacttttaaacaatttatcttttttaaaaaataaggtaaagttaaccaggaatgaagtattggttgtgctattaaaatacaaaagttcaatatttgttcatcattgaaactttcatgctgtctgaagttcattttgttataaaaaccccaggattgctataacagaagagcttagttttgccatttgttcagtgctttagatcttccttcagtagactataaccagaagaccaaaagtaaattttaaaatgtagtacaagccagtacattttactctaaatcttgaagatgtattttaaaatattccagtttattaaaaataatgctggacatataatatttatatgaaaaaaacacactttaaaaatgaaatttgtgtccaggcatggtgacttgcacttttaatctcagcttctcaggaggttaaggcaggaggatctcttgagcctagaggagttcaagattgcagtgagctatgattgttccagtgcatttcagcctggggacagaacgagacctcatctatttacaaaaaaagaaatctactaamtgagtttaattttatttggcatttaacttgtagcctctgaattgtgaatttggaaaaaatttaatattgcaagtggacattgatataggactcttagcccaaggaatctctgttgtttctagatgatrtrtttctatcccaattataatatggaagcttcctatatggtcagttttagaagcttttctacataatataattagattctcttaggagatgttttaaagaactagctcatcaggaaaagttcatcaggacatggaagattaaagtcatatagattccttgtagttttgttcttatacagaaattctgcattgcaatttggaaacaatgaatgtaaatataaaaacccartccaggcctttcccgtaccccatcagttgctggtctgtacttggagtgtgctgaccagctttgagagatgtgtccatgataccaaaaactaaagttcaaaggaatataaagaaaaagtggaatgggctgggtgcagtggctcacgcctgtaatcccagcactttgggaggacaaaatgagtggattgcctgagctcaggagttcaagaccagcctgggcaacatggcgaaaccccatctctaccaaaaatagcaaaaattagccaagagtggtggcactcacctgtggtcccagctactctggaggctgaggttgggggcattgcttgatcctgggaggcggaggttgcagtgagctgagatcacaccctgcattccaggctggatgaccaaatgggtgggaccccatttcaaaaaaaaaaaaaaaagaaacawaaaaagtaaagtgatatcttaaaatttagtagaayggaagagaataagaaatataaatgtgatttcaaaagtgaaaaaggagaacaggcagactgcctaatgaaaatcagatgtactcatattatattgtataaattcagaattttcttaaagccaaagaagttggcttagatacagagccagatgtaaatggtaccatttggtatggagctgcatatttggcagccaaagttgacacagcgttaaggttctaatgatttggtgtctgtttcctgaagaggaagctgcctctgctacctgctgctgcaaatgctggcttgtctataatgtgcccttgggcacacactatttaagtggcttgaaaatatgtgtttatgcttcatgtgcttgtccacagtctctgcccttatggaaacagtgacatatacagtttctagagggtgaagtgtttcttgggcttcagcatcacctgtttatcatactctttaagaaaaaaattgaggggaagcagtgcactgcttatagctaacagagcattttatattagaatttattttacagatgtctccatacactcttgcccctcctgcatacccatccctttccgctttggccaagagtcctccttccaaaccttaagctcgattgtgctgcattctcttctccttagattccccagtcgtcgtccattgcataccgaacactgccatttttagaacatcatgtgcttctggcttggatccaagctcatggtctccactttcctactcccctcttagccacaactaccttcaggatctctccttgacccgattattatggacttggttccttccctctccttctgcccgcctcccaacccctaacttccaccaactcccattaacttaccagcaagccttttctgacacacacacacctaacatgatttaatggtccctacttgcagcacagcatcatttctctgttgctacacttgctactctgttataattgactttgctcccttcccatccctgctaaactgtaagttccttgcaggcagcctccagaactccgtgtgccagctatcgagcatgttgtgtggtactgagccctggaggttcttcataaatctatgtcaaatggatggatctaagagtcctattagactgaaaggatggctgtccactccctaaatgtgatttctaaaacaaaagagagtaggttggattttttccctctttcttcaagttgaatctccatgaatagagctcctcaaattctagtgatctatttataaacagaacattctctaaggacaagagaccatggcccagatgggccattctgcacatacactgtcttatacttcagagttgccactaatcactttggagaaacacatttactagcaatgttaggaaatcactgctaaaccattcaacctcataatttttgtgccacttgtgaatctcacagagaaaacctgaaattctcatttctgttgaaaatgattaaaaatagcattcagcatctttgtttcttccttcagcaaagcattcggaactaatggacatgtgtaatcagtaaataattagtaaatatattgggttggatctgtccatggagaatttataaaagcactttgtcttggattcataaatgttgtcaaatcctacaattagaactatatacattttcagcacctggtgtgataataaggccgttccagaacgaatgggctcagcagtgttttgttattatgctgcctgcccaagaatcatctatgaaatttgaaaaaggtacttctgccccagggggagtatacaacatcagttgtccatgaagamttataaatgcagggccttgatcttgggtttagcccaaccccattgcagatggagaaactaacacacacctttagcttaaagcccaggaagctgctgtgctgtcccctacctgtgtgtatcagatgcatggccacaacctcattctgccatcgctccctgcaggagatggccacagggctggggacatctacggagagagatgaagggttagtgagcatttggggtcattagaatttatgtggaactttgtatattttcagaatttcttcccagactcacatccttctgagtgagcgttttgtttagttttattttgttttttgaaattttgcaacctcccaaaggcaaggctaaaatcaagggaatgcctggcacatgtcagttaattaaaaggactcttttccttactctgaacctgtactagaatcgaaataaaaaaaaattaccagcgattgaagttaggaacattaagtgatcttcagtattaaatagaacttcacaggatgtaatgaaagcacatgaagtttaaaacaaaaggaaccttgtctctactaaaaatacaaaaaatcagctgggtgtggtggcgggcgcctgtaatcccagctactcaggaggctgaggcaggagaacctcttgaacccgggaggcggaggttgcagtgagccgagatcatgccactgcactccaccctgggtgacgagagcgaaactccatctcaaaataataataataaataaataaataaataacaaaaggatgtatgtggggcatttgaataaatgatgtcacttctccatttacrttagacacagggacctctcgtacaagtgaggaaagaagagcctaagtgtggatgtcctcacatccatggaaatcattttaagtcaccttcataagcaacttaaaaggacttcagtgacttcatggatgctgactgttagtggttgttattctgactgtgtcagcttggcagtccccaccactgcctgaggctgttcctgatttccacaacataagcacaaactcaggtttggccctggactcatgcaccaggcaaagaagaaaacttgatcttctattaggaacctaagttggttcctagagcacttcagcattgctgttatttcagatagtatacagtcaagtgccacatacaacattcagtcagtgacagacgacatataacacaggggtctcctgagattataatggagctgcaaaattccaatctcttagagacttgtagctgttgtaaggttgtactgcagtgtgcattactgcattacgtgtattttagtgatgatgctggtataaacaaacctactatatgccagtcatagaaaagtctatcacatacaattatatacagggcataatacttgataatgattataaacaataaagtaatggtaataaatgtgttactggtttgtgtattttactgtactatacttctatcgttcttttagagtgtattccttctaattaataaaaaagaaagttacctgtaaaacagccccaggcaggtccttcaggaggattccagaagaaggcgttgctttcataggtgatggcagttccatgcgtgttactgcccctgaagaccttccagtgggacaagatgtgggaggtggaagacagtgatgttgatgaccatgaccctgtgtaggcctaggctaatttgtgggtttgtgtcttagcttttaacaaaaaagtttaaaaaatgaaaaataaaataatttaagcatagaaaaatgcttatagaataaatataaagatattttgtacagctgtacaatgtgtttgtgttttaagctaagtgttacaaaagagtccaaagttctaagaaaataaaaagtttatacagttaaaaagttactaagctaaattactaatcttaagctaagatttattattgaagaaagaaaaccattttttttgtaaatttcatgtaaacttacactttgcctaagtgaacagtgtttataaagtctacagtagcaagtagtaatgtcctaagaccttcacatccactcaccactgactgactcacccagagcaacttctagtcatggaagttccatttatgataagtgtcctatacagctgtaccatttttaaatcttttataccatatttttactgtacttttcctatgtttagatatgtttagacacaaataccattgtgtcacaattgcctagtatgcagtacagtgacatgctgtacacgtttgcagcctaggagcaaagcaataggccataccacattgcctaggtgtgcagtaggctgtaccatctagattttttgtgagtacatgctgtgatttcatacaacgatgaaattgcccaaggatgcatttctcagaatgtgtctctgtcattagcatggcatgactatattaaatttaaaaatctgttaaaattctttcactttgcttaatgatcttagatccccgcacacccccaagcccttttcattttccttatgagccgtgctatgccatcttaatagggtttacattgctggttggtttctctgcactttttaattatattgttgtcctggagaagtttttagatgactggatgtggttagaaaggtctgtgactgtattccggaatgttaatgtctaggaagccctcatcctgtgcccaaaccaacctgtgaacctgaagaatgttgcactcttcaggaaacccataatcattggatattggcactggatttgaaaggatctcaagcttttgggagaagagatgaacttggcctgggcacacctttggtaatgagtttggtgttctgcttgtttatttgttagattgctttttcaactgatttatattccttgagaacgtgtactctcaggcaatgaaagtaaacacaattttgtggcttcctagaaaactggtaataaataatatggatctaacaagaagaagtggcctgggtttacctgtttacatttcatgactatccgagctaactggaagttttcacgtttttcaccctcttagtgaattactattaaacattcartttatacatcaaaataactatctttattcatttttgggaagaaaggctgtctcttggtgtccaggaaaaagaaggctagcatcaggctgggggctctgcacaattccaggactctctctggccaatgaagggtgggaagaatctcattctgtgggtatcagatgattcctgtgcaaaaagcagcagactgtagcgccccccatcccccaggtgactgcctgtacagagctggctttcccaccctcctctcactggccatcttgcagacagaccccaggtacgtcaccttcattagttgtgttggtccgtcacaccactgaagtggaaagtggcacagcgcagtggctagcctcatcgcagtctccacaatttaggattggctgtctccctggctcaaaggtcaggtgccttgtgggcagggccctctgttcagtcctgcttggtgtcaggaaggggtgaggtgcagagaggacagtcggaggcccagccacctgggcaggtgcgagggagaacagccaacaggtgtccccttggagctgtctaggcttaaacattagacttggatgccccccactgttgtgtgtgagcctccctatcagtcaacttaatgagaagagcttaaaaacaaacaaaccctttcttccctccccagggttctttcatgttctcaaaggtctgactgacagctttgaaggccctgcttctgcccagagagcaaaagcagcagcaggagggggcgtctgcactttgtaaacagtcagcccatgccctccctgactgggtgggagctggagcctctttgccccatttccaaattgcgggcttcctaggatgggagcagttatccctgagtttaaagggcggtcgatattttgaagttcctgcgggagaagatgaaaggatgaaacaagatgtgttacagtttgctgcagaaaattgacagagtagccctagtttggtttttgtccaaatatctcaatggaagaagacaagctctgtgcacaaggaagctgccagaggcccacacccctttccccattggttgtacctgtttgaaaggtgcccctcccctccaaatgaagaattctagggagtctgcagctcccttccaggccttcctctcctggagtatctgtcttgtacttgtggaatattctgttcaccactccccaaatcccctccaaagcccaccacccctcccctgccaccagttcttaagatatgggagctcatctcatttgcctttgtatccccagtggttagcagatgtcttccatagatgtttgttaaataaaagaaactcctttcaccatagatgtggctttattacaacctagcaatggcccaccaccagtctactttgaatcttaccaccagcttagagcagaacgtaatgacactccctcaatgatgcatttcataagtggtttttttttctttttcttttttgtattgcactccgtgattcatgctgtctagccacaattcacacatgtgggggcacaatttcagacatttgaaaagcaagttgacctatgatgttgtctctgaaacccccaaactctacacagatggtagattgatgacagttttgtcatactggattctctccttggcattcttcagtttctagtctcccaatctgtttctttctcatctcccatctctgtctctgataacggcagttctaagtattagcagcaagcatgtttgaagcactgctaraggcttccggtgcagcgatctttgctttgggacttgtacacagatatttagtttattatggccggttctaaaaatttatgacctatgaagagtttattttcagtaaaactgaggtcagcattggacatttaatctgacatccatatggcactgagatgcgmggtgcatgaatgcactttgtaasctgtagagggcagcctgtgaggagagactggggctttggagtccacagatttagtctcaaattccaggccctgcaccttgccggggatttgtatgagttacctttttctttccttctttcttttccttctgttttaacaaaccatgaaaaaaattaaccgtattccaggcttccgttccttcccctgtaaagtgagcgtaaatgatctggttccttttgacaaacagtattttaaattgccagccagcacaactgtgctgggctcaaaggtagtatttgtggctagtatcattaggacacaacagaagaattaaaagaaatagaattggcgtcatgtctagtacattttttggctctttcttaagcagcgtaagtggcatagggttttgtttgttagtttcgctcttgccttaccttcttatataataataccttattctttgagatgacttatgattgatttaacttacaacccagacagtggcttttgtggggggagggagaggttgaggaagaaaagaaagaaagtcctggatagaaatcccctgactttgagtcctccacgggacacaagcaaacagaattttaatctgctgcttctaatccacagttggtgttcagtggaacaaaccctctttgaaactgaatgcctrcttacaaccagtgytcattttggcggcgggggtcgggctgggggtgggttcctaaccacactgtgccctgaaagattagacctgcatgaagtgcagcctctgcttagagaggtaatcaagtattaggaggaaaaaaaaagcagaaggactttgaagttgcataaacctcgtcatttgggatttctgaggttcttagaaatgacttcgcctttgttgtctccaaaatcataggctttgccgatgcaccaccgggtaacagagttagatgtccctggcacagagtgaatacttgttcaatgaatggagaaagcacagctgaaatgattcagagaaaggggaaaaacttaagaaaaaggaagagggataaacaattgtcacatgtccagattgccaacagtggaatcatgacaaaaattttctgaaactgaagagccgtgttgtttaaaataaaaggctgaataaaatggggtcaaagcaaaggagctttggagtcagtttggattcagatactgactctgatgcttccacgttgtgtgacagccagggctggctgtgggaccctgtgcgaaattagaatgtggagccatttattcaaaaaacaggaaagaagtgccctccaaggtactaaaacaaaatgttttgccctttccttcccactgcttccctgccctcctttcccttctcttccttgcctcttgaattgtcacagtatttttaatgttccaagtaaagaaaaattaaaaatgtaattattggtatgtttttttctgttattgttaactcgtgcaatgccagttttaaatgcaaatttaaaagcatttaacttgtttgcataatcactgaagttacacaatttgtatttcatagctgttacattcctatgtatttctttctgaccagaacagaggaaacactgccaaaaactaaytctgttgtttttattttacttcttgatacatgcgtgttttaccaacacattctaccttcagcttcctgatgaataaggcagggatttccttctgtgtcaccatttggagcacaagtgtttggccaatataaggaaataagaaaggacatgataggggccttggtcggytgtgtttcttaaagtacaattgccttacttttgtgtttgaagctagttctggttctgacagaaagcatggcctctgggagctgtgggatcctccacttgtcgtagaggtaccatactcaccttgcactcgttttgagtcctgctgaactcccaagcattgtgacctcaccagagtcctgtgctcatgaggcatcatgaatgttagacaactttaagtgggcagcaaggaacgatggacaggatgtggcacacatatgacccatgcctgcttcatcgttccactctctcccatctgacttcaggtatagcacacaaagtcaaagacagagttattgagaacttcaggccagtggcaggagaacattaaaacaagtgtggctcttctgggtgtcgggtcccacatgactgcacagtcacatgcccagcaagccagccctagaaacttctgatggattcttaacctcaaggagtcttcatttcttcatcataaaattgaggccataatattacctaactcgtaggttgttcttctgtttaaatgaagccatctttataatttattactaatattcttggtacctaataagcctttaataaaagttaattcctgccacttctactgctgagcaagttttccaatgtgatggctctattgtggtaaagacaacctaatgcaaatgcaagtcagggtcattaaatgtcacctctggaactgagcaggctgcaaacaaaattttataagtcacaaatatattttattatctcttgaaaacagtgtacaaatgaataagcaaatgaaacatagtagccaaaaggctttggagaactaatccattttataaaagtataaggcctgaattccagtcccacatccctttaagtgtgggcaacttgctttcctcctctgtacctttgtttccttgtgtctaaagtgagagtgtcacacatgtctgacatgggccctaaaaattgttacatcatggcttagtgtcttacaacgaggatggacctaaggtaaaagttaagccacataaataaatgttcgtaataaggatgagatggagagaagaggtgtaacgaattttrctattgcttactacctgttactgttacctgctgaccgggtgttttcatgtgttaagcactgtacagctttctttctccccagacaaggctcttccctagcagaactgatgcacatgtacagcacgtcagtatcacgtagacacatactgttttgtagccacatttcacccctgtagaaactctaagcatgtgctctctgcatctgtttaaagggtcctgcataaataaagctctctaggtaggctgaaatgcctgcaattagtacccttctaagggcagagttttcttgatggagtaagatacagtagtgtgctggagttggcttgtaccttttcaggagatttatgagccagtttaaaagcaaagatggcaaatacttcacactcatcactttctgattcttttatttcattttgcaatttatttcatattatctgcgctctcggaagttatttacttttattgtatctgtgtggtggaaatactcatacaatgatgagctcttgcacatcgcatcccagttccgttcagtaacatcccattggtagtttgaaattggctatagtggaagcgtttacaccatagaatgggcaaacactaacaatcagggttcttcctccactccccctccctgagagattattgtaaaacatttaatagcacactactgagtaggaatcaaatttactgtcggagttccttttggaagatttgttaaaagctgtggctattgcagactattagagaacccattagaaagtgtgaaaagggaaaaggacaagaagagaatgaagattctttgagcatctgtgcctggcgatacattaattgcctttcctgtggagcccaattaaaatcttcctgaaggcgggctaggttgtatgatattacatctgtcttccagttgaagaaactgatctgaggtgtaataacctgcccaagttgatacagctaataaatgaaaaaaacttatgttggaaatgtatctgaatccaggtatttgttactcaaatgcttattatctttgccttctcgaatgggaaatgtgaatacattttgcaaaaagaataatgttaaatgctatagtaagatttttgtgagtataatgaattccatgttctgtctttcattcaagtatttgtacatcacacgctgaaagtaaaatgtgccaatcactggtcatggaaaggttctacccagggaggaatagttacctatgaagtgttgcaggaacaggggagaagaccaagggccatcagagcaggaggcttaagaaaacaacccttgcataggcttgcaggtgtgtgtctggcagtgcctgtagtctccagggctgcagggagagaggttggttttggtagaggtaacaagaattacaggattgtgatcaggcagacatctgtgggtagtttggagattccagccagtgggttgaacattgtttctgtggaatgcggttgcccatcttcccagcctcctctggcttttactccctggatcccttctagtgcagtcctagggacatgcaatccaaaggaaagttttgacatgacaggatcatgggccatgcccacccagatttcgtttcagtgagtctgggatagaacccaggtagttgcgttttaaacacacctccttagaggttctgaggcagcaccaggcaccacacttccagaaataatattgttttgtagcttctgtgctgtcttcccaagtaagaggaaagaacatgcatgtaatgataataatatctcttcctagctccacatcaccttttatacccagtctctatcgatccccacaattaccttgtgagatgttcagagcagttaattactcttcttattttacagttgggagaactggggatgggagaggttaattaagtagtgccaggtcctacctttagcaaacggaggacccggatttctcagtgttttgcaggtgtatttccttggttgcacagtgccccatagtggctactgcctacacgttctacaggtgccacttcatcrtggtctgctctggaaccagcctcagaaacattgtgcgttagacgggggggtcacctgtgctcccccaaaatattttgaaccccgttggaatgattctacacgctttacagtgtgtagttttgttcttgaggttcctcattcccagtttctgcagcatcctgtttagctacagaactccaaaacactcaagaagcaaaaatccatgatccaatctgttctgtatcattggatgacaaggagcatatcgtgagtggaatagatttctgtaggttgttaagtatttcggtccctttccatcacttaatgacagagaacaagagagcaaacgtgagccaggcaacctgtcctctcattctgtgtctgcctccagctagctttgtaaccataggtaactcgcctcgtttctccagaccacgggctcctcatttgtagaaagaaatttggagtccttgtaaggcctgtcccagctgtaacgcacatgatggcaaaccaccaagggagaaaaatatccccaggaataccatgttctttagcttttctaatagaaaaaaaaaaagacatttacattataagcaatgcactcatgattctattattgtattcatttatttttaggttgggaaaaatagaaacatattttatcaaattaattagatttaaaatagctcaatgacttgttttctccagcatttagtcattttcttggctgatttgccctgtcyctgtctagaaatgttttttctatgccctgcctcaggttggtgcctgggtcataaagtaaagcctaataaaagtaaaatcctctcagcccatgcttcttacttgttttcacttagactgatattttgttttattgcagaattgggactaatgattttactctgagttaagcaaccaagacagaaatgctttttttttttcttcacataattcagtgtaaacccatagtagccatacatgccttaacttgaactttacattctgagagagccagaacatttttagggtattttttttcttcgaaatcaaagtaataagcctacgctgttcagaaatgaattctaggtatagatttttgtcaaattcatctgacactttaaataaatttcagactgatgaattcagkgtttgtttgatagagatcataaacattttcctttctcgaaaagcaatctagggagtatgtatttgtactgtagttaatgctgtgttaagtcagtgtaatatagctgctgcaaacatttgtagagcaaagaaaaaaagcctttatttaaatcttgccaagagcagaaataaaatgagcaaaagcacactggagtgagaggcaacataaagattggtactgcttcacgactctggtgcagcagcattagcatttcatttaagctgcatatcatatacggaatgatcactcgtaatttcatgtctgactgtgtggcttcaagagatgtttgttgagtgaataaatgattgattagtgctttcttttgtgatacaaaactgtcatttaatcagcgtggaaattagttgcagatacccttattgtaattccatttgtatatttacataagagtatgaaataagaatgaatgaggttggatgccagtaagaatgaatggattggtggctcatgcctgtaatcccagtgctttgggaggccaagggcgggcagatcacttgaggtcaggagttcaagaccagcctggccaacacggtaaaaccccatctccatcaaaaaatacaaaaattagccaggcttggtggcggacacctggaatcccggctattcgggaggctgaggtgggagaatcgcttgaacctgggagacacaggttgaagttagccgagatcacggccactgcactccagcctgggtgacagagtgagaccctgtctcaaaaaaaaaaagaaaaaaagaaaaaaaagaaagaataaatgaacatctattttatttagtaatgaaatattcttggctgacacaggcacaatgaagacttcaccagttatttccactaaattataggatcatggaagataagaacatgttgtattgtctttttaatccccaccatctagcacagtgcctggatatataataaatgtctaatccacacacacagacacacaattaaatataaaaatgggtattctcatcaagggataggttggcagtttatatgccatgacttattcacaaattgggagaaagagatttctataggtcaaagagaggttagggcagtaaggaaaaagggccaggatgggctgagatgagaagataaacagattacttgtttaatatggatattaaagcagaattcctcaggctttgtgattcttggtgtcatctcagagacacacaatttttagatggtgtttttyttcccctttgctgtgctattttcctgtgtcatcctagttagttttatgttcatagtctgatgatttagccacaattagggtctcactsttctactcttcttttaatttttatcactgacatttcaagagcagattcaggtttccggcatttggcgggggtgcctcctaagtgtgttagactgtaaaactgctgaagscagcaaaagttttgtgcagtcaatcaaagcagggagggtataactatgttactgttttcacttttctctttttctagttccatgcaacacaaaataaactttcagacatacttcyaagtttccatatccattktatatggttgagttttagccaaaaccatttgtgagggaaggcctttagtgatctgggatggggatgctgaagcccattgcaccttattcatgtaattagacgtgataaaaacattaaaattatatttcaaaagttgttagtctatttcatagaagcttctttccatatcacaatggatatggagtgtttatggagtcagtaacaagtggtttgatctttataaagaggacctgtgatacagccatgtacctgcccgtgttgcagtacgtggtgtacagctctcagctgccctaccctttgcagctcttgtttcctccatgtgagatgtactccatccccaagtacctaacccctcactagccatttgttccctgcttaaatttttctgcctgcaaaagaccttcccaggctcccccattgaaattatgccctaagtcttttgtctcaccacagcaccttaagcatttcctcctcaatctccttcctggactgactgagtacttactgtatgccaggcactgttccaggctctgaggatgcatggtcagccagaaagacagatcaccctgcaggagcttagagctcactagagaagaaaggcagtaaacaaataagcatatccagtggcatcagtaccaaaaatccaaacaaagatgtccaagagaggtagagagaaagggatgcaaacatgctggagggaaacccttactaaataggtggcatttgagctaagacttcaacaaaactaggaggaagccaagccgggttctagagcaggcttgtcccaggcagagggaagggcccaagcaaatggccaggagctgtgtgagctgactcaggggcagcaaggggtcgggtaggagggagcaaggagcaatgggtaagaggagagcagagagacaagcaggaacacagccttgtaggccacggcaaagggtaatttttttttttaatttgaagtataaggaagaataatggagggttgagcacaggaattggccatgttaaagttccatttgaaaagtgtcactccgactgctgcatggagcatctacagaggaaagacaggatagaagcagggaaaccagttcagaagttcttcatagttcaggtgagaggcgactaggtccacatgggggcagtacagaaggcaatgcgttgtcagagtctagatgtgttttggagttagggttatctgggtttgctggtggttgggattggatgtggttgtaagtggaaaaaggaatcaagaaaaacaccagagttttagacctgggcaactgagtgactggccatgctatttacgggatggggaagactaaggaaggaaagaagaataacaaatatttgtttggacattaagtttgagattctcagaacacatttaagtggcratatcacatagtttattgattatgtggatctgcagtccaggggagaaaccaagggtatagatatcaacatcagtatatagagaacacagcacaattataactatgcatatgtgtagcagatgtgtattttccatccacttccaaaagtattcaaaaaatggaactttaactaagttcaacttaggctatattttgagaccccattccactgagaacagggaagttttactgtcaattcagccaacccttttaggtgattaaataaagttgacattgtaaacataggttctttattctccctctaactcctgggggcatagacagcctcatgacatcaggaagattgtctagtccttagttagcatccacttgcacatatgttgtactgtcgcagcattrgcagccagcctggtctcctgctttgtgaagcattacaacgtgtgctgccatctgctgcctgcccccactcccatgcctgcacaccttcttctttagttgtgcagatttttccttttttggggcccatctggctgtcctcccttgccattctgagcacagacaactctggctcacacattcatcacagtgcttccatttccagtggggtggggaattcctgcaagatcctcacatctaagatgcagaggtgcagagtggatcacgatcccttctacattcaatccccaaacttacctagggctctagtgtcctcttcctcttggtgctagcccaagagggtttggtgttggcaggatatgggaatcctctttggagacgcttgctggtatctaactcatctacttcaactcccactcttgttttccatcagcccagagataatttttatcttcccttggccaaaaggaaactggcttagcaagtattctttccattttttgaccttccttcttcactccttgaaacacagcttttgaacttaaaagccaagaattgacattactctcctctgattcctttgccccaattatcctttagggctggggagtcttgtgtttatccctgtgaatggaggaaggttgtagggtaaaagggaatggaaaaaagtcaagtaaaactacacagtatcctgaagaatttgtgtaatttctctctttgccacattactgtcagctgagtgcgggagaagttctttttgatttgctcagcatttttacctagacttcaatacagagcaggtgctccaatgtctgcaaaatgagtaaagtgagtaaaaaacatgagtaaagtgaataaaaaagtaaaatgagtaaagtaggtgaatgtgtagtgcatgatcagttctgtgctcatgtgtacacatgcacacatatacaaaaaagcttttatgctgctgttcacaagggaacagtgactcactggccatgactggagtttattgttaagaagaagatatgacagcaagctagtcctcagaggtagaaacctcaaaaattattttgtaatattcagaaattgctcataatctagtagtatctttcttactggcattgaaaagtgagcactggacaagtagactggagagaaaacacctgacctgtgtgtaggttattcttgtcagcagcgaggcgttgttcttgagtgtcaccccacaacctccttcggccgtgctgctcacacctgcccaaagaggccactctacggacagagaacactcaggtcaagatgatcagagggcagagctgaaaaccctacactaagaaatttctttgaagggccatattttgtattaaatattcaagttgattttatatttgactccagaacatgtgtgtatatgtgtgtggttttttttggttttgttttgttttgtttttgagatggggtcttgctgtgttgcccaggctggagtgcagtggcacaatctcagctcactgcaacctcagcctcctggatttaagcaattctcctgcctcagcctcccgagtarctgagattacaggcatctgccaccacacccagctaatttttgtattttttggtagagacagggtttcagcgtgttgaccaggctggtctcaaactcctgaccttagatgatcctcccaccttggcctcccaaagtgctgggattacaggcatgagccacggtgcctggccgtattatgtgttctaatataaaaattaatgagtttctctcagcccaagtcttctattaaaatcaacacctcatggctggcttttccagtcacttctatggataatgtatcccatcataaaaagcaagatgttaggtcmttagcaacttggcattttctttgaataaggtcttaaaattccatcctcaaaaataaaacttaagtaatgtcgatactactctaccacagcctttacaaagccttgcaaagcaaacagcttccatctgcacatgcccagaaaaatgcttacctgtctatgactttcactggcacctctgcatctgccaaggtgatttttgtgtataccaggatcatcttttcatttacacttattttatgaaaccaaaaattgacccagattcctgtggcatattattaaatctaaatattgactgttcctcatgtcatgaaaattgaacaaattggtagaatatctaaattcaaaatgttcttgccaatgcattttttcttggttattttcaacaacactgggaggtgatgagagcagatgtcattgtcaaatgtccttattttgactgccttcaaagataccaggtcctgtcctagcttcaccacacagtaacaagcagtgcttttaagtaattaataccttgctgtcactcatttttctcatccataaaatgggcttgatcatagctcctcaatcataggatgtgaaggaaactgaaatggtaactgctcaacaccatagttggtgccacgaatgtcaaacagaggagggtaaaatctcaagggtattagtgaaaaagccaggtgaagcttttgtcctggagatgagcaacaatttgggtagccaatcctcccttttcccttccacactcaagtctagatcttgaacaaacccatttgagggacagtttgggtctacagagactcacaccatgatccgtgtctctcagtggactggggactccttttctgtgggaaggattaaaaggtggagtgagaagccagggttgttacccttgggttgtccctcaacatggaaagaggagagatgccattatcctaggcagttaggagccaagwtggaatacatgagtgcttagctcagcctgcaggcacacagcagagctgggatttttacgtatctattgtttatgggagttatagtttatttgcattttctcttttaaaatatgttattctatgacaactctgtgaggttgggatgctcttcattttacagaagatgcagccaaggtgcaaagaggtaaagaaacctgtccaagtttacatggatagtaaaagtcasgattgtaatcgttgttccaccggaagctcagcactctgtgaagctttcataaagcattatagcattcagtaattcttgtcttgactggtcatgtcaagaccagaagaaagctttaactaaatctggagttccgtgtaaaatgttagatgtatgttttgtgttaccagatcagcaagaattgtcacttaaggggattgatttggaaacagagatgtaaatataaatgatttgtcttattttagaactttttacaacttttattacaactttacttttataaattttcattgtttaaaattattaaatactttaaatatgtggtaaaatagaaaaactaatataataagagtttatgtacctagatgtaacacatattaatattttgccatatttacttccaattttttctttataaggaaggaatactttagtaatgaagcaggcatcccctctctcactcatccaaacccctttcctccgtcctcagaggtagctactaggtgatttatattatgtgtttaaacattttacataaatggcctagttctgtatgtttgttttgcagcctctattgttctctcaactgttacacaggaagtttacccacagagatggagctaagagatttagctttgctttatctttttaagtgtagctcttaccacgtaaaacaccatttccaaagagagaaacaaatgccatgtggggcctttgcagtcctctgaatgggtgcccctaagcaccctttcttccctgggttcttgtgagaggcctcactggtctggactgaagagagattctggaatttgaatctatagtatcctttcgttcatgcttgttactcaagcatttaaatacttcccaagaatgaagtcacttctccaggggcaaggtatcatrtgctatatatgccaccttatgatagacttaataaatatttgctgaattatagcagcataaattataataagctcattaacacagtgaacccattagaagacatttgtcaggtattcagtccctgacagggttactttttatgactgagacactagagagaggtctttttttttttttggaaaaaataataaaaaattccttaaagtatatttatttatatttttaaaaaaggatttgagaaacatgaaacatgaaaacatgagagaatacttcattagccactttatacaataaaataagccataaataacatttttgcaagtaaaaacactcaggttacctaatgatgggtacactaatgacagtcacaactatttaggcaggccttattctgtgcttattagcttgagtcagacactcgtgtttatctaaaccggggcgtgttagtttattgtcagttaaagagaggtgcctcctggtaaaccatcaagtttatacacatggcaccaatatggtgtattataatacatataatgcaacatataaattaaattactgtatgtaatagatattaaattatttagtataatatatgctwatatcatacaatacaatacactaatatacagtgaaatccatgtgtgttatgccaccttttccacttttacagaatttcaaaacttggactgaaaaatattgtgctctctttttgggccaggcacagtgctaagcacattactttattcattcatctcataaagcagtgatgatcttacaactcacatttgatgaaactgaggcttatccgaaattaaggcttatccaaaattatgcaggtgccaacagggctttctggtcaaccgtgcatggcctttactcctcagaataggtggcattatctatctcactctgtaacacccgctgaaagaaatgtggcctctgctggtacagaagcctccttgtaaaagccatctgctggccacctgtgcttttacctcaaagcccacttcacattttaggagttcacctaacctttcaagtcccaatggcaggtatacatcttccatcttcttagtattagccatcaggactgaagcgaatttacagctccagtcatgagccttggcacatttctggtatgaagtataaatatttgaatgctaattattgtaaaacaaacaggccactgagtccaaagcagatgaatgctgtttctggaagccagcagaccctaactagtaggcagcttgtgttgtgtctctgcacaatcactgatagacgtctggaatcatttccacctcccccttcctcaactgggagatgcccagagtggctcacatatgtgaatctttgccttttaaactagttcccatctgccctgtctcttgagcaaaaaccctgtactgctggaatgacctgacccagaaagataatggtatcatcttctaagagcagctcacccttgtccagccccagctcacatgagtctgtccagcatacacattctcatccctggcacactgggcccaggcattccactggcttgaaatcactgattctcctccatacctgtgcatccttcgacgtccagctctggacctcctcttgcttgaagccttccaggcttactttaatccatattgcttgtcatttattcagcagtcctgggaccatgcaacagcaaaggcagaactgttttgccttcctaccgaggtagaaaacccctgcaaccatgggcctaacacctgtagtctctttggaaatgttagtaaattggtagcccattctgcctaggcaaaatccgcctggcagttgtccaaaaactaagctatctctgacgaaggyggggcatgggaaagtatggattgtaaagcctaactgggaacatcatttactccagcaaacaaagatacggatgtcagaggatcacttgttctgctaaatgtagggagctggagtgaaattagacatagtactttgtggccaaaaggaaaaataaatcttattaaaattttaaggctggtgcttgagttgaccccagcaattttttctggcttcgtgttctagtgaaaaaaagacaggggctttgggacagtaaaccagaagggaaccactcggagctttcataggcctaaggagacaaataatgtttactaaggaatttgttgtcaagattaaactgagacgaggaatcgagacaatgtgagtgaggtgctagatacagtgcccagcacagcacaggcatttggccagtggcagcctgggataccttcgctgctcgtgcacccaccagccccctgactcctrccacgactgctgttaatgactcaggcctaaccctacaacagcctaaccatgattttgcctggagccacccagacacctctgccaggctgagcagcacagtaaatgaggaacccttcccctcctgaaccaaccaacagcccctggtcaggcaatgccattgcagtacattccccccacttattttcttaatttcagacattcattgattgcaggagtatttactgggaaccttccacaggccagcccatgttggttggtgggaatacaagaatgaataagatgtagtccccaccttcgggaaccttacaggcatccccattgtgggttactcaaacatctgaattttacattatccggaagcccagccgccagtgttttaaacttatgcctcaaccaagcgaggtcactgggtcggccagccctagcagtgcccttcctagcaggtgggattgctccatgcattctggtgtcaaacagcgccatcacaaggagggggcactgcctgcaggggggctgcccttctgaggaggcaaggacttggcaatcccgcaggactgtactccttagagagggggatgtcctcccgctaccacaggctccgctgacctggccgacctttttctttctgttcttctggacattagcttaagaatgggcagaaactagagggataatgaataagggagtgcctctttggtgttctgcctttagcagtctggagactttctcacatttaccaaaagcaaagaaaagagaagggcccatttgtaaaaagtgccaataagggtgttaagagataaaagaattccagctgagggaggtatcttcctctttgctgcagactggatgttttcttggatatgtgacgggagctaattttagaaaaaatgattctcgaaagaaaatgactgctgaaggccattaagatacacgagtatctcaccacagctcacatgctaaatcttctttattatttcaacattaaaataaatacttagacttagcattagtccagacaactctttgacacaaaaaaaggacgtgagtgtgtctcagacccacagaaaacttggccagctggcaattaatagcagacacatcaatcaaaatgtgaaaaaaaaaaaaaaagaaagaaaaacactctccagtcaagaaaatgggcaataaagcttgtcaaccacaaggcttaagagggacatcgttaaagtggtaagacctagaattaacttctctttgcccttgaacaaaataagaagttagctgcattaaccttaagctgcagtgtaatgttcctctgtggcagcgtttacatttcatagtttyatctgacaactcgtaataaattgtgccttttggaaaatgtcatttctctcagaagaatttgaaggagaatttaaacactcttttgtgctactttaactatccctaagaaatgtgactcgtgtctttgtttgggcattagtatttaagatgtgggcactgaccttcctaagcaagtggaacaatcaccgtgatttccagcagtgaggcacttttgattttgcctctaaaaatagaagttccctagaggcctggccagaaagggcagagaacagggagaaagaatggaaatrgaaaaaagtagtccaaataggcagagaacatccactgggaattcaracctttgcattgccaggtaataatgttagaattgcagtggaaaggaaaagaaagtcacacccaatccagtatgagtataatcttgccagtgctcttcccaggggaaaactggcaagaactcgacagccccagtcacttaaaccatcgtagacaaagcacatgtgaaggtgtgattaaggagcactgtcccattggtgcctggggacagatgatttgcctsgtgggcctcttatatcccccgatgtcatttatatcacaccagctaatgatgggatatggcagtgagtattaccgacgactttctttaagttgtataattataatatttcagatatactatatcagaggaaaagatgtgttttctcttgcttagccgagccttcctattaggcttatggtcatttcaaggaaaacgatgatccagggctgtaacattgatgatgtcccttgcctctctctaacctggatttgttacagatatgctgatgactgagacccatgatgcagatcgtgatttctgtagcattttgctagcagaggatttgacattgccttgagacttaatcattttggagaatgttctctcaattggcagcagaaggtttgcagctccagaggctgcagtggaggcttttggattattaaaagttgagacctaatcacaaattgaggcagtgcagcaaatccactccttcctattattcytgtgcattaggagccacttaagctccacctaatgaagagtcttcattctttgcattgtaatactcctttaaagatgctcagagagcctcacaaatcctgcctctttctacttcccagcacagcgggcagagagagcaaactctgccacagggtcctggcaccaacgcagccccctctatcctgccaggtgcttcttctctttatttgtgtcctctgacatcctctcattcttctcccttcctttcccatatgtcatctccccatgacaaacaagggtagtttcttctgggtagaaactaggcgttttcatataatggaggctatgtctgtgttgatgcagagaaaaacacaaaagccctgtaaaatatttaaacctgagccaatgtgagtgaccatggcccaggcttatggtcttaggaagtcctgagaacgtgtgcccgaggcaactgggtcacaggttggttttacacactttagggagacaggcattgtagataaaatcattaatcaatrcatgaaaggtgtgcattggtttagcctaaagtggtgggatattttgaaatgcgggtttataagtcataggtacattcaaagattttctgattggcagttggttgaaagagttaagctttgtctcaaggcttgaagtcaatagaaataaatgcttgagttaagaggggttgtggaagccaagattcttgttatagagatgaygcctcataggtagtgtccttcagagaggatagatggtacatgtctcttttgggaacttaaaggtgttacactcacatttaatctctcctaggtccaggaaaggcctagaaggggaaaggtaggctgcattaatggagatgctctaccaatgcaaatttcccccacaaaagacagctttgcatggccatttcaacatatgtcaaagaaatatattttggggtaaaatattttgatttccttcagggtcttctaactgtcacgtgatgctayaccagagtcaggttggaatttggcatcttatcgccacaaagagtttggtcagcttatgatgtctatkttaatattaatcctggtcagttgtgtccacatatcaaagggagagggaatatatggaggcctgtctgacctcccttccagtcatgactggaaattcagtttttcatgtttctctggggtccatctggccatgagggggtctgttgggtcagttgaggcgcttaggaatttattttcagtttacatctgtgtcaaccttaaataatgaggttcaggaaatatgattaagtacagagtttatttgagcgcaaagcttgaggctggccacctgggaaagcaccaactgcagatgaatggggtcagtgtttccaaaacggagaagttaaagtttcgattatataggcagagtcagagaagttccagcagaatcacagcattttccatacaagaccaggtatatatgccacagctgtttgattggttacagattgttccattttaagcaagaatactttattattccatgaggaggtgcagtgatctgagagggtcttatctctggcgctgcttggtctttctaattatttgcaggaacaaaaaggcagaagttgcagctgtctgacgcaggctacatagccacattcctcccaaggctcaagataattttgagttccaatagctttaagtttgaattattttaattttgaattatttaattttacatctgataatttgaatcctgccatgaaatttcccaagttcactttctcagctcaagttcctgcggcttcttgactcgtcaaaccaaggtcatattagattatctggtgtkggggggcactggctctcagccccaagccctctaggccagagattttgagctcctcccaacaggtcaaagctttgtttttgttgtttcacttcccaccactgtgcacacatctcatctttgcctctgtttttaaaaaacattttctggagcaaatgctgaaatcagaaacctgcatttctcattttttagttgcccaccagagctgttgctcagtgcagggaaaccaggaaatggtgactaccagtcagaaacaaaaagactgtcttttaaatcagctgctgcagccttggtattcccagcatggaacttctaaaacttttggaatttccttagcgataggactgttttcattctgctaatgagggaactcactttgtccccagatagcttcagcttgggctctgatcaccagaaagatcaatcagatgaaattgcagggtttcaggaggctgaggcaggagaatcacttgaacccggttggcagaggttgccatgagacaagatcgtgccaccgcacactgcagcctgggcaacagagcgagactctgtctcaaaaaaaaaaaaaaaaagaaagagaaaaagaaattacagggttcgaactttttgaactttgggctgcccgacatccagggagaagagtggcactggagattaagttcactcacatggccagtgatttaatcaatcatgcctatctaatgggaaccctaataacaactctagattctggggttcactggagcttctggttcatgaacacactgatgtgttgggagggtgatacactcagattccacagggaaagagggtggaactgcatcccccctagatctcaccctgtgtgcatcctttacaataaaactatagccataaatctagtactttcctgacttctgttagtcatgttagcaaattatcgracctgaagggtgtcctagagtctggggattggtagttgaacagttaaaagtgtgagtggctttgagtaacttgtgagtaacttgcccagaaccacagagctagcaagcagcagataattacatgcaaatccacacagctggcatgtgaaacgagggcagtctcctggaggcctgagcccttaacacatggggtctacactaactcccagtagcaagtgtcagaattatactgcagtgcacccaatgggatgcaacagaataactgttattaaggataattttgcaatttcttaatagaattcttgaaatattagaaacaccttctagacctttatgttggtcattacagctcaaagcactgtccctgggtggacaggttagacagatcatgtggaaggtgctactcaaagtgtgggcccagactaatgcacatccacaactgttcattaccagttcctggtaagatgtttacagaacttgagagcaggcatttagaaacttttatagcaattgtacaatgccaagacattcagaaatggaaatattaaaataycacacagtgacaatttgggggaaaaattacccttcaccacagatagtttggggagtgtaaatttagaaaatgtagccttggttggtatgaccagatggaatcagaacttactgtgaaaggtgtgagccataggatgaagcagatggatttgcatgtaatatctgctgcttgctmgctctgtggtcctgggcaagttacttaattgctctgggactcagttccctcatctagaaaatkgatatgacagtatttcctatctaattcratgctggaaagaccaaataaaataatccagaacaagtgctaaccacagacctgtatatatagtaagctaactgcgggtattaattcttctacgctcgcttcttggcatccgtggttccggcttggttaaagtatattctgtctatgtaggtttgatgtattactgtatataaaatctatagccttgctctcatgtgaatacaaaataaagtaaacacagtttaaaagccacaatttatacatgtaagcgaatgttgcattttgtagaatccctctgagatgctagagtcttatctgaaaatgttgcagttgttggaagcatttttaggacttcttctttttggcttaatttttctttttaattattatgggtataagatagttgtatatgttactgatgatttctggaacttatttaacatttccattagaacctgttccagtgatcttctgatgtaacaaatcaccttaaaatgtaggagtttactcagcatcatgcaatatgcccctgtaacaaacctgcacatgtacccctgaatctaaaatttaaaacaaatacatatataggtatataaatgtatttatacacatctatacacatctcaaacaaaacaaataaaaaataacttcgtggtttagaacaacaatctatcattatcactcaccgttgactgactgggctagaccggctctcctatccggtcttccatggggttgcagtcagatgttggctggagatggagtcatcgggaagtgcaacagacgggacatccagaatgacttcttcgcgcttcacatttggtgcctgggctgggatggctgggacggctggaacagcttggggctggctgggtatctctcattccacgtggactttcctagcttgggcttcctcgatgcatgctgggctaagcttagggatatgtcttcactggtgtctggcttcccccagagtgaatgtcctgagaggcagaaagtggaaaatgctagacctgggcctggtaactggcatagtatcaccacagccatattctactagtccaagcagtcattgagcctgtccttatttaatagggggagacacagaatctgcctctctctgggtggagggtcasagaatctgtgtccacctttaacctgccatagagccacaaaaggaatgtagttttcttagtttagcacgtcctttcccaccagcgacattgtatgacttcccaaggtgaccacattgaggtaggaacattcattttgatttcagttcctatcttttttagtgaaaacacaaccattgtattacagccatgccctacatgcctttgtgttttggcattggtcagcctgtactggggaaggatcgtgggggtcacacatttcccctggcagaccctcccctcagaatcaccctactttctgagtatctgatttctactaacgacttccttgcagtctgtgttgcctccctgcactcttctctaccttacttgccaccaaggaatctcctgaaagcccatggaaccaatgcataactcctttgctctcagaacttcactctctccctattttttatacagcatgtgccccagacatccaggtaggcactccagaccctccacagctggaagaggatagctttccaattatgttttccccaaatggtcttgcttcttcttccagcacccccaccaaaacacycatcatagccacagacacacaaggccctctgcaaaacgcacacacaaacacaagctcagatcatttacccagccaatatttattgaatatctgcctgtgcttggtttagtgctcagcttgaagttccagcaagcttagttattattccacaaacataccttaggttattttccctttccaggactttgcttaagttcctgaagttagsagcatttcttattaatgtttttgtgtttcctttggtactaagtgctgtgtgcttcccacacagcaatacatattagttgcaatgctgtacagaggagaggttcattctctttcattgtatcttacttttcatctctgccccttttgttaccctttctctgagtctcatctagaatcagcaagctctctccccatctctcctcctatttcaagttttaatgtacttccctcttatctcaccaaaagttcacggtaagggtgaagtaggagggtagtcttggggacattgttgaagacaacaggcaccctgaaataacattcacccacagacacagtcactgaagcattgctttattcagtgccatcggtggacttctggtatgttctaggcagccttccagaatggggagaacaggaagaatcagatagggttgtcactccttagaagtgcacagcagcgctgctgtaaaatctatgagctctgagctttcggtggtctgataggcagacaaaaggggcaaaccatgcttacctctctggctttgctttatcaaattggaattttatcatctcagaagtagggggaacttgtgggcaggggcactactgtctatcaaagtgggaaggcagacgtgtccctgagtcacatggggaggattttgcaaatatacacccatccatcgcctctctccaaagactcacctgagatggtgagatcccttgttttgcagaggttggtgggaggtggggggcggggagggggacagatatgacacctggatttagctaaaactcctggatgattctggtttctagtgccccttctacaaccccaccccaccacctacagaaacactgctcaagatagaatgtccccagcagcatctgagcagatgccccatgttggctaactgccatctggctgtttttcaggttcattctgccacccctctgcattaagacacaaggtgctgaccgcagagacctgccatgaaaccacacttgaagcaatggagacaacgaatgcttttcggaatattcgcttgggggctcctctttttgctgattttcatctacttcaccgacagcaaccccgctgagcctgtacccagctccctctccttcctggagaccaggaggctcctgccggtgcaggggaagcagcgggccatcatgggcgccgcacatgagccctccccgcctgggggcctggacgcacgccaggcgctgccccgcgcccacccagccggttcctttcatgcggggcctggagacctgcagaaatgggcccagtcccaagatgggtttgaacataaagagtttttttcatcccaggtggggagaaaatctcaaagtgctttctacccggaggatgacgactacttttttgctgctggtcagccagggtggcacagccacactcaggggacattgggattcccttcccccrgggagccaggcccacgggagggggcttttccggctgcacaggtccagaggaggcgggtgaagaagaggcaccggaggcagagaaggagccacgtgttggargagggcgacgacggcgacaggctgtactcctccatgtccagggccttcctgtaccggctctggaaggggaacgtctcttccaaaatgctgaacccgcgcctgcagaaggcgatgaaggattacctgaccgccaacaagcacggggtgcgcttccgcgggaagcgggaggccgggctgagcagggcacagctgctgtgccagctgcggagccgcgcgcgcgtgcggacgctggacggcaccgaggcgcccttttctgcgctgggctggcggcgcctggtgcccgccgtgcccctgagccagctgcacccccgcggcctgcgcagctgcgctgtcgtcatgtctgcaggcgcaatcctcaactcttccttgggcgaggaaataggtaggtctcagcggggggaccaggtcgccctgtcttgagccagtgtgtccctgggggycggttctttctgagcgcgcctctggatctctgacggggcaagctggggtctccgcaccaggtgttcctaatattagctggagattcttcaggtgctttcccattgctggcacagaatgagtctgcctggggtcacagcagaagtactcttcgggagactcttagagcagggatttggggaatgctagggagcaggaagggtcctccccatagctgatgccagtaggcagtggaaggaaagcgccgccctttgcccccggcgtccttctcactgttcagacttcgtatcccatagaaaccgcagtctgcatggatatgcccccaggctgtggcccctgaaagcccggtgaacccatcctgcagtgggaatatgggaagggaacaagaggaggaggcaagaaagcagaagctgcccaatcagggcgtcagctccaaagagcagggtgcatgaagataatattggttactgtgagctctgagaagagcccagctgctgttgggaacatctttcccatgggagaataagttccggcctcccaactgttggcgcaaatccaacctttggggcactgccagtgcacctaccagggaccttctccaagatggtaaataacatgcaacacctgrgcttcctccctccctgccaggctctgccttcacatccctgtcaagagccctggagcacatgtttcccagctcctgtatcagtcagggttctccagagactcacaccaggaggatatgtgtctatacagagacagatttattttaaggacttgactctcatgatcgtgaaggctggcaagtctgaaataggtagtgcagcccagcagatgggaaactcaggcagagtttctgtgttgctgtcttgaggcagaattgtttcttktttaggaaacttcagtctttgttcttaaagcattcacctggcttgaggaagcgcacctgcattttgagagtcgtctgcttttctcaaagtctagtgatttaactgttaatcacatcttaaaaacaccttcccagcaacatctggactagtgtttgaccaaccagctgggcactgtggcctagccaagatggcacacaacattagccatcactatttcttcctagttttcaagtaaaataccaattctaatcttttttgattgatggggscatggcagggttcaaatacgtttccctcctgcagagtggtgtaggttctgcaccagatgggcctgcattggctctcctcagaattccccttcctcgctggatcacattcatttccccacctgccccagactctcaccctgtcttgccagagatacccaggctcttgtgttgccatagctgggctctccctcagcagtttcagatccctttgctcccggaaccccccttcttcccaggctaattccactgctagaccagtcagcaagcagcttggccctttaggctcattcatttgacaaatatgtgtttagcccctaatatgtgcttgattctgtacgaggagcagtaaaacaaatgtgagtcaaatacagcgtcagcctcaagtccagatataaaacaatcatgtcctgtacactctcacagtaggcgttgttagggcataactggtctggaagtgacattccgggagtgttgctccctctttgcaaataagtaatctttgttgtcttcattttaagcggatccattagttgttctgtgtccttgaagagtggcctatgttccagagttctctcggaatagggtgaagccactgtaggcaggctcagaagcccagatctcagctcagcagaagtccttgggcatgaggctgaatgagaaatatttttaaagttaaaaaaaacaagacagtgagtctggaatcaaggtctggggtacctgtgtccctgtgctgacattacagcaggctcataataacacagtccatgtgtcatataagcttgtagccaaagccagagcagagcagcctgcaatttattaagaagaagcagtggtttagaggtccccggggtgaaataacaccacagttctttctcatttctgagagccaatattaataatgtggagaaggaatttaagtattatgcttgaagcaggcagtaacttgcttccggtttggttttgttttaaacacctctgcatcagaggtgaagatctggattgctcttgcatgtcagtgagcagtccctcgttctttttttctgcataaatatccctgaccagaatcttgtaaactctgtttacaatttggaagagaacgtgaaagacgctgagaagtccatgtttctgggaaacttgaaatgccagttatatctttgttaatttctagtatccaaatctaatttatttggcatgcacttgcatgagcctttatgattagaactgtagaatcacaactgaagaacatgcctggaaatttctttaaaattctctttattgttttgtctagggttgtttggatcagattttgtatctactattttaagaacatgtaaccatagcatggctcaatttgtataaacaaaaagtttcatttgtataagttggtatctcagcatcagcagtgtacatgccaggtgccgacctcgctccttcctgttcacctgaatatatgcaagcaaacccacatagttatgaatggcttgcagaatacaaacaaactctggcagcaaattccttcaggcagcttagaatattgggggcatggtgtagckaaattcktgttggccgctaagcatctacttgtgaattggctaaatgaagatcaaaagacttaccaaagatcacgatcttatgaaaaattgaaggcagagctaggaagtgtctcagatgatcactgcttatcagccctacctatgttctgccaggaggagccctctccatgctgacgtcaaagggagacccagtcagtctcaggtttgcttactggctgccctttcgctccccctggtgtttgctccactggcagtgcagcccccatccccctacccttctgttggaactgggtcacacaatggaattggttttggttagaaaagtagagcagttgtaaacacttccactgtgaatgtgttattgaaaaacaaactaattgttttggaaacctggatcattctttcctagagttataagatgatctgttttcatccatgcatataagcaataataatttgcttctatgcagtgctactagcattcatgtggaaacatgttacagagcagaaaggtctgctctgaaccaccagtaatagccttcatgtgggaaaccaagatctgtgtacctgaaactcgaattctggcaagtgcatgggaaatgggacatggagggagagactgggggtgggatgcatagactggtggagagggcttgagatttgacatgtcctgttaccttttaaaaaagcaagaaagaagaaagcagtccatatactcatccaattagcattatttattgatcaccaactctccaccagatcctaggctagacacaaaaatgaataggtcacaggctcaactatccataccggcacacttcagtggtaaacagacaattccagtgttgtgggttggagaaggacrgagagatatgtaggctgacaaggcagaaatgacaacggattcctaactcccctgagggctggtagagagaagarattggtaaagactgctccagggagaggagaccaagctgaaggcccagcatcatatggaagtgagaaacagcatgttgtgcaggtggtgagagctacagggagtacatgggctcgtagggacagaagagagaagcaggcttggaaggcagatcatcttcctgsatgcccttgcaagccactctatgaawattagacttcacttaattgaaatcargtaccacttatatagtacagacaaggccctgttcaaaatgctcttgttttttttktttgtttgtttttttgcttttttgagatggagtctcccgctgttgcccaggctggagtgtagtggcacaatcttggctcactgcaacctccacttcccaggctcaagctattctcctgcgtcagcctcccgagtagctgggattacaggcacgcgccaccatacccggctaatttttgtgtttttagtagagatggggtttcatgatgttggccaggctggtcttgaacttctgacctcaagtgatctgctcgcctcggcctcacaaagtgctggaagtacaggtgtgagccactgtgcccaacccaaagtgctttttatgtgctaactgttgtaaaccttacaaccctaagtgatagataactttgttcccattttacagataaggaaatgaaggtacctccagtcacatgtgcagagtctggattcaaaccccagtctgggtctccagaaacactagctctcagccctgtgcccatgatgtgcagccattgcagatagtcactgtagagagatcactccagagcctggacttgagggtgcaagggaagtacatcaagaggtgagggttacaggtcctggggagaaacagggctcccagggtgatggagctcccaaagcgatgctttgtccaatcccaggcaggccattctctagtgactggaggcttgctctcctgctgtttgaattttctcatcagtgtaggagagggggatgatgtggtgaatggggcctggggcagggcggtgaccgggtgctggcccagcagctccttgaagggctttaattttccttccatggatgcacttgtctggctccattctcaaggacaacacagcatggttctggcctggaaatgccttctccagaaatggaacttgactttcttccccttgtatttgctgtctgacctattcctttttttctaaatatgaatggayagcttctattctcacagtgcattatcaaggaatgcacagccaggtgtacgtttacagaacgtgtctgtgtgagagacagtctcagcgcaccctccccttccatcccaaccccacgctgctcacagtggctgttcatagagggcttgcactgggcctagccacaagcctacatgaccctgcctccctgccctctccatgcaggtggccttttaactctgcagactaataccacctccaaaggaattacactgcgttatctttctgtgccctgtgcctcgtgaagtccttggatggtttagagcacagctccacaataagacaatgggcatttaaatgctgggatgttttcaagggtgatgcaattaattcagatttattagtcaaataatagaaatgcacccaccgcttgaggcccttgggtaggctgtgtctgaggggtgggtagcgtggtttggagagaactgagattgaggattgctggcatcacacttcctctctggcttagggctgattccctcccagcacctgcagtcacctcgctggtggagtctcctctcactgtctgcaaccagagggtttccctagcttagcagtgggaacagtgagatctaagcttacccttagcctttgcaagaccctttcgagggtccatgagaaaaaactattctggtaagtatactcagagttcttttcctttcagttgttgacatttgcactggtggtacaaacacaatgaatgatgcatgagacaggggcttcttagcacaagtcagggcagcagaacccaaagctcaacctttgaatacacgtgtttttcagattcagtggggcacatggggaaataggagaaaagcacttatgtgtgccagttcacaaaggaaaagcccttgggtaattgcactgtgagccgaactagccacttttttcatgaaatacaattttaacttgaaaagaaacgttaattattcagacttggatatttggcagatatattctcaaaaaggaatcaagcgagcctgtcacttttaggaaaataactgatagtatttgttgccaatgataaaattcaagctttgaaccatgaacttggaagttttccagactttaaaaactggggaactccatggtgatactaatcaatgtggtgtttcaattctttttttttttttttttttgagatggaattttgctcctgttgctcaggttgtagtgtaatggtgcaatcttggctcactgcaacctctgccccctgggttcaagcaattctaccttagcctcccgagtagctgggattacaggcatgcaccaccacgcccagctaattttttttttttttttttttttttgtatttttagtagagacggggtttctccatggtggtcaggctggtctygaactcccaacctcagatgatccgcccacctgttcctcccaaagtgttgggattacaggcctgagccaccatgcccagccagtgtttcaactctttataacaaaatgcatcactatttggaatgtctgactaacatattatatatatatataacttatgtataactatgcctagctgatagttttcagctgatcattgtacaatattatacaattatgcrtgagtgaaagatccattttaagagaaaaatagaccacaagttttaatgtaacagagcacaaaaagttcattgataggtttcagattccaaattrtaaccaaccctaagaaactagccctcgtagagtcttgttaggtatcaaagaagaatattcacagttctttggaaggatkctttaaatagctctctcaattcaacagtgtgtctgagccttcatatacttcaaataaaacaacatattgcaacaagttgaattcaaaagcagatgtgagaaaccaactttctaaaaaaccagaccttaaagagacttgcagacattaaaaacggtgccagtcttctcagtattcttttggtttttgaaaatatagaggttttttaaattgaaaaaaagctgttttaaaataaattaatagacattttaaaattccgttttaccttttagtatggtaaatatcagtagatatattccrtctgcctaaaaagtgtttggattatcaataaatttcaagagtctactgttttgggtaatctagtttttctacctcaaatattatttgaattttttgacaaaacattattcaataaaaataaataagaaatccattacctcaataaagtatgaacaaatccttaaattgtgaagtaaagaactggttttaacttggaggcattcatgtattttggcatcatttacacaaagaatagatccccttgaacctagagattggcagacttttttacagagcctggtagtagatattttttgttttgtgaactgtatctctgtctctgtctcaacaactcaactctgcagttatagacagcatgtacagtgagtgtgtctgtgttatggtggaacttgatttactaaaacaagtggcaggtcagatttggccagaaggtcatagtttgccaactcctgcaaaatttcccctaaaagaacattgcagggttttgatgacacagccacctacgctttatgcattcacatgttccaaaagtgaattaattttggtgctaaagctggaatttgaatttttttaagtttagggtttgtcagtgaaggcacctttttaaacattgttttagtgggggcatgcatggtgagtttctgctatttggggagcaagaagacaactccaaaggagcagatagcaggaactcagggaagaaggcggctgccttaggcacttgtgcgggctcggggactataaatgcagctccccttgggcatgacagaaatacttcttttcacctctccctcacagacaggcactgtccttgctccaggccgagcttggaatctgcatgagatatttaaagctaaagatggcccttagaaaattgctttcttgctcactgactctggcttcaggctggtttctaggaatttcaagacgcatgtatgtttataggctgccttctgtaaagggaacatatcccctagtcccaatgctaaatcaggtgaacccactttcctgtgcctcccactgttcacctccttgtcagcctccaggataggggtaccttgttttcatccaggaccttccagcccagcattcagagaacttgggcaagtcgggctgtcaagttgaacgaagtgagatgtagatttacgttgcattcatagttcaagtttggtgaagcacggtgtgtggttatagaacataagagccctggcagctggtggcattggtggtctctccatctcacccatcctcaggggctatggtggtctggcaggctattgctgctaatgcagaatgctcttaaggttgctctcacacaggtcttcttgccatcggcagcagtatgtaaggctgcgtcgaagtcagggctgactttctttctttcttcaacattacatgcagaatctctgcttaaggrctggctttctttttaagcatacaccagcaccaaaaagcagcccttgcagggctggctttctttttaagcatacaccagcaccaaaaagcagcccttgctttctagtgtctttatctgctccagtacagtctccctcaagatgtattggaagctttgggagaatggctgcatcaagcatgtcacttgtaagaatgttgaaaaggtagcaagtatctaaatatcacttagatcatacagtctcgcccataattgaacagattttacatctatatatatccatattgatgtttcctccagccaagatctcattctcagtgaagagtaaattctctgaaaatcatgtgggcatatcttaactttattggtgatgtataattagcttcaggtattgaaagatttgctttaacattttttcctagattatgtgattctacagagaacaaaagtaagcttgtcacttatgtgcccttagattctcatgatgcrgttttgagatttaactctgctcctacacgtggttatgagaaagatgttgggaataaaaccaccrtacgcatcattaattcgcaggtaagacagatggagtgttttcatggatgtatgtttcttaggtttaactggatgagtgaagagaaatgagtttaaccggatgagtgaagagaagttacctggttaattatgaccgtggtacttgtttatttctatcaatcttataattaatagaaattaatgaagaaaactrcagagaaatgggaatttagacatgacatgaataggaggaaatgaataaaattaaaaggaaaaatcagtagaaatagaaatatatatatttataatcatagacttagcatgttgcattttgtgaactgacaaaagttaaatttagaagaaatggcaataaagaaagcagaggataaaggggagaaaagcaaagtataaaatctgagttcataggagatctttgcaactttagtctgccatttggaaatttgaaaaaatggaaaggaattgtttaattggaaatgaaaatacctcgtttcttcacgttcttaatgagaatgccttgaaaatttatagcaaarttatcctcagaacaaaccacaacaatttctggagtttcaaaatatgtagaaaaaagtgaggtgatgagtgatttatggtgagttgcttacagaacaaaagattagctttctgcacagttcactgcaccaggcagcctgccgcaaggtaagaaacaattaccatatttccttaattcagagatgtcatttgactgtaaaatctgccattcatttaataacaactttttacaaaggaggaggtaaatgccaccaaattagaatacatatcatctgtaacatacattctaactaagaaactttaacatgagaaggaaaaaagtacatcgtaataatggttaaaaaaaaaaagtatcttaaaactgagggaaaataatatgttgttttttcctgaaataataattttaaaaagatgattggcagctgagattgaagaactcattwagaactaggtagggccacagagggaaggctgtggctggcaccctggaggctccttctgaactcacttcatccacacctgcaactctgtctccaaattacatgtgaaggcaattgtagaagaggttgtgcggcttgaattagctagggagttgcatcgttcaggatctggattcaataccactagacatgagtacattgctggtgaaaatgtcagaacttgtgctttttttwaaaaaaaagtaatttcctcaaacattctttaagtgcttctgcatgcaacgcctgcctctctccctcccccagaagaaaatacaacrtctgagccacctgtttttttgccccagttctttttaattttcacctctttttaaaatgcaatttttaaaaaccaaaccctggctttgaaatggtttttctgtgtgtttgcagattctgaccaaccccagccatcacttcattgacagttcactgtataaagacgtcattttggtggcctgggaccctgccccatattccgcaaatcttaacctggtaagtgtttccctggatttgcccaccccaacrgtcagacaatggctttgactaattaatcataagagcaaggcaaggattaagctttgacagacaatgaaagtacccatcaatatcaatttaatgcatgtttgtgaacaccacgttgatacccagttacaatagcacacttgtgagcattagtcatctaatgccaaagtgcttttgtgcagaatcggtgggcagggcagccrggtgggggaaatgtagaatatctaaatattcagaaatttctagttacactaaagggttgactgattaaactcagaattgtttcattgtgatagggctacattacctttcaagtagttggaagaccttttgaaataaattgaaggtgatggcacgaaaatctcaactttgtgaatccacagctcatttttatttaaatggggcctgttccaggctcttcttgagtgtgttcctctttggcctctgcttctaaatctgttgaattttatgcaatagggctgaaacaagtttattgctagccataaaaacacaaacaggttatatttgggacattctggtaaatcattgcctgtctaaacaagcagccagctacttttggtgaaacctttcatgaaaagccagcatgcttgtttatcagtgagggctggaaaagatggatagtatttagcctagtaagagatgctgtcagttctgtaaatgagcgtctttgacttgtttagtcaagaccagagaggatgcaaccttcttaagatgagtgtcagggaaagatctttgcttctgtgagaggtaacctcccaagatagaagcggctcctggagaaggagcattttggtcactgttgaccttgagactgaggctggacatttacctcatatgattacttacaattcttgaccaggagtgcaagtcaaaatcacctggagagtatttttcaaaatctgtcagagccccatctccagaaatggaggatatatatagcctcaatgtatattttttgagagggctctttgattctcatatgtaccctccgctgagaatcaagcatcagatgggtgtttgaacttttcaacttcctttccagcctgaggttccctggttttaagctctcacagctctcttgctatttgtgaacagacttgagagtttctagctattggaccttatttcttcctctgttagaagcagctcagcccagggcacagagctggccacccagcagtgctaaaatcccagtgacaaggccgctttctgtaaggcctttgctgccatgtgaggccccaagaggagggagggtaaaggagcgactctccctctggccccacattcctcttgctcccttgccagtgccacatggcttggggcttcatttatgaaagatactctggtccagtcattctcaaagcttttaaagygacagtgccatttcactagtggaatatttcctgtgatcttaatatatacccattatatacccctgatgtctgtttaaagggagtttgatgagytgaacttctccctactctctccaaatccatgtcatggttacagctgagatgcttctgaaaacttcctttttagaaaacatctttattgatttttcatacaataacatacatggtgtaagcaaatataaatgtaccttttgatgaatgataaatttatacactcatgtatctrccaccacaatgaaaaactggaatatttccatcaccctagaaagttcctttgttaatcaatcctagttaatcttcccagccccaactcaggcccaagcagcaacgatacaatttctgttactgtagatgaaatttggaaaactcatatttgaaatacactgatccagtccccaggggtcaacaaactacacccatgggcgaaatctagccaccacctgttttaataaatagtgttttwttagaacacagcacgcccattcagtatttattgtccatgactgcttccgtgctacgatggtaccgttgagtagagacgactgactctatggcctgcaaagcccaaggtgttgattatctggccctttgtggaagaagtatgctgatccgtgatctagtcccttttcctcattttacttaagcacaaagcattatatctgctagggctagcgccctgrtctgtctttgttcttgtcccctcatcccaatgaggaagtgtctgtagatgtcatgagtcatgatctttccccatcctctagccccagcctggcccctctgcctcaaatcaaccagccatgccctgtctcctttcatagtttagttctttctacttgactgcattgatttttttttccttagtggtacaaaaaaccggattacaacctgttcactccatatattcagcatcgtcagagaaacccaaatcagccattttacattcttcatcctaaatttatatggcagctctgggatattatccaggagaacactaaagagaagattcaaccaaacccaccatcttctggtttcattggtaggtgttatgttaaaaattggaatgattgrggggcagacaggatgatatctaatatttaacaaatatacagtcgtgttatacaggttgaraataccttatctgaaatgcctggaaccagaagtrtttctgattttggattttttttttcagatttcagaatatttgcagatatttaaccgattgagcatctctaatccaaaaatccaaaatgcttcaatgagcctttgctttgagtgccatgtaggcacacaaaaagttttggattttggagcatttaaacttttggttattcagattaggcatgttccacctgtatagtaagagccattaacaggtggctttggagggaaggtaggttaactaaggaaaaaaaaaacactcgtgtaacagactactctgaaattccaaggtgtaaaagcaagaaccgttttatttttctcatggttttrtgggtcaggacaggcctggctgggcagttctttctgttctatatggcatccatgggggttatctggtgtattcagctgctttgtgggatkacttcactcccacatccatccagtccctttgcagggatggctaaaggcccagctcagctgggacagttgaccatgtgcctgcacatagtctttcttgcatggtggtctcaaagtaattagacttcttaaatggcagcttatggatcctagggagaatgtctgaaaacacagaaaatcaagaatttgaattcttctctgccactgccagtttcttaaggccaacacctagtaactggtacagcatcacatgtgcaattctattggccagagtyactgcagggctcacttgattccaggggacaaaacatagacccccgcctcttgagggaagtgagggaggcatgtccaggaatgtgcagcatcgtgaatccaccacccatgcctgttcacatagcttatgccatgcttggttgtggagctgaatctgtgaccacaggatagtgtgttgtgtttcaagattatgagtaggtgcgggctttgatgagactagttccagtacctcatttagctctcttaaccgaagagtacgccatctttcatctacagatgggttttatataacaagagcatcacactgggcctacattgttttccagtctagctttgatcctcagagtttttgggttttaccccatttctttatctgtgttttagcttatcaccccattgtttctttgatattacccgagtgggtaatattaaggaatatcctagacccttttggcaatattaaaacctatacaagaaccaaaggatattggttttgtctttaaagaactgtaatgttctcttccccagttttaatgaatttacaccccttttcctttcttgggctgcacagtagttccccatgaataaaggaaagatttgtggagataacattggtttggttatgaattcaggacacacaggtatcctgaattgaagcttgcagattttagagtgggttttggtattgtaataatgtgaaatattttacatataatttaaaaacaaaatttacaatatgactgcatattattttccttaagctcagctttttttctcccttttaaactcatgcctttgacactctttgtttccaaatcactcttttgaaatcctaagttctttatcttttgtgtggtttcataggatcttgttgatttaggaaagaaagtataatctagtttgtcagcaaaggataaacaggatagaataatgcctagacagcataataggatgtgacagaagtttaataaagtctttttcatattgtcaccctctcatgaattcatgtggctaatatttgattagagcaaaagttttaaagcacagttagaggggcctgtcagatacacttattatcaacatggggtttaaaaaattcaagttagatagtcataactgaaaaaaagtactttcctatgttgtttttgttaaaagaaatcatgccatatatagccagcttccttttaaagctatttactgagaatttaaagtttcagaagctgaagattatctttaagccttctttgacatgaagaaggggctgcagtttgatgcaagaagttgaggttgtgcagggtgggttgagtttgaattcccctctgctgcttcctagctttctgaccttgggcaagttagttaatcctctgaccctgaatatccacagatgagaaatggaaatactaataagcattattattttctaacactgtactgaccaatatggctacttatgtttcaattatgtcaaactgaataagaggaaaccttttgtttctcaatctcactagcccaatctcaaattctgagtcaccgtgtgctcctgatggctgccatattggacagtgcagagagagaacaattccattgtcccagaacgttatgtagacagcactgttatgttttgctagtcacaaaagaaagaaaaacagcaagttgataagaaatccctcagttcccactgggcaggctgtgctctgtgggtaagggttgggggtgggcgaggatagaagaggcaacagaagatgtggtctggcgttgttaaatttatttgtggcccttgtgccttgtcatggtgaagcatgtgagaaccctcaccaaggatgggcagtggagacagcttggatgagttctgctcagaaaaactccagcaccttctgatgactcacgagactgcagtagtctttgcccctcttctttgatcttgatcataaataggctgagagccagaatctgttttataacttatccaacatccttaaatagcagtaaaatgatgtcacccatatctcaatctgtctgctgtaagaattttaaaaatcaatgactggttttttttctgctatcaaaaagtgttctccaaatgcccccttcatgctctgaggtcatgttaagaaggtattgacttgttgtctcagcacctcattgtttccaagtgctctaacctctaacgtcagctcctgaatgaaagaactcatcgaagagctgttagaagggattagatcatttcagtttgcacagtcccatcttcagctctgggtacaccggtcagcaggacggtcaccatcgcaaaagatcaccctggcagtgtccctggcctccgattgttctgatccacaaagkgctgcactggaggtgaaacagtgtgccccacttcctatactgatatgctcattagatacatgtatatacacatagctgcacacatggttggcttcatagtgcttttgttttccaatatttttggctgaaacctttactgatatgttcatccttatagtctcccatgccattacttatatttctaaaccctctgacatagtttggatatttgtccccacctagatctcatgttgaattgtaattcccaattcacctgggcctggtgggaggtgtttggatcatggggacagatccttcatggcttggggctatcttcatgatagtgagttcttgtgagatttggttgttttctgatttttttttttttttttttgagacggagtctcgctgtgttactcaggctggagtgcagtggcacgatctcagctcactgcaacctctgcctcccaggttcaagcaattctcctgcctcagcctcccaagtagctgggactacagatttggttatttgagagcatgtggcaccacctcccgcccactctgtctcttgcccctgctttcaacatgtgaagtgccaactctgactttgccttccaccatgagtaaaagcttcctgaggcctcttcagaagcagatgccagcactgtgcttcctgtacagcttgcagaactatgagccaattaaatctctttcctttataatttacgcagtctcaggtattttattatagcagtgcaagaacagactaacacatccactgcatacatttaacaggctaacacatccactgcatacattttctttatacatgcttaggaatctgcatgtttgaaatagagagactctaaaagttgactcttttgaacacgaaagacatttctttgtatggagattatccagcggcagttagattcccagggagaagttactgagccccttaaatgtagtgctattagtgcaattcaaggccttgttactggcgcctgaatccttcatataggcgaaaggtggtgaaaaaggaaggtaagggtcactgtcatgtggatattaattgcacacttcctgtgtgccagacacaggactggaccccagaaacctggtggtgaagaaaccagacaagggtcctgcccacccaaaatttgcaggacagacataaataaaatcattataaagtatgataagtccaacgaaggaaaagaaaaggatgcatcaaggaatggtcagtgtctgttctgctcatcattgtatttctgctgttagcctggtacatagcagatacaaataataattacttggtgaatgaatgaatgttttagctcaatgtttttcaaaatttagcatgtgtcagagtcaaacaaaaggtttgtatgctagtaaaccattgctgcaaagcaaaagttagatactaaaaagattaataagcatttattctctcacacaatttccatgggtcagtaatctgggagaagattggttggatgattctggctcacagtgtctcataaggttacaatgaaactgtctggattcaggctggataatgtgtttccaagatgactcacttgcatagctgagcacaagagaccttactgcatgaacstctctccatagcactgcttgggcatcctcacaacatggcagctggcttccagagaacgggggatctgagaaagagcaaggaggaaggcccaatgtttttatgatgtcataagctaacacatctgctacattatctttgttatacacaagtcagcaccattgttatgggaggaaactatacaaaggcatgaatagcaggcacgaatcattatggagtcagtttggagggtggctgtcacagttttgtaaaccagattaccgggcccacccctagtgtttttgagttgccggaggttgtgagaatttgcatttggaacaagttctcaagtgatactgacactgttggtcctggggccacgctttgagaaccattctttcagctttttggaatcttaagaactttagaagtctagtccacaggctcygtactgatggaggtaccagcaaggtgatatgcatttggctcagtagaggacacaggaatcttgaataactactaatcatgtacttattgcaatctttaatcccaagtgggataattatttttatttgtatttagttaaaacaatgtaatgtattactaaaaatataacatttttgtatattttcatcttttgaaattccgtaacattaaatcctatattccagcagtattggatgtttctgtttgtttgtttgttttgagacggactctcactctgtcatccaggctggagtgcagtggagccttctcggctcactgcaacctctgcctcctgggttcaagcaattctcctgcctcagtccccygagtggctgggactacaggcgcgtgccaccgtgcccagctaattttttgtattcttagtagagacggggtttcaccatgttagccaggatggtctcgatctcctgacctcctgaacagcctaccttggcctcccaaagtgctgggattacaggcatgagtcaccttgcctggcctattccagcattattggatgttttaactacaaatacaattattctttttgtttctttggaagacataactataaaatttacttgctttactaatgaactcagtttttgtccttaaaacttcttgtgaaatgacatacattacaatgtgaactgtaaatccttttcttaaaagtgcatttgtgtttgttcctatcaagtggggacccagattcttgaatatactgattagtggggtataagtttgcaaaaagcaagcaaagttccaactgtcattgattgcaggaaggcattctctcactaacatttgggcagatgcaatttggtgtggtcgacttgaatgtttctccctgtaaaatttgtatgttgaaattctaaccctcaaggtgatgttattaggaggtgggaccattgggaggtgattaggtcatgaaggtggagctgccctcatggacaggattagtgcccttataaaagagaccccagacagctcatttgcctcttccactgtgtgaagacacagcagaaagatggccatcartgaaccagtaagtgggtcctcacgagacattgaatctgctgcatattgttcttggaatttcaggcccctaaaactatgagaaataaattcttgtcatttataagccacccagtttattgcattttggaacagcagcccaaatggaataagacattcagccaacaccttcctctcaaaaagcataacatactttttgcactttcattagcaacccctagcccagtaccagtagtctctttgatggctcatacatcgtgtgttcttgccttattggattaggaaatctttctctctctctctctctcgatctctctctctctctctctgtgtgtgtgtgtgtgtgtgtgtgtgttttctgctgggaaaaggraagcaataaatgttaaagggaaaaggagtatagaaacaacttctgttcagtgcaccagtctgaatgtttcttggttagtaggcctggagatattgtgacatcagaattgtcattgatctagtaccccataggcacggctgagctttttctttggtgctgtaagatctgtgcattatttcctatggagaagaaaatcagatttcctagtaaaatcagatttggacagaaatacttagtttgcaaccaaataaattcttcctgttttatctgaaaataacagggcttccttttccacttcaagagaaagaacaataagtttcaaaatttgaagaacacattgacctagcattgaagaaagcaaactctaagaacctcttcaccaaaagtattttattgttggaaaaacacctgatttcagaagtttgcaatttacgtacatagaaagtttatcaaagataacaatgattctgttttccttacaataaatgaattctaaaacatgcgaacaattacattattgacataatataaatacattttaatatgaaattaaactatgctttcattacaagcttacttcaatattaataagattcttattaatggagaaactgcatggcaaaaatggcaaaaaccacaattacttttgtaccaacctagtataatttgaagtcaggtcatgtgatttccccagttttgttcttttcactcaggatagttttggctactctgggtcattctattgaatgggtcttttgtgattacatataaattttaagattttttttctgtttctgtgaagaatgtcattggtattttgatagggattgtatttaatctgtggattgctttgagtagtatggacayttgaacagtattgattcttccaatccatgaacatggaatatatttccatatttttgtggcctcttcaacttctttcatggatgttttataattttcattatcgagatctttcacttctttggttaattcccatgtattttatttgtagttattgtaaatgggattaccttcttgatttctttttcagattgttcattgttggcatatagaaatgctactgatttttgtatgttgattttgtatcctgcaactttactgaatgtttatcagttctaatagttttttggcggagtctttaggttttttcaaatataagatcatgttgtctgcaaacaaggatcatttgactgcttccattcgaatttagatgccctttacttctttctcttctctgattgctctagctaggactttcagtgctatgttgaataacagtgatgaaagtgggcatccttgccatattccagatcttagaggaaaagttttcaatttttctccattcagtatgaaactagctatgggtctgtcatatatggcttttattgtgttgaattatgttccttttattcccactattttgaaggtttttatcatgaaatgatgttgaattttwtcaaatgctttttcagcatcggttgaaatgattatatgttttttgtccttcattttgttaatgtatcacattgattgatttgcatatgttgaaccatcgttgcatcccagggataaatcccacttggttgtgatgaatggttttttaatgtgtcgttgaattcaatttactagtattttattgaggattttttaaaatcaatattmatcaaagatattggcccrtagttttcttttttgatgtgtctttgtctggttttggtatcaggacggcttgtagaatgaggttggaagtattccctcctcctttatttttcagaatggtttgagtaagattggtattagttcttctttaaatgtttggtaaaattcagcagtaaagccattgaatcctggacttttctttgctgggaaactttattacagttttgatctcattaattgttactggtctgttcaggttttggatttctttataactcaatcttactagattgtatgtgtctaggaatgtattaattttttctaggttttccaatttattatatactattaatatatatacaatttaatatatactattatagttgctcatagtagcctctaatgaccctttggatttttgtgacatcagttgtattatgtctcctttttcatctctaactttatttatctgggtcttctttctttttatctttatctggctaaatatttttcaattttgtttatcttttcaaaaagccaactttatgttccattgacctttgtatcattttcttcatttcaatttcatttattttgcttgatctctattgtttctactaattttggttttggtttgctcttgcttttctgctttttaaagatacatcatttggttgtttacttgaagttgttctacttttttatgtagatgcttatagctataaactttcctcttggtactacttttgctttatctcatargttttggtatgttgtgttttcactatcatttgtttcaaggaacttttaaattttttttctaaattttttcactggaccactggtcattcargaacataccattttattttcatgtgtttatatagtttccaaaattcrtctttttaattccaaaattcctcttgttaattctagttttattccatggtagtcagagaatacacttgatacaatttcagttttttcaaattttttaagacttgttttgtggcctaacatatggtctacccttgagaattacccaggtgctgaggaaaagaatgtgtattctgcagccattggatgaaatgttttgtaaataattataggtccatttggtctgtgatacagattaagtctaatgtttctttgttgattttctgtctgtatgacctgtccaatgctgaaagtggggtgttaaagtctccagcctttattattttggggtctagctctctctttagctctagtaatatttgctttatggatctgagttctccaktgttgggtccaaaatatatttacaattgctatatcttcttgctaaattgacccctttatcattatataatgacctactttgtcttttttttataggtttttggctggaagtctattttatctgatacaagtgtagctacccctgcttttagttgggaggtgggttccattagcatggaatgtctttttctatctccttattttcagtctatgtgtctctttattggtgaagtrtgtttcttgtaggcaatagatcattgggtcttgttttgttatccattcagccactctgtgtcttttgactggagagttcaggccatttacattcagtgttactattgataagtaaggacttactcctgccattttgttgttttctgattcttttgcagtctcctctttcttctttccttccttcttgtcttccttttagtgaaagtgattttctctggtggtattttaatttcttgctttttactttttgtgtacctgttgtgtgtttttcaatttgaggttaccatgaggttggcaaataatatcttcaattcattattttaaaccaattgcataaataaagagaaaacyaataaaaattctacatttgtgtcgtcctcccactttttaagtttttgttgtttctctttatatctttttttaatgtctgtatcttgaaaagttgttatagttattatgtttgatcatttttcagtctttctactcaagatatgaatagtttacaggctataattattataatattctatgtacttaatatagtgagtaccttttgtaccttcagatttcttattgctcattaacattcttttctttcagattgaagaattccctttatcatttcttgttggatatatctagttttgttgaaatcgctcagtttttgtgtgtcttggaaagtcttcatttctcctttatgtttgaaggatatttttgctggatatactattctaggataaaagtgtatttgtttttccttctgcactttaaatatgtcatgccactctctcctggcctgtaaggtttccactgagaagtctgctaccaaacatattggagctccattgtatgttattaatatttgttttttttttctcttgctgcttttaggatcctttctttatccttgacctttggtagtttggttattaaatttcttgaggtattctttttcaagttaaatctgcttggtgttctataatcttgtacttgaatattggtatatttctctaggttttggaagttttctgttattatccctttgaataaaccttctacccctatatcttgctctacctcctctttaagacaaatagctcttaggtttgtccttttgaggctattttctagatcctgcaggtgtactttattctttcttattctttttacttttgtcccttctgactatatattttcaaatagcttgtcttcaagctcacgaattctttcttctgcttgaataattttgctattaagagaccctgatgcattccttggtatgtcaattgcatttttcaactctggaatttctgcctgattgtatttgattatttcaatctctttgttaaatttatctgataggattctgaatttcttytttctgttatcttgaatttcactgagtttcttcaaaacagctattttgaattttctgttcaaaggtcacatatctctgtctctgtgggatwggtcactgatgccctatttaatttgtttgatgaggtcattttcctggatggttttgaggcttgtggatgttttctggtgtctgggcattcaagtgttaggtattattgtagtcttcacagtctgggcttgtttgtatctaacctttttgagaaggctttmtaggtttttgaaaggagttgagtatggtattatgatctaagtttttggtcacttcagctgtatctgcattaaggggcaccccaagcccagtaacactgtggcccttgcagacttgtagaggtactgccttggtggtcttggataagatccagatgaattctctggattgccagtcagagacttgttctcttccctcactttctctcaaacaaacagagtctttccctctgtgctgagctgcctagagtggggaaggggggacaaaagcacctctgtgaccaccatcactgggactgtactggataagttttgaagccagcatagcactggctctcacctaaggaccatggtaaccactgcctggctactgcctatgttcactcaatgtcctagggctctacaatcagcaaatgatgaagccagccagcttgtgtccttcccttcaggctagtgagttccccctggccccaggtgggtcttgagatgccatctgggagccagggcctagagtcggaaacttaggattctacctggtattgtatttagtgcagctgacctggcacccaaggcacaagacagagtcctccccactgttctttccccttttcacagcagaggggtgtctcccatggccactactagcccaggctcacagtgagtattgcctggcttccaccaatgtacatttaaggcccaaggactcttcagtcagcttatggtaaatgctacsagacctgggattctcctttcaaggcagggggctcccctctggcccagggcaggtcaagaagtgctgtgtgagagccaacgcctggaatctggcaccccaggagcctgcttggtgctctaacccactttgcccaagctggtacctttgctgcaagacaaagtgccctttactcctccttttccttttttcaagcgggagtccctccctgtagccaccaccactgggaaaatgctgartgtcacctgaagccaacatggctctgagtctcacccaaggcccacagtgagtactgcctgagtaccactgctaattattcaagacccagcagctctttagtcagcagatgatggatcctgccasgactgagtccttctctccatgaagcaggttcccttctggctcagatgtgtctagaaatgtcagccaggagctagggcctggaatgggggcctcaggactctatctggtgccctatcctactgtggctgagctggtatccaagttgcaagacaaagttctctttactcttctctctcctctcctgayaaggaaggaaggagtctcttccagaggtgcagcctgtgctgcctggagttgggggaagagtggtgcaagcactcccttggctgccctagcttgtgtctcgccaggtcacatgcctccaagtccactggctctgagcccagcacagcactaggacatgcccaggaatggaagtccttgtggcctagactgccgttgatgtttatttaggacacaggagcactttagcccctggtggcgaggcttgccagaactcaggttgtgaccactgggatggatgatttgcctttggccagggctggtctaaatgctccttccataggttctggctgagttctgcccggtgttgctttctgctgtaacagggcagccccgagttccattgcaaagtctcccagtcactgcactttccctcccmacaagtgcacagattctcctccctgctgggggatggaggaggcacggtgttggcaaggtaagactgagtttccgactctcttcagtgctcctttcagtgatagaaaattaaaaccaggtactgtgatcactcgcctggtttttggttcttacgaagatgctttttttgtgtggatagttgttgactttggtgttcctgctggcaggacaattaattggtggaggcttctattcggccatcttgctctgcctccctatatccttattaaggttttaaaactaatgtgtactgaagttagccctctcaaatttctaaattaatatttttaaatcttgttttctgtgtttttaacatcaggtttttgttattactgagcaactccacctcacaaaatattctgaagaatcattattagagttgactatttactgcaattaatcatggaaacytgagtcaaagttgcatatcaattattgataattatttttcaaaacacttaaaccataactttgcaaatatgttttgacttttagtatcaagattatttcttggaattcagtaaaaacctgactagctttttaacaaatcccattttattaacgtatgtaaggctgaggaggtttagaattactatttatcctcacataagtatgtgtccaaagctttcaccaaaccttaaggaagagaatgactctgccttactttattagtttttctttgcaacttttgggataatctcctagaactttgcagtccttataaaaagaagcaaaatagtaatataactaaatgtttatacaattttaaaaacaccaaataactccacctccttttctggtactgccatcctgactttattttagtgtatacccttccaaatcttgagcacatccagattttaacgttgttgtaatgaacaaggctccctcactgtgaagcagcacagcacagtgcrtggtgttccctgattgaaaaaacaaatgaatgaatgggaggctgtgattgatgtcatcttatagactctcacctttgatttaactggtctcatatgtagaagggtggccaccctcctggcctgtcactttatgtgtgcactgtggctaagaccttagattctacagagaccagaatcaagtcttggccctaccactgagtagctatatgaccttgaacaagttacttagcatctccaaaccccagttccttcatctgtaaaatgaagatactgatagtacctttagctttgaattatcatgtgcctaaacacaataactaatgtttactatttgctgttattgtaatgcgtgtcatctgaaaatgtataataggtcaaataagactctttcccaaacagaaaaggactgttctttcattaagacctataatcaaggtgaaaatagacttttgttttccttgctattacagagatcatataattacatcaaacaggtgtatcataatatatgcctttgtttagttgttgatattctggttgtttcagagtgcttgatattatcaaacaattatgttgacaagtcattactctatgtatgtactcatacaaattatgtgcartaagtgactatatagacttttctttaaactatttccttaagataaattcccaggagtattagtgccagtgcaaagggtatggcattctggtgattattgataagagctgacatattgctttcccaagaattatgtagttgagtttctaattagactccatatttgtcctctgggttcacagaagaaagtacactagtagatatattggattgtgttacatgtactatctccttctctagagaagcaataaaggaattcatacacctattattggactgcacatgtatttttaaaactaaaaagrtgtaacatgaatcagggtaatttagatgatccataaggactcgtttctttggaacaacttctccatctcattagcttccttacactcagcccattgggagctacttgttcacatatgaagagcatttctctctttcatccctagtcagatactagagattttatcttgttattcagtgcaatgaagtcattttgactgtgcctgactgaggataaggaataatttacttggagtcctgtagcttctattttgcccacrtaatgacatatttttataggtgagtgatctcacctggggtcttcatgcacagctggatgggtttgccacctgcatgcagtagggcatccaggcacaccagcaggcaccagcctcacccaccccggctcccagcctgagtgttaacaggcagacaggccttgtagccagggcctcygcccaacatacacatagacgtggaactcctttttaaggtacaattgccaattctttttattgcagaagccagcaacacccccaccttgccttttttttttttttgaacgcaaacactactcgtaatattgtaactaatatttctgaagcttacaggtgcaaacactgtaatttcaggccaatttatagatgcacaagaataataggcttaaaaacacatcataacttctttcttttccattttatattggcttttggaatctcattttttaatgtgtcacccaaactcagaacattaacacaaaataataagctacttaacatctatatttaggatcgtgtcaaatgtgtcacagttttgttggttaggaacaactttttgtattttcctgtaaataatgaatcctgagtgtgtgataacaacaaataatgcagtgtaaatgagctaaaaattgaccttccagtattattcttgcattatactattttgtttagggtggtagagtcttcttaaattacatcaggttcaaatttccaaaccatcttttagttacaaatattttctagaactaccacttaaaaagtcacttttatctctttaagaatctcaagtgtagctgtcattattttccattttatgattgaatttaaggagaaaccacaaaacagctcctagagttctgttagtctggcatatttaatacacttagcctttcaccctcacccctcattcggaaaagtgttctgcagtgttctattggtgactcttagaaactgctaatttacttcatgtgtgagttatgttcaagtgtttattagaattgatttaaactggtagttttcctgttacttgtattatgttctgttttatatccagagctcattttgctatttaatgaaaggctattttcatcaaggagaaaattttgtttttctcaatgatttgggatgttattttaaatattctgccaagtggaaaacaagatagttttggcataaccacaattaagctaaatgctaaatgattatactagactctgataacacatcaaatatatctatatatgccaattaaagatgtataaaggaaacctcagtcatctagaatttgtgataatctgaacatgtgttaaagtttgccttttattcaggttttggagcaaataaataagtgcccattctgcttattatgctgaatcatataacatgacattttatcaaaaccagtagaaatgctttttaaatggtttrataattatcttgcgttatatgatgtttaaaagcatacagttcagcaaatgaatgcctcttgagtcacaattgcctagaaaatactaatacttattttcttcaaatgaatccctcatataggctcatttgtaaaaattggccatatcagagcttgcagtgagccgagatcacgcgactgcactccagcctggacgacagagtgagactccatctcaaaaaaaaaaaaaaaactggccatataagaaacttaacattcatactgtttaaagattcaaaacagctggccccatacccatttgattggcttgaaaaaatacattaaaacgtgtctaaatcttgatctgcctatcaaaaagtccagcctcatgttgaaagcagtaaaactttcattagtgataaagttgttaattttttgtagttcttaaacaaaattacttaacataaaagtttcttaaatgctttttaaaagctgtcctttactgaattgcatgttattagatgatttgtattcttcttgcattttatgtagtcctgagcagacataagagaggaaataaaaaaagaatcaataacatttttagcataaccagatgtaaattccccacatcagtctggcatggggaaatgattacaaagtaatgtgatactttgaatttgtgcatatatggtatccgggcagaaaagacaacaccgccagcttgactgcttatcctcaggaaggcctgcttataagactggcccttggctgatgtctgggaacttggattttttgggaaggttcccacccctctaactgataagcgtggttcactatgtgtgtgctgtttatgcaagaaatgtggtttatgctggatacttgctttccttccgagagtctggaattttagtacatgccaggcagagactgctgacatgaccagtttcaaatagaaacactgagtactgagtctctcaaaagcttccctggttggcaaaatttcatttgtgttgttgtctccattatttctggctgctataagaaataccatagactggatgtgttaaacaacagaaatttctctctcatggttctggaggtgagacgttagagagcaggcgctggtcagtttggcctctcttcctgattcagagacggagccttcttgctggttccacacatggtgttattgcagagagaaatcatctccacaacatctcttcttacaaaggcgctaatcccattcatgagggctccactcacgtgacctaatcacttcccaaggcctcacttcctaataccatcacattaaggattaggaaggatctcaacctgtgagtggggatggagacacattcagttcgtagcagtggtcacaactcattgctgggggaattcagtccctgtgccactccctgggagtggattcttgaagctcgcacctggttcccctggactttttaccctgtacacttcttccttgtggtgattttgcttcgtatcattttgtataaatcatcatcgtgagtaaaaccctatgctagattctgggtcttcctattgaatcattgaacctaggggtgtgttgggaactgacacaggaccttaatggtggtgactcagagttcatttgagagctgtgtgctgttggtagtcatttgtgaatgacaaggctcagcattggggcattgcagaagagatctggtggtagttcataaacatttttctcagtatgacgtttaggatactttcttcaagccatcctaagaatggtcatgggccttctactgtctttaaatttaaaggtgaaatctttagtttyatttaatatctttacctttttaaagaaaggtgctctaaattgccaatgattagtaccgtggtcagcttgatagatgttgaatttaattgaggaggcctcaaacagcacttaaagactctattcttccctaatcctstccccgtcctgtctgcctgcagtatctactccccacctaccccattctgaascatgtaagagctattgttatgtatgtccaaacattgacatctacctagttctcttttgcaaagtatgaagaaatttattcttcaggtgtttgtgtattgctaagtactattattaactcttaggaaaattgatatgtagatggaatcaaatttaatactaataattttcactatttattatatgacagagtctgaatctaaactcaaatttatgtataacaacagccttaaagaaaattaaaagactaagtatgcatatgctaaatgaattgatcatgctgcctgaaaaaaaaagttaaaatgttaaagaatattctacgtctttggcaccataaacctccttgtctgcctttcacattacacagttttattattactagttttattatttatttatttatttatttatttatttattttgacaggatgccactctgtcgctcagtgagcatgagagtgcagtggcacaatcatggctcactgcagcctcaacctctgggctaaggtgatcctgccacctcagcctcttgagtagctgcgaccacaggcacgagccaccatgcctggctgatattttgtatatttttgtagagacggggtttcaccatgttgtccaggctggtgtcaaactcctgggtttgagtgatccacctgccttgacctcccaaagtactgggattccaggcgtgagccactgcacgccctactccacagtgagttttaaattatttttttccttttttttggaagatgcctccataccaattccgtatcagtggctgcagctggctgccgcctaaacactcagggtagattctactgtttaattttaggatgctccaagccatggttcatagtttcaggaagccaccaattcatgagactacaaaacaagatggagaaatcattgttgctaaatctctatctgataggcaaagatcaggaagaactgtgcagaaaactcaggacaaacacccactttcataggatctattggctttcaatttggactgccatgagctaactgacaaatccctctatttctgaagctgaagaagttctttttaaatatagagtacttatataagaaaatactaaaagtgtgcctatttacatatattgaaagcataactatttgcatagtctatgacaaaatctatattgtatatttagcagataacacgatttaacggttaactagcagcaaggataaaatttttctctggaaaaacaatcagattcaagcatctgatagctctttgagtctaagaggatagcaaggatgtatagggaagctccccagagttacttggatttggtagcagttcaaatctagatcagctgtcaacatgcagaatgtcttgctacctatgagagaacttagggattcctcagcagttttcaaaaaatatgtgtgttaaaacaacctggtccttaaagcatggagagtagaccagcactggtccaggaacgtgtgttactggtctacaactagattcgtgtagaaaatggaaggatttagacaccttatagcaatttcacatagccatggcatccaaatagttgatcatttttctcgtagttcctcattayggtattttacaaaagcattggtctgtgataggttggaacttttctctaactggcctttcacctaaagggaacgcttgttaaaagttcagattcctggaccccagcacaaaccaatagaacctgaatttctggaaatgaagacaagtcccaggaacctgcatttgatcaagctgcctrtgtcattcttttccatgctgaactttgaggactactgctttatggggaggaccaactgcacagctaacatactcccctaagtataagattggcttttgaaaaccatccagtttaagaaccagagttgcaaaggtcacaactccaacacaactgactccagtccttacggacgccattgtgttaytagctcatagaaatgcccaagtagcaaagaactgtggtttctgggtacagttccactgctaggttatacagtgactttgtgtaaaagacactcttgaagccacccccctgccatgtgcaagcaaagtgttgtaataaatatattgattaatgatgcccgtgatgaagtccacccccttcagcgtgattccttgtgcagagctggcagagcagatgtcatgcccaggagatggggagcccccaatgctgggcagtgcacagcaacttggtctgtagcccctgattagaaaacatgaagccgtcctcagctccacagacacaggctctgggaaaacttcagccaccagagaacattcacaccagagcacttcttgtttgtttaaggtttttttgtgggttgttttgttttgttttgagacagagtcttgctctrttgcccaggctggagtccagtggtgcaatcttggctcactgcatcctccaactcccaggctcaagtgattctcctgcctcagtctctcaagtagctaagattacaggcacatgccaccatgcccagctagttttttgtatttttagtagagatgggatttcaccatgtcggcaagtgactggaaataaaagaatttaattctccatgggcagatgtcattcaccatgtgaattccttgtatatgattktatacaggggagaaaaaatgtttgagagcagtcattactaatcaggaggcagacttttgaccactgcactcatgtttctccatgggtgcagacatttcgagcatctggggggtactgcttccttttcctcaattggtgccacccgaatgcctgaatcacagtgctttaggctgatctaagggaggggcagcagccaggcagccatggaagaaggaaggaaactggtagagggacctgggagaaaaacaagaggaattgacccagtaacttgaggttctgaccatcgctcttgagagcaacttgactgcatagaatttgaagtgcataatccccttgtctttgttaggagtgtgttttactctcaactatgataccatatcatgactctgacatctactacacaagctatccttgctgactctggagcagtatcccctctcctgtttccttctaccccttgtccaccaggcagccccttgagcttcacacttctccacctttgggcagcctttctggaacccctcagcaaaattaggccctttctctcttctctcccagtgtcccttatacaggactcctctggtatgggatttttgtgttgcacacatggttggttaattagggaatattactgtcatcttcagataaatattggctataacaagaataactgtgctgctttatgttttttataacaagggacatccctttcagaaaagagatgtctttttttttaactttcaagttaatagtggcatggtggtgttgagaaaagaaagaaagccattagtctagataaagaataaaatgtactcaggcctggcgcggtggctcatgcctgtaatcccagcactttgagaggccgaggtggggggagcaggaggtcaggagattgagaccatcctggctaacacartgaaaccctgtctctactaaaaatacaaaatattagccgggcgtggtggtgggcgcctgtagtcccggctacttgggaggctgaggcaggagaatggcgtgaatcggggaagggggagcttgcagtgagatcgcgccactgcactccagcttgagcaacacagtgagactccgtctcaaaaaaaaaaaaaaaagaataaaatgtactcagtgatgattagctgttatagctgattatttgaaacattaaaaaattaaaagtttaacactgatagttcagtgagaaaaataattttgttaatatgaatcttaaactctgtcgctttaactccatttctttccattcagacaactatagtataagagctgatccattgtacagttttatgttacaagttttcaaacaactgtattatagtcaatttataatcaagcaactattttataatttagtttttatggcatttgtttctttggaacataactgtcccatcattgcaaaccagatgggacatgtgtatagaatgtgatacaggaaactctgatttggggggttgcaaatctgtccttcactagcgtgtggttccctcaagttcactgacttcttttcatctctccttaccaggcccacagtgataaattaaatgagcgaatagatatatatatatatagtgttacattttaatatgcccccatactccatgaactgcatacacaccacttaatggaagttataacattgcaaatgcaacaacaacaaaaaagtaagtgtctcttgccacagtcatatcccatcaccaccacccctcccccaaaaaactcatccctctcacatggagttgttcattaggttctaatttttggttttcatgtcaggaatcctcatmatgatgtccatgtgcagagaggtgcacgtgtatgaatatatcccatccgtgcggcagacggagctgtgccactaccacgagctgtactacgacgcagcctgcaccctcggggcgtaccacccactactctatgagaagctcctggtgcagcgcctgaacatgggcacgcagggggatttgcatcgcaagggcaaggtggttsttccyggcttccaggcggtgcactgccctgcaccaagtccagtcattccacactcttaaaaaggrtttcttgggaatcaatgtgcaataaggtactactgttgtactcaaagtcacaaaagaatacttgaagatagattttagacagtgtagttttgagtctttaaacagtaatttagtggtggtcatgataatccttctctttctaagccattgagtatgtattactgctttgaacatagaaatggtttttttaaaaaaataaggctcaagaaagatgcaaaaccaaggatagctagaaagaaaacacatgtatgaccatgggtatgatacctccagaaatgttaacaacttattcttctgccatgagtacccctcatcagggttggtttcaatgacaggttttggtgatgttcctgaccatatgaagtggtttatgtttagaaacattcaaattgagggacatcatttacagcatcgagtgtgtcagttatacatgcattcatcattaaatatcctaggttttatgacagacattgaaattatcactcagatgtgtttaacagcaaaaaattcccagcacatcctggcaaaggcttttatttccaaccgttgcattcttcatctctgcctcccattgcccactgaatgctttgctttctgtgcatcaagacagagttctaaaaccagaaaacatccatcttgaaaggtccaagaaaaagccaaattccatatagcaccacagaggaggccctttgtttccctgcagtatttcaaccaggaacattagtatcacatccaccaggaggcacatcactggcaagtaacatagaatcacagggctgcaggtgcccctggacactccccggttctggcttttctgccttgtacctcctcacctgcagatctaccctgcagcttttgcatagtcagtgacacacttgacaattggcacagctgtgctggggaagacgggagacaccttgctccttccaaactagaaggaaagattttggagccatcaccctgtgcttctagggatgcacgcctgtctttattatacaggtttcttgcaggtttttatcagccagtgggaactccacagtgatgagcactgaatcttcactaaatcttcctacagacatttaggaatccagtccttgcttttgcagatatgttttatgtcagcagcatgacaaagccatataattaaataatttatgtgaaagcattgcttattaacaaggaaaatatgtagatgcttcagagggaaaggcagctagagggaaattttcatcccaatatgttagctatattcagggttgattttttctttaatctcaactgtcactgatacattgaaaaatttttgctatgaatatagtgaaacagaaacattctgtaataccttaattaaacatgctattatttcaatgtataaccaaaacatatctccatggtacagttaagacttgttgcaatgacaatagcagcttaattaaatgcgttctcccttgcaaaatgtatgaatgtcaggagagtttagtggaaaagttttctttgtttcaggattggtttcttctagactgttctcaggactactttcttgagcaagaatggcttacagagactgaaggcttctgtttggttagtctattcagcagatatggagctggaaaacaagacatctcctatagcttgctataatagtgaaggagaaattggaaagttttaatcacaataatatccaataaaagcccattttgagagttttgttattaagtcaatgagaagggataggtaactttgtcctatatattaacttatgtctaaatagacatggttaagccatgttcctttctaatttcttttcttttcttttttttttttttttttttgagacagtctctcgctctgtcgcccaggctagagtgcagtggtgcgatcttggttcactgccagctctgcctcccacgttcacaccattctcctgcctcagcctcctgagtagctggggactacaggcacccgccaccacgcccagctaattttttgtatttttagtagagacagggtttcaccgtgttagccagggtggtctcgatctcctgaccttgtgatctgcctgcctcggcctcccaaagtgatgggattataggcgtgagccaccaccgcgcccggtcattcctttctaatttcttgaaaaaactttgtcttgtccttatgtttacatgtgtgtaataatttcagcaactctggaatgtgggtgaggtggctgtggtggatgaatattactccctaccctccttggatctttctagatcttccagaccattaaatgcccctgaagctccttttatagttttgcaagtggatttacttgtagacatccttactatccagcataatcccccttggctgacatgagaacttggttagaggagaatttattggggtcagtgtaaatattcaagttcaaaagcctcagaacccaacactttaaagatttttaaatggaattttgtcgtagtcattgtacttttaaaatagtactttcagtttcattgaggttacaagaaagactgaagagtacaaaggaaatttagttacaatttttgcatttattatggccttaaagactcttgggaatcaggctctgttcaacagtcaataaatgtaatacacacattaatatagtactgactgggcgttcttctataaaagtttaagttctttggcttctaagaaaatgttgggcagttacagttaacttgatgactacttctrgtattagccaaatgggtcctaagtggcagcattttgccagacattgactaaatccttacatgccacatttactgaattccaataaacatatagttcttctgtggagtagttaacagtaagtggcagctcactgaatttctcccaggttctgtctcttccaaaatcctccatcctctcttatgaagggaagctgataaaaaaaaatcctcttggtgcaagctgaagctgttaaggattccttttttcactctcaggaccaacagacattcttttgtatttcaagataatttcacctgttgttgttgttgttgttgttgttgttgttgttgttgttgttacaaagaaacaaattttgagcagcaatgacaattcaaccatatctagattctccctaccttatttctccagccagtcacaccaggcagacgggtaacctttaacagacctggtgttctcatggaataccgatgctcgtcccagggagctgacctttctcactatgtccttatagagctgctcttacagagaactttgtgctcaggaccaagggatggtcaattaaaagttgcatgtaagcatcaggcttggatgggcaagggagggcttttatacatctttgaacgaccaggtctttccttgtctgcctgaaggcagagcttcgagaaacagcacttcccatgtgtctggtcctcttggtctctcagccagacacttaatcaatcctggactctccagtagtcctcagtcattgtagccatagcatctgcaaaaaaagaaatgctaaaataatcattagcgttttcaaaattaggaaatcaaagtagctgggtcactctcttacatgtgtatgagccagttaattctgctggacagatcatacttacgctgctgattgactcttctgagcagtaacacatctcctgaattaattaggtaggtcccgtttgggtgctttaagtgggatcagtcttagatgagtgccagtatgtgattgaatttcatacgcacaaatgccatgattcaagttctctctccagtttttcttatagatcaacacacagtacatgtggtcagttacttggttgaatttctgcttagctgtggtaagagacagagaaagggagtgaggtgggaccaggggaattatcagaaagacatgagtgaacctattggccaggtagcttccaagtatgttctattgtattgtctgttttgattctgatagtttagaactctttctgatagtttagaactcttacccagtggttacatgactgatcaaggcaactccatctggaaattaattgcttgggtaaaatgtccctgagtttcaacttgtcttttatctctggatattctcttatgagattattatgcatgtttctgtcacatgggcattatttacacacttgataaatgaaaggtatttctctgtccgttcaaggaaataaaatgtaagttcttgttttattaaatgaatgaagccttttggttaaaaaaaaagtaatgtaatatgtttctgttcaaacttgagctaatgacatttaaggaattaaagacattgatctagttcttagtatgaaaagtgtacatgtagatatagttatataattgtgtatatacatatctacacacatggttggttttatattgctttttcatcaatatttttgactgaaacctttacaataaattttattttaattatgtaaccactaatattttgagagaaggaagcaaatgttatatgtccttctgttaaaagaaaaaaaattcagtcctccgccaaccgcttcccacacactcatactctgcacatcttggctacattaaaatggactgacagaattatttaaaaggcactatgaaggtagaacactaccttaatattttatcctagtcagaagcctgatttaacactgaactttgaagggaagcttagctgtagctcatggctttcaaagattagaagaaacatttactggttctatggaaaatagtcttcttgctaggtagattggaaacaaagaaattgcattggtggtgttaaaatctaacatttataacaaatcctgttttattctagatgaaatacttagacaattcttccagtggaaaccagtgaacttttttaacagctttgggaattcttttgtatgataatttttaaaatgaaatgtgtactcttcaaactaattaaagcttgaagttttccaggagtcgcattttaaaagtgtttgtacacattttaacacttggatattttctattttggttttgtatatttttatgtatacacaatgtacagacttttttcttgtaaataaaacatgttttcatttgtctagaagtttcttgttttaattcgtagaagttacacatacaaatgagcaagtggcaaaataacaatccatccctaggaaaacaaatggcaaagctgaaatctaattagaagactgagtggcgacagaaggaacagcagcaggccttcagccatgaatatggacgcagcctgggcctaaaaccacaggtgggcgggtttctttcttccagggattaatggccacatgccggagaatgaaagtggcgaaatcaagtggaaaaggcatatatttaggctaacaaatcttgatgttgacttaataacccaagattttgatgaatgcatggctttgggagactcttcctcagcttgacagggcattaagtcttggaaaacataaataagttattcgaggaaagcctaaagacagctgagtcacctacaacccaccacaatgtcaaattggccttggtattttcatacttgtgacatgaagagaaaatcagttaattaggctcctggaaagaaattctcggtcatttgcgctttctgtttagaatgtgaggaaatcctcaaatcaagaaagtctttggggtttttgatgcgaggacagtgtgagcaggtaggaaattcagagtcatccatcacctcaaacagctgtgctgaatcagagaggactctcaccaccttcatgctgttgttgtgtttctttccccacaagatgaccactttcttccagctaattaaaaggtagacatggctgcaccagccctgatcgggaagggctggagtggatcactggaaggatattgttccatgctctcggagaagccaggcatgcgcatactccagggactctgaggggcacacacagaagacttggtgtccattagcactagatgctgccgggaggattcagaggaagagaaaggaattgtataagatacgttg

SEQ ID NO: 95357 - DNA, 13778 bp, Homo sapiens
attaagtttagcctaaagctgtgtccttacatattttaagttcagtaaaggtttttctgtgcatagtgaacagtatcttaactggatgtgtaaacagactgcaacctactcttgtaccaatcaccaagtttcagccaattaaaggtggccaactgttcaaaccatactcaaataaggcaaactctgagctggaaccaatccagcagtttctatacctcacttctgttttctgcatgtcactttccttttcctgttcatagacactctatgaccatgggacagtgctggagtatctctgaatctaatcttgtttgaaggctgcctggtttgtgaattgtcttttgctcaattaaactctgtaaaatttaactgtagaaaggtttttttcttttaacattattaatctgaaacaggatggcagggtttaaagatggtggtggtgatggtggcagtgaggatgatgactgctattatattgattgtaattgcttacgtgtgtgagtatgtgtgcatgcctatgtctgtgtagttgtgtgcaggtaggaagagagaaagaacggggaaaggaaaaggaaagaggagagacataatttaacaaatgtcttgttttccaactgaagaaagaaaaacaagcattgctgagaatgctagcaatgttgggatttctccttcctatttgcttggtgtctctgcctcatatttctcaatcttcccttttcaggggaatacaaacagccaagacctgtggaatttacatatgtagttacactcttctctcatttctagtcctacaattacaacactaattcatattcttagttttatctcaccgggaccgttgcaatagtgtcttaaatagtctccttatgttcagtctcttttctcaaaagcaacacatatgctgtgtttttatttactttggctccttaaaagtttcccattcttcaatgataggtgcttaggcatttgaggaactccattgactagcttatgtggttccaattgtcatttattgctattttacacatagtttgtgtcattgattatttttgccactgacactggaattttcagactattacttttcttaaatttctcatttcggcccataaaatctcttcctttaccactatctagtaaaaattattacaatcacttatattttcaaacactgtttctccatctagtctgtgtgaatctgaacttataattttttcttcagatcatagttttatgcaactaataataaggtaacctacataataactatatgtgtgcttcttattacctgccttagtctgataagttacagtttaagagtagataaatttaaagtcttttaaaattattttattagcctttaatgttggtaaggaataattataaatgtcagtttgatcaacttttgcagattcattaaatttttaaaaatcttgtggattttaaagcaagtgctaatttatgcaactctcaagtaattgttttatttggggggagacgacatattcttcatttcttaaattttatatacacattttgataacttggtaacctataaaaagcaaaaatatcaagtaagtcctgaaactacagcatattattactgtagaatatagttttactgtgaaaaatgaacagaaagtactaaaaacacagagtaacttaaaagaatgctaatataaatgtatttacaacctacaagttgtaatcccttttgattacatttgaatatggtttgaacacagcaacttaaaagaatggtaatataaatttatttacaacctatagactaatccaataaaacagttaaaaatatttaaacatagccttatccagttttgttttttgtaaatgccaaaggcttagtgtttcaaatgatctgcattttcaaagatcaatattgctattttcaattttttatatttatctaagttctaactatagtatataacatttacatgtgtggcaaacactattttagaagttggaactttaaatattaactctgttattttatatattagcagcaactaattctagaagtcccaaaacttttggaaacttatttagagatgcatatatatttgaaaaaaaaattagaaagttttaataaaagcaaagattaattagtcttttatcttttaaaggattcacaatatataaattttataccccttcaatattatcttcattctcataagaacccaggaaataaagtatatcagttgtgaatatattgacataataataatgataaaaaactaatattaattcataatttaatatataccagcaattttactatgcttatgacatgaataacttatttaaaacactcccattttacagttgaaaccatgaatggttcagaaacatgcctgacttaagagagtggaatttggctggaattccaggtttgaccttctccactgccagggttttaagacctactggtgcttcacagacctgcaattactttttattaaattgctaagtccatgcctatgtctttgcattttgatctgcattttatattatttatcatttattttcggggacttcaaagtgtaaagcgcttattttaggccctgcagtgggaaggagacatgcaggttaatttttcctgccacatttatcctacacatttctgagagacagagcaaaagctgtgaagggggatccaaagtgtcaggaaacaaaagcttacatcaacagtaaagacaaagaacaataaactatgaatgtaggtttattcaatacattcgcctgacagatttaatttctgctcattagaattgtatttatgatggtaaaatacgactttgcaatatattttttataaggtaaaatgcacaaaaattttatagtagatatttttgttctcttctaggactcatgctgtttatgaatttataaactattaaaaatattaaaacatgtttagtaattcatattctatattattgtaattttaagtattttggataagaattaaaaatattcatttgttaagcaatgacttatttctgtttgcaaagttttaataaaatgcaaaaccatattcaggaaagatggtttaaaattttgcagacacttatcacgtgatggtgcagagatgctattactgtaactgtgattgcatcctctacacaatttcaccaaattctgattgttaagtctatttgtgtcttttttatttcttccttacaacaggtaagctaatcttgccatctctttgtcctttgcctacgagaatgtttggagtctctcaaattgaatccagttacttcgtagcaggtccagccttgtcaatgccaataaacatggtccaacaaaaaggaaataagtaacacggtcagtctaaagaagaaaactggcaggtctgccatgcattttatgctgaccactgcgcttctactaatttagactaaagtcacatgaactacttcggcatttacgtcaaaatgttaagtcattgatgtttgtgtcaactgaagtccataagaatttttgttttaatataatctgctgttacggccatttggttctttgaaattaatttcatggctttcacttgcagttattagaggtcacttgtcagatgtggtctatttttctagtctgtcaaaatcatctttgtgtcacaattttgttctctaatgtttcatgttaacaaaaatatatctatatgctatctacatgctaaaattaagccaatgataaatatattcaataaacaaaggtcaagtttaaaatataatttattattattttgaatacccttattcaaaaattacatccacagtttaaaaatattttattactgcagagcaagcaccatgttaagcatgatttccccttgaaattaaatacccttattcagaaaacatatatatatacacatattcatttatattgtatgtatagttcttgttctatcatatatttagatagttttcagtatttcccaaataggcttacaaaatattaggtttattccatcatttttgtcataaaatccttttaaaatgatatttaagaatgtatcaatgttaacgctgtctgataatgaaaccattattagttacacaaaaacttcatgaagatagctaaacagacaaacaaactctccctaactgaagtaaaaactaacatacaaattgatgctaaagtcatgaaagaaaaagagatgacctatgcaaaggaaatcgatgctcaagatttctgtaagtctgtcaggtcagaaaatagaacatgcagcaaacatgaaaatgaaccttcttctaccttttatagaatatgttagttcactgatgttgaaagaacaatatatttaaattagtaacatcaatactaaataaaaaattctgttgattattttattttttaaattaaaatgttgattaaaagcatcaattatttaaaataatagtaaaattagtagacaacccatacaacatattttacaattgttacgtatcttatttaatagataggcatgggcaaggacttcatgtctaaaacaccaaaagcaatggcaacaaaagccaaaattgacaaatgggatctgattaaactaaagagcttctgcacagcaaaagaaactaccatcagagtcaacaggcaacctacagaatgggagaaaattgttgcaacctactcatctgacaaagggctaatatccagaatctacaatgaactcaaacaaatttacaagaaaaaaacaaacaaccccatcaaaaagtgggcaaaggatatgaacagacacttctcaaaagaagacatttatgcagtcaaaaaacacatgaaaaaatgctaaccatcactggccatcagagaaatgcaaatcaaaaccacaatgagataccatctcacaccagttagaatggcaatcattaaaaagtcaggaaacaacaggtgctggagaggatgtggagaaataggaacacttttacactgttggtgggactgtaaactagttcaaccattgtggaagtcagtgcggcgattcctcagggatctagaactagaaataccatttgacccagccatcccattactgggtatatacccaaaggattataaatcatgctgctataaagacacatgcacacatatgtttattgcagcactattcacagtagcaaagacttggaacgaacccaaatgtccaacaatgatagactgaattaagaaaatgtggcacatatacaccatggaataccatacagctacaaaaaaggatgagttcatgtcctttgtagggatatggatgaaactggaaaccatcattctcagcaaactattgcgaggacaaaaaaccaaacaccacaccttctcactcataggtgggaattgaacaatgagaacacatggacacaggaaggggaacatcacacaccgggaactattgtggggtgggggcaggggggagggatagcattaggagatacacctaatgctaaatgacgagttaatgggtgcagcacaccaacatggcacatgtatacatatgtaacaaacctgcacattgtgcacatgtaccctaaaacttaaaataaaatgttaaaaataaataaataaatttatacgtaatttaccatactaaagaatgcagcgctaagtgagaagcaactgaaagaactaagatcaaatgtgatagttaagactaaatatagatttggggagcttcaagtcaacaataaaggaccaagggttccgagcggcctcgttaattgacgtgagcgaattcagatgtaactcaagcttcatagagggcttttcaaaaataaaaagctgattccgtgcaagagagcaaagttgctgcttactgttcagagacttacaggtgcttgcctgcattgcaacagggactcatttattcagcaagacttatatttttctcttcattttggagagcctaataaactgttattagaacttctctactgactttcaaaattttgaagtttgaaagacacctttgcaactaaaacagcatgagcacggccagaacagagaaccttgttataatgggtctgtccagtcaaaatggtcagcggaggggccctgtgaaacccattagtggccctggaggagggggcacccagacacagcaacagatgaaccagctaaaaaacactagcacaatcaataatggcacccagtagcaagcacagtgtatgaccaccactattaggcctggtgacgactggaaaaagactataaaactccctccaaaggatctaagaatcaaaacttcggaagtgccctccacactccaaacaagaaaatgagtttgaagattattgtttgaaacgggagttactgaagggaatttttgaaatgggctgggaaaagccacctcctgttcaggaggagagcattcccattgctttatctggtaggcatatcttagctagagcaaaacatggaacaggcaagagcagaacctacctcattcccttacttgaacggcgagatctgaagaagcacaatatacaagcagtggtgcttgttccgactagagaacttgctctacaggtcagtcaaatttgcgtccaggtcaggaaacacatgggaggggccmaagtgatggcaaccacaggaggaaccaatttacgagatgacataattaggcttgatgatacaatgcacgtagtgattgctacccctaggagaatcctggatgttactaagaaaagagtagcccgggcgtrgtggctcacacctgtaatcctagcactttgggaggctcaggtgggcagatcacgaggtcaagagatccagaccatcttggcccatgtggcgaaaccctgtctctactaaaaatacaaaaattagctaggcttggtggcgtgtgactgtagtcccatttgcttaggaggctgaggcagcagaatcrcttgaacctggggaggcggaggttgcagtgagctgagatcataccattgcactccagcttgagcagcagagggagactccatctcaaaagaagaagaagaaaaaaaaaaagagtagcaaaggttgatcatgtccagatgatagtattgcatgagcaggcagataagttgctgtcacaggattttgtgcagataatggaggatattattatcgtgctacctaaaaacaggaagattttactacattctgctactttcccttttagtgtacagaagttcatgaattcccacttgcagaaaccctatgagattaacctgatggaggaactaactctaaagggagtaacccagtactatgcatgtataactgagcttcaaaaagtacactgcctcaacgcacttttctccaggcttcagataaaccagtcgatcattttctgtaactcctctcagcaagttgaattgctagccaagacttctcaactaggttattcttgcttctatattcatgctaaaatgaggcaggaacatcaaaatcgtgtatttcatgatttccgaaatggcttatgatgcgatcttgtttacactgatctgtttacccgaggtactgatatacaaggtgtgaatgtgttaataaactttgatttcccaaagctcgcagagacctatctccatcgtattggaagatcaggtcgctttggtcatcctggcttagccatcaacttgatcacatatgatgatcacttcaacctgaaaagtattgaggagcagctgggaacagaaattaaacctattccaagcaatattgacaagagcctgtgtggggcagaataccacagcgagcctgtagaagatgagaagccttaaaaagcatgctttgacaaactacagacggctcgtttggatctgtgacacatcgttttgaggggaatgctcttctccttgtgggtttttcatcttttattttggaactatgaagacttaaaagagctgagacattttttcttttttaactggtgatgagaaaaaggctgagaagaaggaatatacctttttggttccacttgtttgcactatgtgctgactgaacattagttgcactaactactggtttttaaaaaatgttttctggggaaatgggacaaggaaggaaaagaaaggagagaaggagagaaaccctaaaaagagaagaatcttgatgagcacacaagtttgtctatgatttcaaaattctccaacagctgactctcaagtgcatttcaacttctcctgattactcaaccgttttgtaaacctgaagagcttattacttatttgtgcgaagtgccttatgctgtgagaccattcagaatatcatctttcagacctagcccaaggaatcaacaatagtaactctttccttttttctttttctttgaaaatattttgtcttttcattttagtttcaagttgaagcctcttccctttctacccaatactcaagcccagggctggaagataaaactcattagtaattttagacaccatttttttttctttatgtggaggagttgatatacaactgcagttcatccacactgtaaatacatgtattttaaaaaaacaatcctggctgggtgcggtggctcacgtctgtaatcccagcactttgggaggccaaggccggtggattgcctgaccttcggagttcacagccagcctgggcaacatggtgaaaccctgtctctactaaaatgcaaaaaattagccaggcatggcagcatgcacctgtagtcccagctacttggggaggctgaggcaggagaattgcttgaacctgggaggcggaggttgcagtgagtgcagattgcaccactgtactccagcctgggcaacgactgagactccatctcaaaaaaaaaaaaaaaaaaaaaaatcccaagtaaaaagttcttctgggctgagtagataaaacatcatcactcccaaagcaaagagcagtctatcattgcaggagccatatgacaagactttgtgctctacagcagacactaaagactggtatacacacgcctcccatagcagtatggcgcttgatgtgtagacatgtcagagccttgaccccctttcctctgtggcaaagcgtgtcctgtagaaaattcggtgtgtatacttgtatagacttcgtaaataagtttttttcttctggggatagatagatagatagatagatagatagatagatagatagatagatattttggatgaaggttgctgggattaaggagattagagtgattataggaacagctaaagatgagaggggctcagtgttatgcaacacaaattctagaaagtactttggcctcttgctgtagagagcagatttctgtggtaccctgtgttagtaaagggccccagaaatctgggatgtactctttgctgccacactgtctcatctagtacctttggagtagatttaccagagagagcaaggaagcttcaaaacattgatagttcaagatttttttttttttgagaagctctgattttgcttcttcccactttctaaaagtttgaggaatatttgaagctctgcaaacgggggcaaagattaatctgccttgcagtgtgggaattctgttgaatggcagtgtcattgagcaatatatatataaaccgcagatttgcatttcagaatattagccagtaccagctttggtaacgttagcagttctggagcgtaattttctgtagatcatttcctctagtgtgtaaatgtgttgccctctgcccaccttgatacatactcttttgcaggaatgggcaacctgagagctgttaacttgttaactttcatgctacagaaagctgcttgtcattctcttgcattgtaataagaattgttgtctgtcattttgtactgtaaattgctggtaaatgctttacaatcaacagtgttgctttaaattgtgcccctcccaacatgcttgatgtttggcctgatctccaggcaaaaggagtgagatgaatgaaaaccagtaaactgtttttttttttttttaaatgttttagttcccttttaacccagtgtactaggtcaatgaggaggcattgggaaaggggtaatagtaacaatgctccttattatgagggaccaaaaaagaaaaaaaaataagagtccaggctttcacctagtccttagagcatctttccatttaacaattcctattaaagagtcaagcaccaaaactagactgctgcctctacaagaccgtgtccagtagtggtatcccagatagttcagatgccactcctcattagaggttttacttcagtaatattttcaattttggtacttggtttaattttttaattttttggttttttgggttttctttagtagatgtgggagagagggtgctttgccccaaaagggagggtgtctgcactaagaatttagaaacaccttggaagctcataacctcatcagaaactgcctttagccacactcctgaacttctagataagaaacaaacaatgaaataagttattgggaattaagccatgttattttaatttgctattttttcaacattcgagatatctctaaatttgttattgtggaatcattttcttaccaaatacctttatcaaaattattggcctcatgacagctgaaataagtcagctttttggtgaactttagcagacttctgtggaattgtagttgtagtttatatctctaaagatagttttttaaaacttctaaagaaaatttactctactttctgatctaaaaactcatctttcaggtaaagagttaagtgtccaaaggttgtcacaattcatggggtcagagggagctagactggcacctggactctgcccctccacagctgatagattacaagagaagtgcatttaaattctccagtagacaatactgggcaagggagggagtagggctgggttattaagacacaggctgctgtattttaaccattggttgtgggggatggggtgcctggagaaaacagtcactgttccctttttggaaataaaggaaaaaaattattttttgttcagtaaaaatggtagagaattccagtatctctagccacaagggaccagttctactaagaagtgaagagtgggaactcaaaatttcagaaacattggggaagggaaaattggctttttgttaattggcagatgttccattggcgctcagtttttgttgggatgtgttatgttgtatgtacacatatatggaccagagtctgctgaatttataaggttcaaaaattatggtaacatcttgatttttgttaatttatctcaataaaagcccaatggaactccaaaaaaagagaataaatataaataacattagataataaaccgacaataaatggcacagctttttttagagtgaaaatataaaatattgtatttttattggtgaaaaaataaataaaccagtaatttcaatgttagtatgaacctgattcagtaaggccagaatattaaaaaaaaaaaaaaaaaacacaaaacaatatcaatgttattttgaacagaaagatgtattagggaaataaatttaaatggaataatgaagtttacagtaaagggcataatttataatgaatttatgagttctgattttttataaatttgaacagatggatcaaaaaattttcaacaaacatactataaattattggaataaacaaatataacaacaaactgtctttattaggtccattgaataatagagaacatgataaaatttaaccaatatagtttaaaacattggttttatgtacatgtctagttatatatttacacatgaactatatacatatatacatatgacatttggcatgtaaaattattttgtatttggttcaacaagtaccaatattatgactgcattatctgttcatattgaaatatgaatgtttaataataaaatgttaacatcatctccttaaaaaaatgcaaccatgtaaagataaaggcaatatccaaaataattattgcattaatcaagggcttacatatccaaaaagcaaacagaaagatagcaaagcagtacttagaggaaatttatattattttttaacaaaataagttaaaaaaaataagcactgaaatactaaagctaaaacataataaataaatattagttccatagaaagaaggagataatacaaataaagagggacaaattaactaaaaactcaaaagagaaaaacagatttttaaatctagggaaataatattttaaaatatttcaatgggaaaaatttcaataagaatgatcaaagaaaactaagaaatgataagtgttgacattagaaaggaaaaattaatacagtcagaaatatatagtgtatttaaacatttagaaaatattgtcaatatcagtatgctaataattgtagtgcctttataattaaacatattttagaaaaatagaaatatagatatgtacctcccaaaaatatgaataactaaatgttttcaagaaactcaaacctctcaaaatgtcacactcttttctgttattgtctcccaaataccaagttctgtgtgtgagagttaatatatctattagaatttttatttgcctttggctttttttactctttctctttccgtcatttaatattataacctatatgctgctaggcttcttcttttttgttattactcatctgaaaatcatggatatttttcctaaatgtattatcatctattcaatgcattttgcctgtttctgtaatgtcccacattagtatacatactaaaagcattttatgttaacttatattttgaaatctgctggaatatgaattttctataccaggatatcttataaatttcatctatcttgtatatttttctccttctacagtataattacacattctcaaatattaaatgtacacaacactaatgcagatcaggaagagacgtgatgaataagagtagaaagcctgatgcaaaaaggtataaatgtaggtaacctttttaaatttgttaaataaaacatgtgatagtccttatgaataaaaatcactatggtcatccctggagaatatcatgtaagctaaataattctctaagatataaaaaagatatgtttcataacttaaatgctctcaacagagtgatatgaaataaaccacaaatgcccacttacaggacttatctattattctggtccagaaagcatgactttgatgtggtgagaaaggatgtgggcagtcatgcagcatgtcccagacctcaggaagttttactcacttgtgtactttttgttttactggtaaagtttgactctgggaaattaaaacaaaacaaaacaaaactactattcatactattcaaacccagtggcttactataggcttttctgggggaagaaagccatttctaatgagtatttcacacaaaaatactttccccatgtattcattcaaattctaagactgaatttatgattaaaatttaaaaaaaaaaacgccaaaccctgtatgactttggttccatatacttgtggcaggataaattaaaattactaaaatcattttatctttttatttagaaaacattttattaagaaatkttgttcacktgttaaataaaatttcagatttagtttaaaagagcgagatacccaggattttgaaaatgcttcactgatgcgaactgtaaaataagacctcagctagagtcagtcatccgattgagacatttttcagaaatatatacatactattttatggtcattacataagcaggttgttttatcttctattgcagcttcattttgccctagggaacccagctgccagaaaatgtgttatgattacatgcatgtcaaaa

SEQ ID NO: 95358 - DNA, 13292 bp, Homo sapiens
tagtgggtgcagcgcaccagcatggcacatgtatacatatgtatctaacctgcacaatgtgcacatgtaccctaaaactgaaagtataataaaaaaaaaagagaatattttagttcatgattatttatttttgcaaaacatctatttaattgtttcaagtttgtgaggaacaaagttattggacaggaagttgtagcaaaaattttctatttctcaaaagtaactgctgtaggtaaaatgtctgatttaccaaaagtttgaactggttcgcaaaggcagtaagttcattcctagttcgggtctttacaaattattgtgagatttaataataataagaccctgcagttgtttctgtttagcaattgctcatctcaaacaggttctttgtggtttttccaaaaacagacagcatatttggcttcttctactatagatactttcctacgtctatttctacatcattcaacatggcaaggctaacagaaaatcaaggtcaaatgaggaaactcagcaaatggtttttatctggcttcacactgaccaccaactggtaaacactataagaaaaactgtgcaggatataaatgataggtaaaagtacattttttcactatgggcccaggctctcataatagaagcaggcctaagatttaaaacaaatgatgtgggaatcaattcaaagtgctgaagaatcacaaattgcttttctatttaactaaaaaatctccatgctttaaaaattttccgctggtagctttttctcctgaatttgcactcttaataattttatcctataatcccatctgatgatgttattttagggaaaaccaggttaacagaagaacatttatcagatgtgtagatcatagcaaattcctggcacttaataaacacaatactgatagactaaagggaggttaaaatgaggtggaacacgtaagttatctctaacaatgattaatttttgtatattttactgatgagaaaaactcctttaaccaaaagctgcttaatatttttattaactgcttcagttcccttcaagttcttaatacgttattaatataacacagcatgaataaaaaatatgataatccattttttaaaaaacaaattcaagaatgccaaacaggtgacttacgaagggagcagggaagcctaaaggggcctcatttctgtcttcctgggacaaaaggataagtaattgactgaaatgtaactaccaggacatagacgctcctaggatgtaaaagaaagttgtctgcctccccctccccctctccctctccccacggtctccctctccctctctatccacagtctccctctgatacccagcggaagctggactgtactgctgccatctcggctcactgcaacctccctgcctgattctcccgcctcagcctgccgagtgcctgcggttgcaggcgcgcaccgccacacctgactggttttcgtattttttttggtggagacggggtttcacgtgttggctgggctgatctccagctcctaaccgcgagtgatctgccagcctcggcctcccgaggtgccgggattgcagacggagtctcgttcactcagtgctcaatgttgcccaggctggagtgcagtggcatgatcacggctagctataacctccacctcccagccgcctcccttggcctcccaaagtgccaagattgcagcctctgcccggccgccaccccgtctgggaagtgaggagtgtttctgcctggccgcccatcgtctgggatgtgaggagcccctctgcccgcctgcccagtctgggaagtcaggagcacctctgcccggccgcgaccccgtctgggaggtgaggagcgtctctacccggccgccccgtctgagaagtgaggagcccctccgcccagcagccgccccgtctgagaagtgaggagcccctgcgcccggcagccaccctgtctgggaagtgaggagcgcctccgcccggccgcctccccgtccgggaggtcgggggcgcctctgcccggccgccccttctgggaagcgaggagcccctctgcccggccgccaccccgtctgggaggcgtacccaacagctcattgagaacaggccatgatgacaatggcggttttgtggaatagaaaagggggaaatgtggggaaaagatagagaaatcagattgttgccgtgtcttgagtagaaaaaagtagacataggagactccattttgttctgtactaggaaagattcttctgccttgggatgctgttgatctatgaccttgcccccaacccggtgctctctgaaacatgtgctgtgtccactcagggttaaatggattaagggcggtgcaagatgggctttgttaaacagatgcttgaaggcagcatgctccttaagagtcatcaccactccctaatctcaagtacccagggacacaaacactgcggaaggccacagggtcctctgcctaggaaaaccagagacctttgttcacttgtttatctgctgaccttccctccactattgtcctatgaccctgccaaatccccctctgcgagaaacacccaagaatgatcaataaaaaaaaaaaaaaaaaagaagaaaagaaaagggccccaaagtgacgtcagccccatctcaaattcaaaccccatagtaaacgaacaagatagaccttaactactgactaattctccaaagcaaaaagtcaggaaaataaaaaaatctcgttaagctgtaaaaaataaaaataaaaataaaaatacatatccaggtacatactctttctttctttgagacagaggctcgctctgtcacccgtgcagtggcagtctcggctcactgagatctcagccttccaggctcaagcaattcttcggcctccacctccgaagtagctgggactacaggcactcaccactatgcctggctaatttttcgtagagatggggtttcgccatgttgcctacgctggtctcaaactccttaccgcaagcaatctgtccacctcggcctcccaaactgctgagattacaggcgtgagggattgtaggcgtgagggattacaagcatgagccaccgcgccctgctatattacttatttcttaaacacctgcaattcattaaaatacaccatgtataaattataaatcataatattatcaagaactgttatttctaagtgctgaataaatgaatatttccactcattaaaaaaaaaaaaagttgtccgttcaaagccagtgtcaagtaccaaaaaaagaaaattatcttgcggcagataatgagaaataatgcaggagaggaaagaggaactttaaaggctgtacgtgtaggattttctttttctctctcggaggaaagaacagcaaaaagcgaagagtgggaaatgctggacttaaattcctttctttaggtttacgaacaaaaaaggaaagcgagaagaaaaacagaatcaaggacttatacagcaggaagttgccctgtaagcatttagtccagggacctgccattcttattaagagctaaaaccaaagaattagtgcacgaaagtagaaagaagacaagccgccattgtggaaggagcgcagcgggacagaggcgcgcagaagcctcaccagacaaccaggccccgtccccgtcccccgaactgtgcggaaagcgccaccgagtccaggcgtctcattttacagcggaagacacaaactctgagatccaaatgacctgctcacggtcacagcacgaagcccgtgggccctgtgtctacagtcaccaacttccaggcttgcgactaaagggagccaacgagcgcgtgagcgtttgagaccagctggctgagggacgccgaaaatcccgcgcggaggaaggcgggagagcgctaccgctgctaccaaggcggcggcgcgggcgctcggccgggacccttccctgcgtcgccaccagatggcgcgctcggcccgccgttcgcggctaagctagggcgggtggggagggagtagggaggaggacgtcggttgccttggaaatgcagggcgcagcagccgctgcagtggagccggtaggcctggccggcgggctgaaaggaagtgcgagctgtccgcccagggccgggtatccgcccctgcaggctgtggaggggatgtcaggagactggctggcctcttttcttggcccccgactccttccagtctgacactgaagactttataagcttccccccgaccaccctccacgggctccactctccacgggcctgggcttgcgccgcttcgagatcagcctgggggtcgcgccctcctggtcttgtccacgaagcgccgttcttgggccgttaggagctgctgggaagggctctgataggcccactcctcttctccacccaggagatgagaaggagggcaggcctttttaatctgatcagaatgttaacccatctctccgccttgcggtagaacccctggatacattatttgccctctcgaaaggcaggctctgaatttgattcaggtttgtaaccttcacggtgccctcacacagcccctagcacacagcagacgcagagcagactaagaatgccttccattcttatgaggctttatcacttgacagttttcccaaagcgtttggagcctcatagcccggacagcaactaggacagatggaggaggaaacaggtcagaggttcagagacttggcctaggttatacaactctgtgcaggagctgggactaagctcggtcttgcttctcttagtgcctctctcaccaaattctgagtctagtgaatgctttctgaggacctcacatactcttgcatccttctcaataccagcgcaatgctcttccgctgtaggtacttcatatgtgctaagtgtgttattgatgtcttttaccctcatatcccaattcatagattggtttcaacttcttgctctggatactacaacattcttctaaagaaaacacttggtttcttttatgaatttgtcacatttgtacagtgccatgttgttgcctcactcccttccttatcccataattttctgctgggcaagagagagagttgaggaagtgattaagagatgggaaaaagtgccctatctaagccaaaaaaaaaaaaaaaaaaaggaaaagaaagattcctgtgatgacagaggggaaaaataatgactgggtatttatcagtctatgtgataattgctcatggattgccttacagccacctccagaagatcctctttagactcactactgctatttgaaggtagaaagaagcctttttgttctctaccattattattgcatatttttcccttatcctcataataatattttcatagttatttttcttttctttgttgataattctaaaactgaaggacagtaagagtgggaaaaaaatgtagttctggttactagagaagttagtgtaatatactgcagttcaaactatttgatattagcaactctggatcagaagacggactaattttaaagctaagactccaatatctttgggtactgcagtagaaaaatgtgccatgactaaaggattggtgaagaaaatacatgctaatgtaatgtacatcatcagtcgtccaagtgaaacttgaaaatgtcactcatctagatatttttaaataccttgattttaatatatgattttaacatatttccaaaccgggcaaattttacattttaacactaacaattttggtccctatcatatatacataatcaatatgaaaagcggtctcaatttttaaaattaatgttttaggtggtactattaccactgaatggctttaaattaattcaggatttttaaaaacatttactggagaccatttctaattaagttaaacatgtgttctgtgcaatctcatttgcagtagccacaaaacgaataaactacctgggaaccccctgcccagtgccatacccccagtgcctgtccccagatcgaggcttgggccccttcagccatgtctatcacaagcaccaccagcatgtctgacaaactgccctacaaagtcactgacattggcctggacttctggggatgcaaagccctggatattgtggagaaccagatgccgggcctgacgtgcatgtgggagctgtactcaaccctccaagccctcgaagggcacgcgcatcaccagttgcctccataggacccatggagatggccatcctcattgagaccctcattaccctgggtgccaagctgcagtggtccagctgcaacatcacccaggaccatgaggcagctgccattgccaaggctggcattccagttgtaygcctggaagggcgaaacagaggaggagtacctgtggtgcaccaagcagacattatacttcaaagacggcctcctcaacgtgattctggatgtcgctkgggcccccaccaacctcatccacaccaagtacccacagctcttgtyggggatgtgaggcatcttcaaggagaccatgattggggtccacaagctacacaagatgatggccaatgggatcctgaaagtgcctgccatcaatgtcaacaactccgtcaccaagagcaagtttgacaacctctccggctgccaggagtccctcatagatagcatcaagtgggccacagacgtgatgattgccagcaaggtagcagtggtagcaggctgtggcgacatgggcaaaggctgtgcccaggccctgtggggtttcaggcccatgtcatcatcatcaagatcgaccccatcaacatactgcaggctgccatgaagggctatgaggtggccaccatagacgaggcctgtcaggaggacaacatctttgtcaccaccacaggctgtgttaacatcatccttggctggcactttaagcagatgaaggatgatgccatcatttgtaacactggacactttgacatggagattgatgtcaagtggctcaacaagaatactgtggagagagtcaacatcaagccccaggtggactggtatcagctgaagaatgcacaccacatcatcctgctagctgagggtcagctggtcaacctgggttgtgccatgggccacctcagcttcttgataagtaactccttcaccaaccaagtgatggcgcagactgagctgcagacccacccagacaagtaccaggttatggttctcttcctgcccaagaagctgaatgaggcaatggctgaagcccacctgggcaagctgaatgtgaaattgaccaagctgactgagctgcaagcccattacctgtacttgtcccgtgatggccccttcaagccagatcactaccactactgaaagccagacctgcccttcgccttccaactgctgtccttgtccaggccctgcctctcctccctaagagcaaatggcacccactttgtgattggtttgtcagtgtcccctattgactccctggggctggtcactcagtttttggcctctgctgcatccctcatactgttccaagtgtggcagggggaattgagaggcccctcctcaagccttggtcatgataggggtacaagggagacagccacagggaactatgaattcaatgatcttggaacttctcactaagtcagtccttccttagcctggaagttggtaatggagtcacaaagcccatatactttaccatctaggcattcacccggtctgtggacttatacctgtgtgcttggttcacaggttcagtggtacctcagcccatgacagaaaagcagcagctatattgaagggcaaagaggaactgttgtttgaattttcctgagagcctgacttagtgctgggccttctcttccacctcataacaatgaggttggtacttttagtctctgttttataggagttagaatagactgttaagggacaactgagaaaggacagagaattgatagccagaggttgagaggggccataaaaacataaaagcaagcatagatctgctaccactttgtaacaagataattcctatcacaaccctgggtcaaaaagagaataatctggtccataatgtttatgttaaaaaaaaataaaaagcaggaaggtgggtaaataaaaatcttggtgccttaaaaaaaaaaaaaaaaaaaaaacccctaggaatacagcttaccaagaaggtaaatgagttctacaatgagaatttcaaaacactgctgaaataagtcagagatgaacacaaacaaatggaaaaacattcaatgtcatttttcatggaattaaacaaaactattctaaaattcatatggaaccaaaacagagccctaatcaccaaatcaaccccaaacaataagagcaaagccaggggaatcacactacccaacttcaaactatattacaaggctacagtaacccaaacaacatggtactgttacaaaaacagacatataaactaatggaacaggttaaaggacccagaaataaagccacacacctacaactactggttttgtgacagagtcaatgataacaaacaatggggaaagaactccctattcaataaatggtgctgggataactggctagccatatgtggaagattgaaactggaccccttccttttaccacatacaaaaattaactcaagatgaattaaatacttaaatgtaagacctaaaacaacaaacactctagaagaaaacctaggaaataccattctggacattggccttggcaaagaatttatgactaaattcccaaaagcaactgcaacaacaacaaaaaatagacaagtgggactaattaaagagcttctgcacagcaaaagaaactatcaacagagtaaacagacaacctgcagaatgggagaaaatattcacaagccatgcatccaacaaaggtctaatatccagaatctataaggaacttaattcagcaaacaaaaagcaaataaccccatttaaaaataagagaaggacaggctgggtgtggtggctcccgcctgtaatcccagcactttgggaggctgaggcagtcagatcacaaggtcaggagatcgagatagtcctggctaacacggtgaaaccccgcctctactaaaaatacaaaacaaataaataaataaattagccaggcatggtggcacgtgcctgtagtcccagctactcgggaggctgaggcaggagaatcacttgaaccctggaggcaaaggttgcagtgagccgagattgtgccactgcactccagcctgggcaacagagtgagactccgtctcaaaaaaaaaaaaaaaaaaaaagaaggcaaagaacatgaacagatacttttcaaaagaaaacatacatgtggccaacaaatatatgaaaaaatgctcatcatcactaatcattagataaatgcagatcaaaaccatgataagatactatcacacaggaatcacaatggtaattattaaaaagacaaaaaacaacagatgctggtgaggtttagcagaaaagggaacacttatacactgctggtgggagtattaaagaacacgtggaaagcagtgtgaagatttctcaaagaacttaaaacagaaataccattcaacccagcaatctcgctactggatatataccctaaggaaaataaatcattctgtgaaacagacacatggactcatgttcatcgcagcactgttcacagtagcaaacacataaaatcaaccaagatgctaatcagtggtggactagataaagaaaatgtggtacacatacaccatggaatgctacacagccataaaaagaacaaaatcgtgtcctttgtagcaacatggatgcagctggaggccattatcctaagcaaactaatgcaagaacccaaaagcaatactgcatgttctcactataagtgcaagctaaacattgaataaacatgaacacaaagatgggaaaaatagacactgtctattacaagccataaattgtggggaaaaaaaaaagtacaaattgtggggccacaaggcgaggttatttatcactagttaggacaataagaagaggcttctcaagatgaatttaaatattaaaggatacaacatctctttttgaattcccaagatgagggtttatagaagtagttaggtgtcactggcattaaaggaattgtattttgttgaagatgagtaccatgaatggttttgaatatgtatttcagctttgcaattaacattatagtgaggtatgtgccttctaagttagattgctctttaataaggcttttggaagtactgcattactactactactattacttttattagccttacagtttatagctgagaatccagtataatttgggaactgcagttcaaaaccatgcagttaatggctcagtttctagctagttaatggctgagccacaactagacttcaagactcctagcacccaaatagagatcttttatatcatgcactcatgccttgatggaatcttattctgaacttctgtcattgctaatgctgttaagtaaatatctttcattttaatctacattgtatgtaaaacattagctatcaaacctcaaactccattttatatgtccagaaaggtattagggcagaactgccatccctcccagcctccacagaattaggaaaggagtcattgggaggcttctggatattcacgccttcacaaagtcattaaaatagtcattttgggccaagtgcggtggctcatgcctgtaatcctagcactttgggaggccaaagtgggtggatcccttgagctcaggagttcaagaccatcctgagaaacatggcaaaaccccctctttacaaaaaattaaaaaattagccaggcatggtagcatgcgcctgtaatcccagctactctggaggtgatgtgggaggatgacttgcacctgggaggcagaagttggaatgaccctgcatttttagcttgggcgacggagccagaccctgtctcattaaaaaaaaaaaaaaaaaaaaaaagagagtcatttattttaagctttctagatactgagccaggatgctgagatagtgcaggaagggatacactgtgtgttctataggtaactttgcagagccaaagcagtatgggataactacatatgaaaaaaatgattgtgatatgtccatttttagtaaataaacttctggcttttcactgagaggcgtttgggaaatatttattgcaagattttatgacagaaaatgatggagtagattctggaaaggttggctggagtcctgagtctttcaaacccaggatgctcacctgtccttacatcacggtgtatgttttagagacctcagacacagtcgggagaggaaaacacacatggccacaaaagggaggtcacatgctggatgaagatctccctagcattatctgcatgattttgcaatgaattttaaagctgctcatttttttaaagttctgctgcagtgtgcttctgtcttcctatctgtctgagaagggtcttgcctcatctatactttataattgggggccaggtaaagcaccatgcacagagcaggcattgaatagatgtttgtagttactgacagattcgacgtctatttgtcagatattctaagtgtaaccttcctggaagataattgcttttactttgtgaatatttttctaggattctcaccctttactgagagaaatcttctgggtggtcaggaactgtgaatccttgtaaatgtttatgaaagtccccatgatttatagcacattatcaaatgcaaaaatagatgttgaggtactatcattagcccattggaaaaatgcagctattaagcagacagtccaattggcttactaattttcttaaagtgtgtgaaacaatgaatcttaatagagtttatgtataaagcatttgtgctttaatgggtccacattttcactcatattttattaaaatcctttgccataagctgcagttaggtaagtaattatacattagtcagagagttaaaaacataaaagccaggtaactaaggtaattgagcaggatgaggtcatttttcctccagcaccagatgggtaccacaggtaaaaaccgtaacacttgatctcttccatatgacttagaaagagattaatgttggcattggttttaacttttaaatattttatagtaaaaattattactaaatggtaagttattgttttaaaatgaaacatttgttagtatgctttttgtgcaacagccaagtttaaaattctaattctaaaatggaaaataatataaaaattcaactctgcatctgaaacaaagagtaatcttctcttagctgataattttctgtgaactgtggtggtatcatgatgacaccttttggtgggagcctattaaattattctcaatactttcatatttgagaagacactacttaatgtactaatgtattagatctttttgttgtgtcatctgtgtgcttttcagttggaaagtattgtggtatatttgcattcatgtatatgctcaaattagttagcatacagagtagtgcaaacttggttagaaaagtcacagacataaagacagcctgactggaagtctgagtgtgcaggcagcatgtctacagagaaaaagcgtgttttcatattaacaagtttctccactttggagctgaatggtctacaaagatctatgtggattgccaattcagtgatccaaatcaatgaaggttgacaacagcaaaccttatggattagtctttccacgcatcatcgtacttgcagaaggcagccattctatgctttagttacccagaatttgaagaagcttgacctggagcaacaactgaagggaaagaggaaggggcactatacagagatagagctagagatatatgccctttttctatatctcagacactatgctaggtgctttaaatattagcttatttaatccttacaatagctcttagagtagaattgttatccttctcccttgacagatgatgcaactgaagttcctcaaaaagattaagtaacctattcagggtcacagagataacagtgatggatctaggattaaagcccatgtctgcctgattcgttcatgcatccactcatgtgtttatctgacaagcatttattgtgtgtctattgtgcttagtgaggaaatacagtggtgcacaagaattacattatcctcaccctcatgagagtttccagccacttaaataattacaaaggttatattttatgctttctaccacacttaactactgatacatttatttaaggctaggtacttattcttttaagattagtggaaattaaaagataaaaatgtgttaaggaagactataatctgaaaagtcta

SEQ ID NO: 95359 - DNA, 36509 bp, Homo sapiens
attctgatgagtcttaactggaagtcagggttagaacagacttaaaggagacagtcaaaactcttaagaggctcacaaacaggatagatgccgtagaggatttacagtcaacatctgtggaaagaacttaattgaggactttgaatagctaggaacaagcatgagatatcctgattattcaccaccagcttagttcttgtttggatcataaaactgctttgagactccataaaagctcttcaccaaaaatgcccatgcacacaaatgtttatataaaatttcaggaaattcaaggacacccctgagcccatccacagttcccctaggggtctataagcctcagttatttcttactatcactgttaccacccaagctgccttcatctctcccctagattattaacatagctacctgactcatctcccaacttctctacacaacaaccagagtgatagtgatcctgttaaagcttaagttagatcacatgacttctcggctcaatacaatccactagcttcccttctcacctggaataaaagccaatgtctttgcaatgtcttacaagaccctacaggatctgtctccttgctcttctcaaccttaactccagctgctctagccacatggatctccttgctattgtcctaaatgacagtcacatttttggcctccaagcctttatctaatgctccatctaccctcaatctgcatgaggctgactcatttcttcaaatcttttctcagttgttacttgtcagtgaggcctttctgacctctatttaaaactgccaccctgcccctaccccgcatgtcccaccctcctctgctttcttcttctccatggcacccactgacttcttacaccttatacattttacttccctgtttgttattgatctcccacactagtttgctccatgagggctggatttttgtctgctttgtttcgctactgtattacactcctggaattgtgcctgatgcagagtaggcactcaataaatacttgactgaccaatcaatgactgagtgattacactctgtagtggtatgaatgtatccaggctgggtggtgcaggagaatgtacatttattgaaatgcctctaagtgccaagcagtttgcaagctgacatcagtcatctcatttaattggcacctacaatcccaagagttatttttatcctcatttcaccaccaacccaaaaatgaaatacttaagcataaatctaatacaatatgtacaagaggtgtatgaggaaaactacaaaactctaataaaagaaatcaaagacaaactaatcaataaatattccatcttcatggatacaaatactcaatattgtcaagatgtcagttctttccaatgtaatctgtatattcaatacaatcccaatcaaaattccagtaacttagtttgtggatattggctttagaaactgattctaaagtttatgtgaaaaagcaaaagattcagaatagccaacacaatattggaggaagagaacaaagttggaggactgacattatctaagttgagacttgctataaagctacaggaatcaagacagtgtggtactggtcaaagaacacacaaatagaccaatggaccagaatacacagcccacagacagattcacataaatatagtcaatgatctttgacaaatgaccaaaagcaatacaaatgagaaaacagtcttttcagaaatggtgttagatcaacaagggatccatatggcaaaaattgaatctagatagatcttacacccttcacagaaataaactcaaaattgatccgggacctaaatgtaaaactatccccatttcacggtgaaaactgagacccggaaagttaagaaaatagatgaaagttacagacagctggtagtggaacataattcaaacctgtctgtgcaaatccaaagccctgctcttcctaccacactttgcctcattctccttggtagagtagttcccacttttcttttttttttttgagacagagtctcgctctgtctcccaggctggagtgcagtggcgcgatctcggctcattgcaacctctgcctcccaggtacaagcgattcttctgcctcagcctcctgagtagctaggattacaggtgcacgccaccacctggctgatttttgtatttttagtagagatgggctttcaccatgttggtcagactggtctcaaactcctgaccttgtgatccgcccatctcggcctcccaaartgctgggattacaggcgtgagccaccacacccagccagttcccacttttctaaagaagtgcaactgccggctttcgtacctagttccatttcttgtgtacctagttctatttcacagcaggggacctgaatcagagagaatcagggggttcagggagctctcatcaagcaaaaatcatttacagcctaagtctttgcaagtttatatcaaatattgttatgatataataaacatccttctaagggatcttatcacttccagagttttattcattcattccattcactcatgagtttcattcattattcacagatatttgttgagtatctactatgtgcccagcactgttctaggcactgagcatatagcacagatgccaccctctacatgtaggtttgaaatctaaggcagtgtactctaacagaaatgtagtgtaagccaaacgtgcagttttatattttctagtcaccacattttcaaaaaagtaaaaataaacaggtgagatgaactttactatattttatttgacataacatatccaaaaaaatcatttcaataaataattaacataaagataggatagtcgtgagttgtttaacaacaggataccttctgagaaatgcatcgtaaagtgattttgtgatgggaatatcatagtgtacttacaaaacctaaatgatatggctgactatatacctaagctatatggtataggctattgctcctaggctataaacccatacagcatgtactatactgaatactgtaggaaactataacacaatggtaagtatttgtgtctctaaacataggcaaagcacagcacacacacacacacacacacacacacacacacacacacacacacacacaaaggtataaaagaaaatggtccaaggtgggtggatcacctgaggttgggagtttgagaccagcctgaccaacatggcgaaaccccgtctctactaacaatataaaaaaattatccaggcgtggtggtgggcacctgtcatcccagctacttgtgaggctgaggcaggaggatcacttgaacctgggaggcagaggatgcagtggactgagattgtgccattgcactccagcctgggtgacaagagcgaaactccatctcaaaaaaataaattaataaaaccacacacataaacagcacagttgtataaaaatatttttctttttttaaataaatatttttatttcttataaatatgttgcctaggctggttttgaactccttctgcctcagcctcccaaagtgctaggattagagatgtgagccactgtgcccagccaatatttttgctttatatccttattctataagctttttcctattaaaaaaaattccttttacttttaaaacttttttgttaacaagacagaaacacacacattagcctagtaagcctacagagggtcaggatcatcaatatcaccatcctccacctctacatcttgtcctactggaaggccttcaggggcaatgtcacacgtggagctgtcatctcctctgataacaatgccttcttctggaatacctcctaaaggacctacctgatgctgttttacagttagctttttttttttcaataagtagtagtatactctaaaataacaataaggctgggcatagtgtttcatgcctgtcatctcagcactttgggaggccgaggcaggcggatcacttgaggtcaagagtttgagaccagcctggccaacatcgtgaaaccccgtctctactaaaaatacaaaaattagccaggcgtggtggcgggtgcctgtaattccagctactcaggaggctgagggaggagaattgcttgaacctaggaggcagaggttgcagtgagccaaaatcctgccactgcactccagcctgggcgacaagaacaaaactctgtcgcaaaaaaaaaaaaaaaaaattattagcccattgtggtggcaagggcctgtaatcccagctacttgggaggctgaggcaggagaatcacttgaacctgggaggcagaggttgcagtgagccaagatcgtggcactgcactccagcctgggcgacacagcgagactctgtctcaaaaataactaaattaattaatttaatttaatgacaataaaaggtatagtatactaaatatataaaccagcaacatcgtcctttattatcattataaagttttatatactgtacataatagtgtgtgctatgcttttatacaactggcaatggagtaggttcgtttccaccagcatctccacaaacacatgagtaatgtgctgtcactatatgatagggatttttcagctccattataatcttatgggaccaccctcatatatttggtccattgttggcctaaatgtcattatgtggtacatattattaatgagatattttactttttttagtatgaattttttggtgtgtattttcttcacttatagcacatctcaattccatgcaacattcaagtgctcaatagtcacgtgtggctagtgattacagcattggaaaaagacagatacggttgaggaaacttaaaaaaatgtagcaaatgtagttgtagagacgtgctcaagatcactcaattatcatagctaggacgtgagtctccagcgaccttccaattgcctggttgaaccaaagccctggttcattctgctgcgcattaaaagcaggctttactcccctccaaacagtagaatcgcagttaaacttagtcaaacaaacttaatgtatccaatacaaaactcatctttctaaccctaacacctcctcttcctctctattttctatttcagttgatggtaccattatgtttctgctcactcaaattattattattttatccataaacgagcactttatctagaagatcatttaaattctaaatgatcttcaaaaacgcactttactctccaccctaactagctgaatcatctcccacatgggtcactatgagagccttctgatttgttcccttgcctcagtctctccccacccagcttcagcagtattccctaagactcttcatggctctccgtcctctacagagtaaagacgacactcttcatcacacagcacagaattctctcgggaacctgttctttgcttacctaacaaggcccagttgtttgctcttcctagactctgaagaggtcacttaccctcaggctgctacatttgtaaaaatcgccatcccaactctcaaagagctggcttcagatttgagataatacactttgaatgatatacaatcaaggagtttctcctccatcactcctttacattttatatctatctgctgtttagtgcctcgtctcaattccatgaaagctactgaatacaaactatttactagggagtctgcgggacacaaacagagggattatatttaaaaaatagattgacgcgatctttgccttccccgacctcattacaatatagtttctccaccaatatctttaaaaacagatcctctctaacagtatgagaaaatcaaggggagcctcggaagttcaggccaggctgcgttccgaggagccgccacgtccccccacctccgcttcccgggccgcgattgcaggttgaaaactactcccaaacatcacagggcaggcagaatgcaactacgacccacgtggcagacgggggcggggaccggtcgcgtggccgcggccttggctcttgcgcctgcgcgctgcctcccgctctaggacccggatttaaagagacaggcgctccaaccgtcgtgggctgcccgcggcctgtaatgagcaagttccgaggcctacggtgagcgccggagccggagaggcaggtgaggggctacgcggcgcggcacggcgcggcggggcccggcgtggggaaggcagcgggcccggggcgaggagctcggcgcggccggggagccagccccccggctcctcccccgcccgcctgcggagccccggggcacaccctccgtgacgtggcggccctcccgggagcccagggggaggctcgcggctccccgggacccccacggggccgcgtgaggcggggaggccggcgcccgggctgtgttccctgtggaacccacggggccttctcgtaccctggcccggcgtgcgtcctcctgcgctgaaccgggagcgctcgggtgggactcagggagccttgatcacttcccgcctgcgtcccggacccggtggaggagcgctcctttctgcctcgccgggggtcgcggcctacgccgccgaccccactgtccccgccactctccgacagcggcgcgggaagcccttcgagaaaagcggcggcggccaggcctcagcgatttccttctcgggcccctgggctgcggcagttgtgagggtgcggaacgagggacagacgggtttcctcaaagctgcattgtgcctcctcgtggcccagcgcctcccgagcctccctcaagtccactcctttcattattggggccctagaggttgctctgtaaattgatcttctaggaaaagtgttgaaactcacttgttctgacctccttttatgggtctgccgtacttccacttacctcacctctgtggttcttaaactttgggagttatatagccctttgtgaatatcacgaaagtgatagacctcctccaaaaaaccgtgcatttttatcgaatgtacattttgtatacatttttagagagctcagaacagcctccctcccccacaaccagcgcattcatggattccttgtaattttcccaactaccctgtgaggtaggtattatttaccctgctttagaaataagaaaacagatgcagataaattaagagttttctccgaggtaacagtcagtaaactgtacagtcagacttgcactcccatcccttattccaggtccaccagctttccttcacatcatgttgcactacagtaagcaaagcctgctttttattataacgtgacagcaattttgcttcacagcgtgtgcagactgaacataattccagtatacttaaaactaggactataaaatgctttagaaaacatgaatataagaagatgctgatataatctttttccatttggattgatttatgagttcctgtgagtcttgctgcccagtgacttcagcattctctgattcaagttgctgaatgataaacaggttaattgcacatcggaagcctcttcttgaaagataacgacgtcaccgatcataataggagctgacgttaatgagagctcttgctgtgtgcccaactgttttaagggttttactcttagaacagctctttaagttaggccccataattagccacattttacagataaggaagctcaggaacagaggtaagaaacccatcaaggttatacagctggtaagtggctgagttaggatttgaactcaggcagtctgattccaggctctgcttagttgtctctcaatatagggattctaactcaattccaaatctatatagtggcttgatttctgaggatggcatatgtgttaaacttcacaataaaaacttcatgaacataatgtaatttttactggtgattaaaacgaaacttcagggccaggcacggtggctcatgtctgtaatcccagcactttgggaggccgaggcgggcgaatcacctgaggtcgggagttggagactagcctgaccaacaagaagaaaccccgtctccattaaaaatacaaaaaagttagccgggcgtggtggcgcatgcctgtaatcccagctactagggaggctgaggcaggagaatcgcttgaacccgagaggaggaggttgcggtgagccaagatcgcgccaatgtactccagcctgggcaattaaagtgaaactccgcctcaaaaaaaaaaaaaaagaaagttcaggatcttgtaatacttaaaggtcatcatccattatgagtatcatatgttgctgatggcctaaaaagagcttttatgttatttggattttcttcattgtgatgtactagatgtacatgtgtgcattagataattgaacatcctgctgcgagctggcttttcctgtatcagaactctttcatgctgtagagtagactatgaatgtaatactttggaaagtgtttgattagtcatcatggactatataagacgctggcctttggaaaattggaagcctatctccttgtttatatctttttttttttttttggcctcctactctttcgtacagctatatgtctttggctttcaagatcttctttccacaaaccctccgtgcactcagccgaaaagaactgtgcctattccgaaaacatcactggygtgatgtaagacaattcagccagtggtcagaaacagatctgcttcatggacatcccctcttcctgagaagaaagcctgttctatcattccagggaagccatctaagatcacgtgccacctaccttgttttcttgccagggttgcatgtgggactctgcagtggcccctgtgagatggctgagcaacggttctgtgtggactatgccaagygtggcacagctggctgcaaaaaatgcaaggaaaagattgtgaagggcgtatgccgaattggcaaagtggtgcccaatcccttctcagagtctgggggtgatatgaaagagtggtaccacattaaatgcatgtttgagaaactagagcgggcccgggccaccacaaaaaaaatcgaggacctcacagagctggaaggctgggaagagctggaagataatgagaaggaacagataacccagcacattgcaggtaaggtagagaacactgctttctcatcttactggtgctgagagaaaaagggataaggagttcaactgctttctttctcttttttttaactttgctcttttagagatggggtctcactctgttgcctaggccagtgtttaatgttkcattcgtagctcactgcagctttgcactgctggactcaggtcatcctgactcagcctcccaagtagttgggattacaggcgcatgccaccatgcccagcctttaacgttttatttggaaataattttaaactcactgaagtgttggaagattaaaaatagtacaaagaacattcatattccttttacccatatttacctattaacattttactctatttgctttatcatatttgttcatgtgctgtctctctctacatacatacacacgtgtgcgtgcactcactttaaaccatttgagaataagttgcatacatcatggccctttaaaattcttcagtgtatataccttaagaataggatatatgacccttatgcgactataatatagctatcatcttcagaaaatttgtccttgatgtaatacttaaatctaccatctgtatactattttgtcaatggattgagtcataccttcagtagccttttcctgcagtataggatcccagtctaggatcatatcaggtgttgcatttagttgtcatgtttctttggcctcctttaatctgaaatatttccatagtctctcttttatgacattgatattttggaagaatagagtactgattactatcctcttttactttttttcttgtagcatataattcattactgtacttaactaatttgatacttaattgtcccatatttggccaattaggaacccctttacactgtcctctgtgtcctgtataccttcattaactttttttaatgtacttctttactcttgagcatagcaagatgcttttagtcttatcccgtatgtatccttccccagccctgaaattggtaatttctctggggattcctgttagtgggaaatgcccctgttaaagagtaaaacctggatactatgtgtccacattgtcatggggtatctgtttcttcttttttttttttttgagagtctcactctgacccaggctggagtgtagtggcactatcctgttagtgggaaatggtattaaagagtaaaacccggatactatgtgaacacattgtcatggggtatctgtttcttcttttttttttttttgagacagagtctcactctgtgacccaggctggagtgcagtggcactgtcttagctcactgcaacctctgccttccaggttcaagcaattgtcctgtctcagcctcccaagtagctgggactacaggcacttgacaccacacccagctaatttttgtgtttttagtagagacagggtttcaccatgttggtccagctggtgttgaacccctgacttcaagtgatccacccaccttggcctcccaaagtgctgggattacaggcctgagcgcccagccatggcatgtctgtttctaagccctttcagcagacagagctagaaaatatgtgcgtgtatatgcatgtaaaattcatacctatatatggctatatataacatgtttgcatgtacatgcatatttacatatgcatattttagaaattttatgccaatacccccaaatccagttagtcctctttgaccttcagtgtctgtaaaataatgttcatatcttcaacttagttctggtcaccataggaagacagttaacaatggctctaaaaatgggtatctgtccttgttctttgaaaggaaaaaagacttccgggaaagaaaactgtgcttcccatatactttattctcaggctccccatcccaccttgcactgccttagctattggcctcggcctttgttacttcttgacccatctctcatttggaggaagagaaatacaggtagagttcatgactcagataactaagcatctggaaattttccttcctatgctaggttgacatgctctgtgatcctcatttactttttgttcatctctaaattgaagctaattctgtggggttgggggttccctaagttttatccatcaaactatgatttctgatttcccccaaattgttatttctggagacttacatatgggataagaagtggagaatgttgatgaaaatttaaggtactaatagagataaatggtaactggatcttttgtctccagcatatccttcccttctgtccccacaataccctattacctactacccccactcaaaaaataccagccaccagccagccttgggctagtgctagggtagtgacttaacaagcaaggccctaggagcagttgatagattctttggatgtttttttcagagatcgttcactgaaggatattttatactcttttgggatcctacagatctgtcttctaaggcagcaggtacaccaaagaagaaagctgttgtccaggctaagttgacaaccactggccaggtgacttctccagtgaaaggcgcctcatttgtcaccagtaccaatcccyggaaattttctggcttttcaggtaagataggttagggctactttagctgttatagtgctgcttttattttgtattctacctaggattctggctaaagagtgaaaattctgtgctatctcatctcattaataatttgcttctgtctgagcagagactggtaatggctaattctaagccttccgcttggtttttgtttgtttgtttgttttttggttttgggggtttttttgagatgaaatcttgctctgtcatccaagctggagtgcagtggtgcattctcagctcactgcaacctccgcctcctgggttcaagcgattctcccacctcagcctcccaagtagctgggattacaggcacctgccaccatgcctgactaatttttgtatttttagtagagatggggtttcgccacgttggccaggctggtctcaaactcctgacctcaggtgatccacctgccccagcttcccaaagtgctgggattgcaggcgtgagccactgcgctcggccagcattccacttgtatagcatttctttgtatactttaacctctatcgcagcggaaagatttgttttgtcaagactttttccccttgaartagttacctgggccagacagagattattagaacctgtcttttacttccttgtgttttgataatgaaagaattttgagaaattgtttccctgaatatgcctagaaatgaaagtatgaaagaagggagatgtcatgcatggatctcccttcttgattcttaaaactgtttattcaaaacactggaacttcatggaacacaaaggaaggaaaaaaagatctgaaggatattgctatttgttgggaggcagtacagcctagggatgaagcttgcagactttggaatcagtgagctctgggttcaaatcccatctcctaaaggggaggactgtggctattatttgtaggacagatgaacaataaagtgttaagtttcctgttctcttcactaaaatacacacatgcacacacgtgtatacacacatatatagtttcttttatataaaatatagaattactatttcatagacagggattyaggaagactttgctggggcatgtggtatagataggagttgagaagatcaggatcatttattggccttacgtaaacagacagcattggactaggggcttttatatatgtagtttcatttcttcttcagttaaccctagacagtacttttatttaggaagtactttttattaggccctttttatgactgagaaagttgacgttcagggttatcatggagttagtatttgtactgaagtctgacttcagtacttgtgctcttttatactacactgtgttgctgcttttattgtttggagacattcttgtgattgactcagctgaagaaaataaataaagccaaaccacttggccttattttagaagtcatttggagattgaaagacattttatgtgattgaaagaagcctagacctgaggtcagaagacttgggttctggtccttgacagctcagatccctgagcacgtccttacctctctttagcctctgtctatgaagcagcagtggcctctcctaccatagtgctatgcacagggtgctataggagcacaggcagcaatatatagattactttcccctctgcttcagtgagtttgtgtatttatttgtttaagcttcatcatatctccatgcctcatctaccccatagtgttctcatgaggactgtaagagataacattgcaaaaacggtgcctggctctataggatttttattatttaaaaattctgggccgggcgcggtggctcacrcttgtaatcccagcactttgggaggccgaggcgggcggatcacgaggtcaggagatcgagaccatcctggctaacacagtgaaaccctgtctctactaaaaataaaaaaattagccgggcgtggtggcaggcacctgtagtcccagctactcaggaggctgaggcaggagaatggcatgaaccctgggggcagagcctgcagtgagccaagatcgcgccactgcactccagcctgggcgacagcgagactctgtctcaaaaaaaaaaaaaaaaaaaaaaaaaattctgaggttggttggtttgttgtttgctggtaggccaaagatagagaagagtccaggtgatgataaggacagcatgtttctggaagggctccggtgttggggatggaatttgggaggagttgagagaaagagagtgttttagttcttgcaacctggttgaacattgacactttggagattttgtcccctaaaatcatatttagattccggatcagagatgaggatggatttataatttacaaagcccagacaagaaacagtgtacaacagcagttagcttagtaatggctctgccacaagtttgccgaataaaatttgctttttaaatggtcacaaggaggtgaaagggaatcaccgatgagttgcacataattatttttaagtgtctggaggaaatccctgccccttgaccaccttttgtaaaaatgtattattttttttttataactgctccttggggagcagggttttattttgacaataagaaaagaaaagttgaagcagcgaggggtagggatgttgagtgtactaatggaatctgactttcttagtagtgtctttgtcctggctctttcaacaaggaagtgggccaggaagtcatttgctcttctcagacctcagtccccttatcagtaagagaacattgaactagataatctttaaggcttcttccagctctgacaacctgtgatagcagtaatttcacattgtctaacacgtacttgatttcttacccctttctcatgccagcttttctgggatcagctttacaattgctctgagatccttctgaccactttttttttttgaggcaggatcttactatgttgcccaggctggtctcgaactcctgggctcaagcagtcctcccgcgttggcctcgcatagtgttagggttacaggcgtgagccactgtgcccagccagtcctgatcattcttggcatgactttggtctttattcttcagtaaagtgctcacataaagagatgcacatcagtctggtcttttgcttgggtctaaggaggccattgttcctttaacattatttattagctgtaagatttgggaaaattacttggcctccatttctttatctgtaagatggatataatgacatctaccccaaaagtctattcggggagattaaataaagctaaataccagcagaatatctgttagtttccttccttccctttctttcttctcagaaaggcagaatgaattcatctctgttgtttctccaacagccaagcccaacaactctggggaagccccctcgagccccacccctaagagaagtctgtcttcaagcaaatgtgaccccaggcataaggactgtctgctacgggagtttcgaaagttatgcgccatggtggccgataatcctagctacaacacgaagacccagatcatccaggacttccttcggaaaggctcagcaggaggtgtggcatgagcatcctgaataggcctttcctccggagagctcaaggccatggctgccttcctgggcatgtgagctgtatagttgccygggatcccatgcttggtttaatgctgtactgtagtgctatctggaaattcttaataattttgaacaaggggcctcgcatttgcattttgcactgtactccacaaattatgtagccagtttttctcagagcactttgscatctgtcttcctctccccttattctgctcctaggaggccagaagaacccatcctatttgactagttagaaaatttactgtcctacatatttaattaggtttttgtgaaccatatacacagtttggaatagaatcttccaactctgtttctttcatttatctaacaaattgtcgatgagcatctctgatgtccttgtcactgggcacgtgaagtgaaactaaccactctgtccaacaagagttcatctgtaggctaaaggtgaggcagacacaatccaccagcctctgaactccatgctgtctcctactatagcgatatgcacagggtactataggagcrtgggcagcgatatatagatatcttttggtctctgcttctttgagtttgtttgtttgtttatttattgagacaaaaaatgtggctgtgttgcccaggctggagcgcatgggtgcaatctcagctcactgcaacctccgcctcctgggctcaagcagtccttctgcctcagcctcccaagtagctgggactataggcatgtgccgctatgcctggctaatttttgtattttttgtagagacggggttttgctgttttgcccaggttggtctcaaactcctggattcaattaatctgcctacctcaacctgctaaagtgctgggatcacaggcgtgagccaccatgcgcggtctgagtttatttttttatttatttttgtgtgtgtgtgtgagacagtgtcttgctctgtcgcccaggctggagtacagtggtgtgatcacagctcactatagcctcgacctcctgagctaaagcaaccctcctgtcttctcctgcaagtagctggaaccataggcatatgccaccatgtccagctaattttttaattttttgtagagatggggtctttctttgttgccagggtggtctcaaacttgtgagcttaagcaattctcctgcttcggcctcccaaagtgctgagattacaggtgtgagccaccttgcccagccttctttgagtttatatatttatttgtttaagctctatttctcaagaagggttccttctgtctccagatggtttccacggtgatgtgtacctaacagtgaagctgctgctgccaggagtcattaagactgtttacaacttgaacgataagcagattgtgaagcttttcagtcgcatttttaactgcaacccagatgatatggcacgggacctagagcaggtcagaggaacgggagggagggtaggctacattccaggtggggttttgccaagccaggcacctgcagcctctttttttttttctggttgggacacatactgttttaggaaactgaaacccatttgagcaagcttccgttatagggggagctgaatgtgaggctatagctcttaatttcgtaagtttctgagggtggaaaccatacaactgctgaaccacaaaggcctggttctcaaaaggcagaatttgagacttgccccctctgtctctcctggggcttttattctggactctttttttcttgcttgttttctcctataacttggctttaccaagctttggtttgtccgtgactctatccctggtaccatggcaagtttccatccccttctaggaattgtggatgggctagtgtctctaagaagtgggctagatatgttgagttgggataggagctatgattgaaatttcttgattcatcttcagtcctgggtcttgggggatacacttggccaccctagggttgcagcagtggcattttggtttttggagacagggtgacgtgtcagagacaatcagagtcttctttgagcagagcaagtctttccccccagctgccaagagcctccttaccatccaggaagtggatgagttccttctgcggctgtccaagctcaccaaggaggatgagcagcaacaggccctacaggacattgcctccaggtgggggagctgcctccgtcaaaccatgcccatagagagatgaactctcttgggaagggaaggttcccttggggttccagagctcttcaagaccaagttaaatgtgcttcatccccctaggtgtacagccaatgaccttaaatgcatcatcaggttgatcaaacatgatctgaagatgaactcaggtgcaaaacatgtgtaagtagcagctccgctgacagcctgagctgtcatttgttagctttgtttgttcccaactggtgtcaggacttttgagtccyartcaggatttgaatcccccttccaccttcttactttctgtgagaccctgatctgtcacttgacctgtctctgcctccattttttcccatataaaatggagataacagtacctttctcacagagttcttacagttgaagtgtgrcatacgttcagtgagtatagtatgagtctcttgcctactccagccccctcctcgctaaggcggcatccacataggcacagtatctcaaaagagctgaattttccaagagctttctctcctcttgtgaaagtctttagacaatagaacacaaccccttccctacagatgaggatttcttctgtgaggacagattgctgtccaaagmcatggagtcaaacaaaggcagtggttttgtttccttgttcctgtaccccttggcaggttagacgcccttgaccccaatgcctatgaagccttcaaagcctcgcgcaacctgcaggatgtggtggagcgggtccttcacaacgcgcaggaggtggagaaggagccgggccagagacgagctctgagcgtccaggcctcgctgatgacacctgtgcagcccatgttggtgaggagtgctcccctgcctctgctttccagcctctccaagctccacatcctttgggctgagatcagatagggtatgagtgttgagagcacttgcaaattgactggagaagtttagggaaggaagagggaggtgcaagggggtatttctctgtaggaggcgaaggcaaaggagaagacagaggatctagtggaaagacctgagttgtaggcccagctacgccaccaagatgctgtagaatcttagatgagtgacttgcctctcttgtccttcagtctcctgtgtggatgacgtctgagactgcctgaggcatccccctagaatgatttatctgttatcttacctgaagacggatgtattaagtaacccctgagattctgtgacctactgcaaagtagatctgagagttggtagcagagccaggcttcctgtgacagggtgacttgggaagagggaggacacataaggaatgaaggctgactctgacagacatcatcttaggcctctgctcatttcgtaagaaatggggtttcctttccagtgttggttttcctgtgtgacagggcccaccacatatggtgccatgcctactgtgagattctttggatttttgagtgatgtacagtgctttttttgaaactgtcttgtttgtcatactaaaaccttggtttagggttttatgtttgagataggcaagtgttctctccctgctaggaatgtgggatagccagcatcaaaacagtgagatctccatcccagagatgggactgcggccacctgcagtagtggcctttctgacttttataaaaatgcctcctggagtctgttctatagtttgtcatttaaagactggcatgggttatatagcttagtggttaaccacacaggttttataggtgggcctagattcaaatctcattcttgccattttttagtgtaacttaagcaagcacctattctctctaaccttcagttttatcatccaaaaatgaaaacaatatttgtcacataggatgtcacatcggggatgaaatgagattatgtatgtgaagcgctcccaaaatggtagctattgttgtttgagttaggctagcacaggtaggcatgtaagtaggtgctccaatatctggaaaccctgtttgttgtagggacccacgatcactcaccctgccagcctcactgtcacctgcactctttaaccttagcttcacatacctcttttmctgggagaactgatgtgttttataataagccagaggtcttgcaaggcctgaattattgagaaaagaattaaatcttgtttcactgggcttttacttgttgtacaatgaatagcattcatattcctcaaaaggcaagctcctatgtcagctcaggtgattatttcataggcagaatacaacattgcccagccctttccgttcccatcacctcttcaccagccttccctgagcgttaattgtgggcagtcagtcccaagacccaggtaactaccctcactaacccagttgcaaggtctctggctgtcgctgcttagcagcccctcattgaaagtctccaggctttgctttccccaccccaaggcggaggcctgcaagtccgttgagtatgcaatgaagaaatgtcccaatggcatgttctctgagatcaagtacgatggagagcgagtccaggtgcataagaatggagaccacttcagctacttcagccgcagtctcaagcccgtccttcctcacaaggtatgagtgccttcctttctgccaggaccgtctttcccctttctgcctstaacaacctcagggccagagtcccatagccattccagctgtggtacacaataagggtttgttttttatttgttgaatgaattaattcatttattcatttttggagtcttcccataatgaagggctgctcagcagggagagccaaagagccctgacttgggttcgtgaggatagagctccctggaacagtgatacttcttttgcccacagtgatattgggacagtgagctcagttggtgagttgctgtgtgtcttttgtgtttccatgtcccagatgcttcctgtgagctagactaaggcttatataccaggggctattgggctgtcattcattaatttgttcaacaattatttatcagatgcttacccattgttacagctggtggggatatagcagtggaaaaaatggacaaaagttctggccaccatgaagtttacattctgatgtaaacacagtcttatggggacatctaggagcctagattcctgttctaatcaggggtggcatttggaaccttattccttagcccttctccactcccaaggatactgtgagcctttgggagtgtcttcagggaaaagcagctggaacatctggctccggtagcttgtgagcagatggaattcctatctttgctatccttttctttcctaactcagactcagtttttcagagcctcagggggttcaggggaacatgttgtgtggcctgtgcttacctcagccttgccttcctgctggagcattgggaacaaagcagtcaggccatttgtttcatatgttcaagaggaaggctaagcagtggcctcattgtggagctttartgcaggttcacgtgttctgtgaagcactgcaaatcactcaggagctgtttctggtgaggttggtgttaaatagacaccatctgtgacccaggaagaagtctgagcacacttttccagatttagtcctttccttaattttcccttacccagtattcactcatcctttgcctctcctgtgatttgggttcttaaagggctaggttagggattgaaggggaatggcatggatgtgctggcctttcctgttcctgctctaagcatcctgggtagtgatggctgtgggttcagggctcccactcagagaagacactgctcaagtttccttgctgcacctgagggagttcatttctacctttctggtttcaagtagtctgttctcccctaatccagtccccagcctgatagtcacacatcttctgcagtaggcactaatctctgcccacctaccctcctcctcctcccccgacaggtttaatctgtttcttccattttcctcaaaaattgtaccttctctacagcccatagaaagtgacccagcatgggttgacctcttcctgggcccggacagaagtactgaaacagatggcctctccctcttgtccaggtggctcgcaaggcctagctatatgttttgcacattagctgggccttccacatgttgttctatatcctgtctgggcccgggctttgccctccatggcatggtttgaggtccctgctgccatgtcatccctcaccaaagctccccttctgctttcaggtggcccactttaaggactacattccccaggcttttcctgggggccacagcatgatcttggattctgaagtgcttctgattgacaacaagacaggcaaaccactgccctttgggactctgggagtacacaaggtactagctcagggccatatgtgcaagaatgaatgagtgtgagtgagtatgtacatgtgggtgcacgctgcggtctgaaaagggaggaaatatcccttagtgtggcccttattcttcgcttctgacctgtttctggtttggatttttgtcttttgtttttctcctaaaaaggggctggtattgggaaccagtttataactgggttggtttccatttagcactatctgctcagtgcccttatggcccaggggcttcagagcagaaatagtacttttycatccggtgcctcagggggcctccagaagtggactggtactccttattttttcacactgacttttgtcctatgtgtacctactacctcattttcccttacagaaagcagccttccaggatgctaatgtctgcctgtttgtttttgattgtatctactttaatgatgtcagcttgatggacaggtgagttggctagcatctttaaacccagaaactgccaggaatctgttttcatttcctggrtgaggaagatgggggcttcaggttggaaaggagggtacagggaaccagctggcacatacgtttgtgctcaggagcttgccaaaggcaatggcaagagggagctgagaggaagcacaattgctacatgatcagttccccattcagtgtaagaaagagcccatgtgttgactccatctcttctctgagagcttaagtcacagaagaaacccaaacccccaaagaagtttctctactaaagcaaaatggactattgcagagaaatagactgtgagcatatggggtttcagtttatttctccaatggcacccctaggggctccagtggcacccctgggggcataaggcagatggttttcagctcagaggttttgatttcagaagagactgacaacaggaagctcyggattataggggaggccatgggtgggaccatcttggagagaattagcagtcttgacttagctgcatccatatgcttgtgcctgagaaaccagtatcagccctttcctcacttagaaatgtatctctacccctgttcctcctgcaacagccacatccttgattggggaaggagaaggaagtagagagggaaggaattggtgggggtaggatttggggtttgggtcccaaggcctgtctcagcctgcctaycccggggttggccttgggatcggggcaaagcagggtgcaggggataaaaaatgagagttggagtcgtatttcaagtgggaccagaatttatacaatctgggctacaggccagttctcccttggctcgcttgatgaagtagaamtaggaactacaactatgaactggctctatgccacagctcacaattttccatcttcggtcacgatggagcccttgtagcccttgacagcagaactgttacacatgaggtctttgatccatggcaaaccctttcttgaagtagcagttttatcaytgtggcccttccttcctcagaattcctaataagggagggaggatcccggcctaacctcagctctcctgttctcctcagacctctgtgtgagcggcggaagtttcttcatgacaacatggttgaaattccaaaccggatcatgttctcagaaatgaagcgagtcacagtaagtgaagaccctatgctaggcagtgtcctagaagtttgaaagcagggcagagaactccttgggtcaactgcgactggaagaataaatcttaatgtcttatggagcctcctgataatgttggcctttgactattgcatatgttgcctgctagtcttcacccagaagggtagggcatggaaatccttcctaggtaagcctcctgtgtttcaaagccacagcagccctctgtttgggatgagaagcaacctgctttctaaccctttgtcccttatatttcaagtaagggtgtttccagtggacacttaactagtgtgtgaaaaggaacaacccccactcactcaccaccttctccactctcacaccaacttcagcatctctcttgtccctyygaaagctttggacttggctgacatgataacccgggtgatccaggagggattggaggggctggtgctgaaggatgtgaaggtaaagtggcctcgcttggcttctcctgtcgactcactcgcagccctctcccctgagcctttccagccctgaccaggagatggcggtggcagcctgcagtggttggggtggctgctggggaagtgtgggcagatrtgtcctggatctggaggactgctttgtgtgtctcctatagtgcctggagcctgagggctcttaccctgagggaggggcactgggctagatctggtgtgtagcagtgaaggggtgaacccatcctcatggagttgcctttctattctgtggtctctcttttgcttcccttcagggtacatatgagcctgggaagcggcactggctgaaagtgaagaaagwctatttgaacgagggggccatggccgacacagctgacctggtggtccttggagccttctatgggcaagggagcaaaggtcagggtggcctctgccccctggggtggtactgttttagaaggtaccgcttgaggtacaggctggccttgttactggcttgatctgccagcatggccagttatgacttccgaagtcctaggatctagggccccaagctggcctgagtcacctcaggcagagctgcttactcggttagggagaagtcagaatagagtaccctatgctagcctagcagaaggacgcttaccaccaattatttcgtcagggcctgacagctttctcctcaggsaaaatctctttcctgactggaaaggaagctggagtctgaggaactaatacttttaagcaatctatcatgtgtccaacacagttcaatgccccagagcccaacaggttgggtgtgattatccctcatttacagaagaggaaattggggcttataaaggttaaaattacacagttagtaagaggtagctccaagaggtaaactctggcactctgacggccaggacccaaggtcctctccctggccctgggctcttgggactggcagagatggctcctccaacccacactcatctcacactcccctcccaggcggcatgatgtcaatcttcctcatgggctgctacgaccctggcagccagaagtggtgcacagtcaccaagtgtgcaggaggccatgatgatgccacgcttgcccgcctgcagaatgaactagacatggtgaagatcagcaaggtgaggaagggacctggttggccatggcctctggactggccgccatcactgagacagaggctgtgctttggggactacaggtatttctgtctccccagaaagaagggttgcagyttgctcaggggagcaggattaggccttataatctctgaatgccttcttgtggaaaatggcttgcatgcctctaggtcatacccactctgggctgggaggatcacatrkctcaaacatcagctgtttaagtggcttcttataatckcattaccaagagaagggatttaagccttgttcyaggttgggaacagcccaaartagcatcttttctcctctaggaccccagcaaaatacccagctggttgaaggtcaacaagatctactatcctgacttcatcgtcccagacccaaaggtatcaacccagtggcttgggggcctccagctcatagaattagcttgcaggttctctagtgccatagagaatccatctcacctcgctgaaagtccacccagggataggggtctggatttccagctgagtgataggcacagggacaaccagacaactctgaggaattttgaatagaattctttctgcaatacaattgctttaaaaaaagagagagaagaagagagtacctatcccctcagcacaaagggtgtgttctagaagtaatctggcccaatcccttcttgtaccgaccaagaaagagatctagagaacaaacaggacttccctaaggttattcagcaacagcagcagcagaactaggacccaagtttcccagctgttagccaaagcttttttggtttttgttttgttttgtttttgagacggagtttcactcttgttgcccaggctggagtgcaatagcgggatctcagctcaccacaacctccgcctcccgggttcaagtgattctcctgcttcagcctcccaggtagctgggattacaggcatgtgccaccgtggccagctaattttgtatttttagtagagatgtggtttctccatgttggtcaggctggtcttgaactcttgacctcaggtgacctgcccgcctcagtctcccagggtgctgggattacaggcgtgagccactgcacccagccgcctttttggttttaattgttctgtattgcttctagctggttgggagatactttttttttttttttttttttttttgagacagggtctcactctgttgtccaggctggagtgcagtggcatgatctcatctcactgcagcctccgcctcctgggttcaagcagttctctcacctcagtctcccaagtagctgggattacaggggtgccaccacccccagctaatttttgcatttttagtagagatagggttttaccatgttggccaggctggtctcaaactcctgacctcaggtgatccacctgccttggcctcccaaagtgctgggattacagatgcaagccaccgcgcctggccaatacttgcttctccctttttttgagacagtctcgttctggagagcagtggcatgatctcagctcactgcaacctctgcctcctgggttcaagcgattctcatacctcagccttctgagtagctgggactacaggcgtgcaccaccgkgcctggctaatttttgttattttttgtagagacggggttgcgtcatgttggccaggctggtctcaaactcctgacctcaagtaatctgcccacctcagccttcctaagtgctgggattacaggcttgagccaccacgcccggccactgatactatcttcttaaccagtgatgacctgctggcttactcctgacagaaagctgccgtgtgggagatcacaggggctgaattctccaaatcggaggctcatacagctgacgggatctccatccgattccctcgctgcacccgaatccgagaygataaggactggaaatctgccactaaccttccccarctcaaggtagcagctcttaggctgtatatgtattctccaccccactgtccaggccttggagccttgggcatctagaccattcacatgtcctctgtcttctcctttcccccattctcctgaggcagagcaaggagggcaattagagagggagacaaactgctgctgggccaggggcacagcactagacctccttctccctccatctctgagtagagaaccttgcatttgcaaggccccactgagcagcctttagtctggggaataagagtttgctcctgttgccccagcaaagcctgctttgctgtacagagaacaatgatttgtaccctgattactcaggctatagggccatactttggaatggtgccaagggagccaactccttttccttgctctttatctttctcacatctttgttcccatatgcgcctaaaatacaccacacacaccacctctgaggccagactgggaaggcaatgaaaccctctgacattgtccctccccgcctcaggaactgtaccagttgtcyaaggagaaggcagacttcactgtagtggctggagatgaggggagctccactacagggggtagcagtgaagagaataagggtccctcagggtctgctgtgtcccrcaaggcccccagcaagccctcagccagtaccaagaaagcagaagggaagctgagtaactycaacagcaaagatggtaaggatagggagggggctggtatggtgaagagggcggtgtgaggggcagagatccaagggcagggacccagtctcacattccagccctgagatctcatgattatctgtgtccactgcagtggacacagactacattcctggtgtgtgtccagccatgggccagagacccttctgctgggcaccctgtatctgctcagcaaacctgaatggagcagtaccctggggacagccagtctgaccagggaataagctacctttgagtaaagggcttagctgataactcttcactcccctctcacctatgctcatagcagagaaagcycctggtccttcccattactgcccctgacttcagggagcattatcagcaatccctaccctcttagttcttttgtatcatatgttttttagagwcagggtctcactctgtcatccaggctggagtgcagtggcacgaccatagctcactgcagcctcgaactcctgagttgaattgatcctcccragtagctgggactatagrtgtgcaccaccacacccagcttcctctctgtcctgcaggcaacatgcagactgcaamgccttccgctatgaaggtgggggagaagctggccacaaagtcttctccagtgaaagtaggggagaagcggaaagctgctgatgagaygctgtgccaaacaaaggtgagggtaaaaacagcaacacaccacgtgggccagtttagcccaggttgtgttcccaaccttctgtacaagaagtttgaaagaggatgagcaaaggtgtttggggaacatcggctaaacctcttccctgcctgcagccactcctctgtcgtgggcagggtcagcaatgctgctgctcaccctatgtcctcttgttgccttgcagaggcggccagccagtgagcagagaggaagaactgtgccagcaggcaggagatagaacagcccggcctagccaggagagactgcagggactcactcagctgctggccccaagtcaaaatttacattaaagggraaagmccagtctgggtgtgggaatgcagcattgagtttgtggtcagggtggaagcaggtccagcaagcagcgagtcggggagagggcactggcttggtgactctcctcccacctgaggagccttttccctgttacattttcttgtcagtcttgggtttggcaacatctcctgagcaattctttttttttttgagataagtctcgctctgttgcctaggctggagtgaagtggtgcaatcacagcrcactgcaacctccgctcactgcaacctccgcctcccaggttcaagcgattctccggcttcagcctcccgagtagctgggagtataggcatgtgccaccatgcccggctaatttttgtatttttagtagagacgggatttcaccatgttggtcaggctggtcccaaagtcctgacctcaagtgatccgcctgccttggtctcccaaagtgctgggattacaggcctgagccaccayacccggcctcttttgagcactttctgatgccaagaactaggtttagtactggctcaactctgggggagctgatgcctcaaaggacagatagagaagtaaacatatgattgacacccatgtcattgcgcccccacgctccccaccgccatccaggagtaagcatagaagtctcacagcacaaggcctgaactcggtccccaacagacctgtagaaacctttcccctctctcytcccagcctgaagtccttgaacccattgagagtagtaagcaggactcctgacccctcagtctagcaggttgtacagagtagactgcttggtctcaggggacatcactgagtctgggggcactgagtcagagccagctccgcctgcccaccatgactgggtggctcttatacacatgtactcttcccatctccaggtcccagatgtcgaggcctgtccactctccttttcccctaggcagggatggaggggcgtgtcagtcctgtataatttggagtgactggaggggtgggggtattgatgcatggtattccagtaaacttctctgcttgtgtcctaactctaggctccctcattctgtcccgtgctcatttgggtgaagacccatctgtacccagtgtaggtctgaccccaccctgacccctctgcatttgcaggtattgctggacatcttcactggggtgcggctttacttgccaccctccacaccagacttcagccgtctcagacgctactttgtggcattcgacggggacctggtacaggaatttgatatgacttcagccacgcacgtgctgggtagcagggacaagaacyctgcrgcccagcaggtctccccagagtggatttgggcatgtatccggaaacggagactggtagctccctgctaggtttgctgtcttccctctccctcaggccatactctcctttaccatactaytggactggactcaggctggaggcagatagacacagtatagggggaatgggcttgcttctcccaaacccaccagttctccactgtctcttctggaccaggaattagttgctgtgggtgccacagctgaagtcagtttgtcttgctggtttaaatagatctttcagagctgggtgctgggtttgccatctttttgttttctttgaaaagcagcttagttaccctttttataaataaaatatcttgcagttatctttgtcctttccccacctacacccccaataatttccctagagattaaggagtaaaggctgggctatggcagctctgtccacaaagccttctctcccatccttgcctgttcctttgtacttccaggctcattttaaagttgtatttaaaggactgccctcggaaatgcttctgtttagcggaacttgtattcagsctgacacgctttgccaggaacaaacctcatgtgaaagaaaacaaaatgaatttttttactttcttctctgtgttctcctattacatggtgaggatccccagtttgaagggaggggactagggtcaggtaggaaaatggggcctttatgaagaaaggggaggttatttgggccactcctctggagggatagagggctccaggaagatctgcatccccaaaacctggaaacaagactgttctttaagaataaaaatccacatggggcttgaggccaagaacagcccttgttgccaccaacatggagactttgtaccatatcccattcttagtgctcgagtgttccaacctgaagttgaagaagccaccctggctgcacatgccatcagccatgactgtgtatgctctggtggtggtgtcttacttcctcatgactggaggaataattatatgatattgttgaacccccaagtattggctgatgaacgtgggcatcagaggccagtagctttcttggcctacaaagtaaatggacagtatattatggaaggatttgcatccagcttcctgtttacaatgggaggtttaggtttcataatgctggaccagtcaaatgcaccaaatatcccaaaactcaatcgattttttttcttctattcattggattcgtctgtgtcctactgagttttttcatggctggagtattcatgtgaatgaaactgccgggctatctgatgggttagagcgcctttaagaagaaatcagtggatactggatttgctcctgtcaatgaagttctaaaggctgtaccaatcctccaatatgaaatgtgggaaagaatgaagagcagcagtaaaagaaatacctagcgaaaaaaacaggaagcatattgaagctcggactagaatttcttcttggtatcagagagacaagtttatcacagtatttttttttttcctgctgacctattgataataccaacaatgttgagtggcattttcttcttagtttttaatttcttaaagaaaatatactccatatctgcagggaaaaaaataaaaatccacacctgagaacagatccatacaacctgcttacaaagaacagctcctgtgctacctgaggctgatttatttgaagaacaaaaggaagagagacaatttagtgtagacaagtgctattcaatagaactttttgcagcagtggaaatatccataaatctgcagtatccaaccaaactagccacagacagctgctgagcaattgaaatgaagctggcacaactaaggaactgaagttcttattttaattcaacttcaaatggtcacatgtcactagtgactaccacactggacagtgcaggtgtagacggagttcagatcagactcctgaaacttaatggctctaaccttaggcaagttacgttaacatctaagcctcaatccctccaagtagaatgggtgcacctaaatcatagggttgtcctgttgtcctgagcaacattatgtaaagcacttagcccagagcctagcacatagttatctagagttgggaacgtcactcctggtgtgcatgtccagaccctacccgggagaagggcctaacctatgactttagaaccctcagttgcaggtgtgcatgttccagccaacactccactctgagtgcaggctcatcaggacaccatatggttgtaaactggctgccatgtcccaatccttccagctcttgagggtcagttctcaccttatgaacaaattaacaggctctggacctataagatcaaggaccactgcgccccctggccaccccaccgcccccccccaactttgatctgattgactttggcttccacctactgtttaaaatgtgtatgttgggggagtagggacagcacgggggaggggtttactttcctgactctagcccaggacatttggtgtttttgaataggcaccattcagccttgcttcagtattaggaataagatactttttattccatcctctatggagacaaaaagctgctcctcctttgagtactgacctacatagatttccatttctctcttcagcctcaggccaaacaaacaacyggacagggcagcagaacaaggctgtctcctcaggatcctgccaaaggcactgtcctctccaacctggacccagccccacttgcccttattggttgcttacacccagagtgcacactcacaggaaagggcctctgctggctgcaggtgatcatcttgtcccttctctgccttagtgtgtgttattgccatttcaatgtcagtggttttttatgtattttcttccagtctttgctgctgagatctgactgtatatactattttgtatcctttcatgtatttctttcatgtatttcaatgcagccctcaacatcatcatcataaatctctccagcagaatgctggaggcctccctcttctgaacctctacatgctgctggctggcatcaagcagaggtcatcactgggtgctgaacaggtcagctccctagggcaatgtgagcaaagtgttgtggctcatcctcgatcctttatgcccttttggcaagattcctttctcttctcagtcacagcagatggacacataatcttgttctcccaggggctgcattctcagtagtcttttccctgctccttgggcgcctggtcagggaggtttgtacaagcctgcgcacacacagcagtctgtcacgaggctgggccaaccttttttttttttttaaacagactcttgctctgtcattcaggctggagtgcagtggtgcaatctcagctcactgcaacctctgcttcccgggttcacaagcaattctcatgcctcagcctcccaagtggctaagacttaacaaacaggcacacaccatcactcgcagctaagtttttgtatttttagtagagaccacgtttcgccatgttgtccagactggtctcaaactcctggcctcgagtcatccacgcacctcagcctcccaaagtgctgggattacaggcgtgagccatggcgcccagcctgggccaaccttttctgagccatagtccagctgtactacagctgtatccaaaaggtaccatgtatctcccagggtaacctgaagacctaactgggcatactaactgtcctcagatttcagttctttaaggcccatctcttctagatcagtgtaaatatctgaactcacttggtgcttcaacccaattggtcttgggattcatcctttacctacccagctctcattctcttctaggttgttccatggcctcttccatatattacatttgtggtcttgagcaagttagttagttacaacaacactgagcatcttgaccaaggtcacttggcccaaccacaggctaatcccaggccatgtgcacatcccaggattagcttgtggtttatcagttgtcaatttttttttttttttaatacagggtctcactctgtcaccctggctggagtgcggtggcgatcagagctcactgcagcttcaatctcctggctcaagtgatcctcccacctcagccttccaagtagttgggactacccacatgcaccaccatgcacggctaattttttggtttttttgggttttttgtttgtgtttttttttgttttgttttttgagacagagtctcgctctttcgcccaggccggactgcagtggcgcaatcttggctcactgcaagctccgcctcccgggttcacaccattctcctgcctcagcctcccgagtagctgggactacaggcacccgccaccacgcctggctaattttttgtatttttagtagagacggggtttcaccgtgttagccagggtggtctcgatctcctgacctcgtgatctgcccgcctcagcctcccaaagtgctgggattacaggcgtgagccaccgcacccggcccttgtttgtttttttaagtagagacaaggtctcactacattgcccaggttggtctcaaactcctgagctcaagcagtcttcccaccttggcctcctaaagtgtggaaattatagcatgaaccactgtcaggctcttttgtcagtcctatcaacctctaacatcctcgcaccagacaggacaggtgtctgtattgaaactttattacaaarttataaagcagagctctgtaacaaaataatacacatttgggtttgctttaacctccaagtaagtctgagaaaatcttaataaaagccacttgaagtaacaattcacatccaagagatttccacaaatttatacaatgtatattgagcactagttcctgtacagcttattcttattagtttggatccaactattccaatgtattatgaaccagtcagctatctgtcttttgaaacaagtcttaactgaaatctcagagtaatcagcaaaagctacggaataattctaagaattagatgtttccatatcattaaaaccaaggatccatgaggggcagaagggaggattcaaagatttaaaaaaaatcaaattttagaccttggttaaatattaactggaatgggatcttggaactcccaactttaatttggtgtaataaaaatgatgcaaaaaaaaaaaaaatcagggttgtttgacaccttttttcctaaagggaaaccttcaccaaaaggggataaaagatttaaaggcaaaatgagtaaacaacctcagttttaattcttactgaggttactaaccagctatcagtatattattttcgatttgtgtctaggagggaaactgaagaggaggtaaggcttcagcagagaaagcaggttgtaagtagagagccagcttctgcccttaagttactgctagatcttagctgaattgcacatacatagacctgttttacagaggaactgagtagctgaatgaatgatcctttgctaattggtaggcattgtaaactatagtatttactgcccatgacaaaagtggaaagggatgtcttcatgagcaaatctgattcccccaactcctgcaaaggctgtggttcagaatcaaatcatccaggactttgtataacattgaggtaagtggcccagtgttcagttgactagtttatgcagttatttcattcctccaaaggggtttagtggttggtgatggaagaaagcataaatatgtctgtaccaatgtaataagtccctttagaggtttccctctgccatccagagtcatgattggttctagtctcagatttttcagctgcatgggaggggtaaggggtgggaggtgtctgccaaggcgtttagggtttgcatagttcatccattggtaatgggaaaacactctgctttcctgatcatgtgttttgtgcttggccacgcttctgcagcaaactcttaagtcctccagctcctctagggatgtaaagactgtgagggctcaaatacatcacctactcattgcatggtccttcctaaagagcctagaaaatggtttctcctgctgggtgtggtggctcacgcctgtaatcccagcactttgggaagctgaggcgggcggatcataaggtcaagagttcaagaccagcctggtgaacatggtaaaaccccgtctctactaaaaatacaaaaattagcctggtgtggtggtgggcgcctataatcccagctactctggaggctaaggcaggagaatagcttgaacctgggaggtggaggttgcagtaagccaagactgtaccactgcactccagcctgggcaacagagtgagactcaaaaaaaaaaaaaaaaatgctttctccctgacctgcccccaaaaatcagtgggctaggaaagggaatgaaagtagggtctcctcactccccaccaacctgggaaataaagacttgaactgtcggcttacaacagaatccagtctcattcagtacctcctgaaagctcttaagtgctctgtcttaacatttgctctccaggaacttcaacagcagtctggccagagaagagcacaggctctttgcctaaatctatttcttcaatgaaaccaaatttaaaactaccatggataagggagggatttcattttcag

SEQ ID NO: 95360 - DNA, 98662 bp, Homo sapiens
tgtttctcgcagagggggatttggcagggtcacaggacaatagtggagggaaggtcagcagataaacaagtgaacaaaggtctctggttttcctaggcagaggaccccgcggccttccgcagtgtctgtgtcactgggtacttgagattaaggagtggtgatgactcttaacgagcatgctgccttcaagcatctgtttaacaaagcacatcttgcaccgcccttaatccatttaaccctgagtggacacagcacatgtttcagagagcacagggttgggggtaaggtcacagatcaacaggatcccaaggcagaagaatttttcttagtacagaacaaaatgaaaagtctcccatgtctacttctttctacacagacacggcaaccatctgatttctcaatcttttccccaccttccccccctttccattccacaaaaccgccattgtcatcatggcccgttctcaatgagctgttgggtacacctcccagacggggtggtggccaggcagaggggctcctcacttcccagtaggggcggccgggcagaggcgcccctcacctcccggacggggcggctggccaggcgtggggctgacccccccacctccctcccagacagggcggctggcctggcgggggctgagccccacctccttcccggactgggtggctgccgggcggagacgctcctcacttcccagacggggtggctgccgggcggaggggctcctcacttctcagacggggcggctgccgggcggagggtctcctcccttctcagacagggcggctgggcagagacgctcctcacctcccagacggggcggcggggcagaggcgctccccacatctcagacgatgggcggccgggcagagacgctcctcacttcctagatgggatggcagccgggaagaggcgctcctcacttcctagatgggatggcggccgggcagagacgctcctcacttccagatggggcagccaggcagaggggctcctcacgtcccagacgatgggcagccaggcagagacrctcctcacttcccagatggggtggcggccgggcagaggctgcactctcagcactttgggaggccaaggcaggcggctgggaggtggaggttgtagcgagccgagatcacgccactgcactccagcctgggcaccattgagcactgagtgaaccagactcagtctgcaatcccggcacctcaggaggccgaggctggcggatcactcacggttaggagctggagaccagcccggccaacacagcgaaaccccgtctccaccaaaaaaatacgaaaaccagtcaggcgtggcggtgcgtgcctgcaatcgcaggcactcagcaggctaaggcaggagaatcaggcagggaggttgcagtgagccgagatggcagcagtatagtccagcttcggctcggcatcagagggagatcgtggaaagagagggagcgggagcgggagcgggagagggagagggctgtttccacatatttattgttagtatgtagaaaacctttcttagtaaaagaaagaaatgtactcttcggtgaagtaaacttgtttagtggtttccccttcacctgctgggcaggtaacaatctatttattctaacattcaagtacctccacaatgtgcctctgtatctcttaaatttaacctcatacctaattgctaaataccgatttctactgctactgggtttactcttctgtcacttgaatacaccttactcattattcattccacctccatgtcttggctcattgccatttgccctctggaatcttccctccactggcttcttcactgcaaactaaatctgaactgtccttcaaggataaggtcaaaactctttataaggtgccttccctgataatcccagcctacattgctccttttctcccctgatgtttttttttgtttgtttgtttttttttttttttttgagatggagtctcactctgttgccaggctggagtctggagtgcagtggtgcgatctcggctcattgcaacctccacctcccgggttcaagtgattcttctgcctcagcctcctgagtagctgggactacaggcgcccaccaccacgcctggctaatttttgtatttttagtagagacggggtttcaccatgttggccaggatggtctcgatctcttgacctcatgatccacccgcctcgggcctcccaaagtgctgggattataggcttaagccaccacgcccggccccctgactcttttaaccaatattgtacatcactcaatcattgatttcgtttttaatgagctttaatatacgtcttgtttccagaaatagatgaaataccctgagagacttctatgatagctatgatggcaccacatcatacattacacaaacttaattgtgtaactgaggaaaggggagaaacgtttcaagccatgtcagttaaagcaaggttactggaactttggcatgcaaaggggataccattaattctcatgaatctttcctccaggcaagatccatgctctgtaccactagtaaaaggactatcttcttcttccttcctaaaaatcccaacacctccaacaaaggtctacagttagatttttaggggtttcctggtagagcacaaataatcccaaggaagctgcagtaacacctcctggccaccagaggacagggagcagtgggagagatttgcttcccctagcaaagtcttcaagaggccagaggcacaggctcaaagttgcttctccatctgtggccttcaggctttacctactactgccagaggtgctagggtgcctcccatcttcaaatgggctttttttttccctcctataaaagatgggccagaagttcccagggccataccccgcaacactaaccttcaatgattaccaatcataaggaatgcctttagttgcaggacttaaaggcagaaaagtagtaacaggggtgtattatctttcgaacccacccaaacctgcttatcagttcttttgctagtggaaaaacgtgctttaggcagggtgcacatggatatcccacagcaaacagtgcctttagggtctagtgtcccaatccggcacattgtaaatggaatatttgaagagttagattattcctacacataaattctggctcatggagcagtccactcgcagggtgcttttccgtcattaatcacatctttgttatgtgatatccacgtgagtacttctcagtagaagcagcttcatgctcaaatgctcaaagaacattggaataaagctccgattgtcctattcagtgattccaagtcctggtttgtcaccacctcaggtctctcgttttccaaagtgcataatgtcatctcaaaacagacattttaatgaattcaaataataaaatgcacgaggtatgtggagttaaatcaacaagggttttgtacctctcaagaggcggttaacccctggtcttatttaaagatgtttctgcgctgcctcctgtagaaaacatttttaaagaaaatgtaggctgcttatccttgtatttgtaaatataagcaaagtaaagtaatgtaggaacatttatgtgggggctttcaaccataaacatatagatagctgaatgcctgacaacagtagtgtgatttttcttgaagtacctgtaacttctctcctgagagatggcagagccttgccttttgcattcgccagactttttacagagcgagtgtaattctctcaaatcagtgtttgcgttttttgacgttggtgaggcagctggaaacagctcaaggaggagggaaaggttctgcgtctgggtgagggagaaaaccctccgatacctgttggggcgcagcactggaggcggacaccccggcccgggggtcggggccgcgagcccgggrgtagggggcgggcgcgcgggcgcgggaggaggaggaggaggagggagaggtgggggaggaggccgcgggccgcgcgtcctccggcagctccggctcctcccagcggcgcccggttttttgcctcagagtcgccggactctggaagggaacatgacctgacccctccccgagcggccggaacgaggcgcggagccgcgctccgggctcgggcggccgcgggatgggcgagcgcgcggccccgccggccgcccaccgccctgccctcgcctgtctcctcctttccccggggctccgctgagttcattcactgggattggtttcaagtgacgccatctctttatttttaaaccaatgacctcatccgcgcttgaagtttcctgaccagcgactctttctctttcccccaaccccccaccccacccccccgcctttccccctctttctatgtatcagtgtttggggggctttaatcagtttttaaacgattattaccacctctctctcccccccaacccccactttcacaacgcggccccccacctttacctccctaagttcttcatctctttcgacattttttttgaaggctgatgggggggagggtggaagagaaagagtgaagaaaagttgcgagcgtctcctctcttcctaagcctcccgccccaacccacccctcagagaaggagaagataatatactgaaaagaagaggaggaggagagcgacgggacgggacgcgagcgggagcgcagccgccctctcggctccgcggcggcgcctcgcaagtccgggaggcgaggggggcccgaggggagacgccgtgacaactttcgtttccctctgagggaattgggaggtcggcggccccaaaagtaagtggccttgcggggccgcgcggggtgtgcggcgggagggtgcggggcccggggcgccctcccgcccggccgcatggacgctccgcagcgcgccccgactcccggtgccgggcgccgcgctccagccccgccgtctctgccttcccgggcgtaccggccaccctttcgggaggcggcgtgggggcgaccgcggccgggggccgcaggagcgtttgaagcgggggtgtaggcctggccggaggctggccggagcgggaagggggcgtgcggccgggcgcggggtcgcagtgggtgcgctcccggccgctgcgcggcgcttggaccgggccccgccgagaggagcggccgccgcgggacgcggcacctttgcgggcgaagctgctcacttccaggcgcgactgttacacaacacgcctgccaagtggggccctggcctgactgttcccattatccccagttcgcctttggtgtaagcagcgaggccacctgggtggtgacggtgctgctttcttcaaccaaccaaccgaaaaagccctcaattttcggacaggggctcgggtcttggcgttggggggcccgacgcctagtgacttctttatttacactagctgcaaaacgtgagaaataaaaaagcccagggtctgtgtatcacgtgtagtttcatgtaatgaaacaccacagagggaaatattttcagatgctgggtttatttcctaaagaataccaataatgaaccagagaaaaggcaagtagatctgaaaatgaatggatactgcaaaatcctaaagaagtttaggaaacatcaactgcaaggattcttggcgttttgaagtcgtgggtgtctcagattggagaaagcacacctctaaccagcctgtgatgaataagctggggaggaaaaaaacctgttgcataatctcatttgccgtggggtttgctgtgccrtccccttgaaccaaagggaagtgagttaagatgcagggttttaaaactctctgaagtttttatttacccagcgctctggctcccacttctgttttaaaagattataagtaaatactctgctctttcaagtgaaccaaacctatcaaacctgtttagaaaataaaccaggtatgtttctttctcttctttcttttccgcctctgtgtgtgtgtgtgtgtgtgaaatttaccatccatgcaaaagtttaggactagtgtttggggaactgagactgtcagaaaaatgcctctttatgccactcaccttatggggctgrtggagagtccacgtaaaggataaccgtttcctcaaaggatttatgctgtttcacctccatcaagaaaagggctttttaaagttaaggtaaaattttaaaagaaaagatttcgtaccaattgaattaattactctttaatacctacttttccttgagtatcacatatattggtggataccacttgggaggctcgtggagtctatttggtgaaggcagcagcttggagaagtaaaatgaaaagcagaatgtatggctctgtgtagggattttagtaaaaatgtgagtaggcacggtgaaaggtttttgttttttaaaattgtggaatttactgagtttgaagacaatgtggaaagttgcattaaaattttttttaatttggctaacatttacagtcttatgtaaaaatataggctaaataacaccagcccaagagttggattttaggtaaaataatttttgcacttatcaaaattctacatgggggaaaaattagaaatgaatttattttgaattttgttagtgtgaatagtgttttgaaaataactcggttcaagtactataaatgtacattcagataaaaaatgtaaactgtggtaattaattttttttttcttttttagtattaacctctgctatatcagcaactcaaagtacaatatctcatttggcttgattatagtgccaaatgatcatagtgcatgattatggagggggctaggaacagaactgcagaattatccagttttgctcctttttcaatttagaatgccctatcctttcgttcagtttggtgattgtaagtgtgtacctataaaataaaaatagacatgtaaaattggggattggagtctttgggccaaaagcttaatggcagtaactgagaaggcagtaaaagaggagacactgttaccccggttcttttcctttttcctacacgtttaaaaattatttgtgggacagttgagagtggaagtgaggctgagatgggaggggggaagagtaggtgtgagaaggttgcagagtttaggtagggatcagaataagaggcaggatttatgtgttagtgtgttttgatgctattttctgtaaatscctggactgggaatttaatttcatacagtgtttagcatatgggattaatatattgatgaagcagacttatatagctgtccagtattaaattttttcaattttcagctaatcctaaaaatcctactaaatataatttgctagaattaccagtgtaataatttatcctagaactcccaagttttcctagacaaaaataattttctacttcgtgttacctgaactaaaaatttcactggacattcagtgtttttaaaatgcattaagttctcaagcaaaaggtactttaatttgaagaagtaaattaatatagggtgaactgatttggatcagaatcccaagaaaataaggagataacttagaggaaataaaacagattttatgacagatttcaacagatgaaagaaactagttaaaaagatttcacaggaaaaaccatagttggtgcttgattggctttaaaagaaatttactgatcatttaaaacggagatattcaccatcataaaagaaaatccgaatgttggcttaaacaaaaacataattaggaaaataagtcttgcccaaagctacatatgataaattccaaagccagatgtcaattttttttttctgattttcttgtgttgtagacaatctgttatttgtatgcatttcattatccttgatgatcaagggttggctgtgtgaagagaggttcataaaggttggccgaatttaaagaagcaggctcaggctttaagaagagctggttcttctacacaaatggattgagacagggagttagaattttaatcaaataaataactggaggaaacagtggctcaaaagaaggatgtaagacagattaccttggacaggtacaaagaaataataaaagcttgccaggagtatgatcagtaaggaagggaacagaatacatcttgccatgaaaggaaagaggaataagtggaaaaatgccctctgatacctcascaacaagagagaggaatgaaacttcacgcccttcttgactggggttagaaacatcattataggtattgccacaaagtcacaagatttttttattacattaaaaaatgtaggccaggcgtggtggctcattcctataatccyagcactttaagaggctaaggcaggaggatcacttgagctcaggtgttgagaacagccctggcaacaaagaccttgtttccacagaaaatcaaaaaattagctaggtatggtagtagtacgcagctgtggtgccggctactttggaggctgaagtgggaggatctcttgagcctgggaggtcaaggctgcagtgagctatgatggcactgctgcrctccagcttgggcaacagagcaagacagtgtatcaaaaaaaaaaaaacatataatcttgagggatagtgattgatagggtaaattatgagcattacttatatgagaatgtaaaatttaaaattgtcagaaataaaaagagggattcgctgtaatatcatggcctattttgagttatttgaaagggagggatacattataaactgaaattattaactgaatttctggattaactactgataggaatcaagcaaaacatttgttagcagtatgctgtttacatgtgctgagatggattccaaaagttggggacactggcccatgttatggagaacaggattataagaattttaagggagatacatacatatgcaaagataattaccagacagctggcaagtgccaaattcaggtacaaaagagaaagagggctcagggaggtaatcttcatagagataatagaatttgaccctggccttaaagattggttaacatgtgtatggagagagggaagtgggggaggcgaaaggcggaaggtattcacccatctcattcagcaaatttatgctgatcctctaccaagtgctagaccctggccatacagtggaaaataagagaaagtttttgcccttacgtaacttatattctagtgggagaagacaggacaataaacaaagacagtaaacaagtaaacagtacattaaaaaagtgatgttaaatagtggtcggtagtaaaggtaatgatcagggtcgataaattgcacttattctgtgaatcacttgctttgcctatgatagtctaatgaacagtcttcatgttataactttttaatattcatgtgcagtccaaatgaatttgaataaaaatctacacattaaccagtttttaaaaaaagaaatgtgaattaaagaaaaagaaacctatgtgacttttttttaggtcaaagcatggaaacttagatttttttttttttttttttgagacggagtcttgctctgtcgccaggctggagtgcagtggcgccatctcggctttctgcagcctccgcctcccgggttcaagcgattccccttcctcagcctcccgagtagctgggactacaggcgtgtgccaccgcacccagctaatttttttttgtattttagtagagacggggtttcaccacgttggccaggatggtctcgatctcctgacctcgtgttccacccgccttggcctcccaaagtgctgggattacaggtgtgagccaccacacccggccagaaactttaaattttttttttaatgccttgttaatgtatccacagttcttttgctgccatttgctaagaatctcatgtttttttacaatgagattaatgtcattgtttactgttcagttagctttttcacgtattgggctatattcttaggttagactctctgttaggaacaataatcaccatagtgtcataaagtgaagctaaattccaaagattgttttgtatgggaacatacraaagaaaagatgtacagacaataaactgttaggcttaattaccaataggtaaaatagggtaagggatgacacctgttcaactcttgtccctatggcatattgttcctgtattactacaaaaagtaaaaacctgaagcaaagatgttccaaaatggggaagtcttgatctttcctgtagttattggactgccaggtttgttttgttattgtttagaagatgtccttcatagtggtcaactaaaaactgatattatcaggagctatttcatgttttggggcacattttgttcttctgaagcattctttaagaaatatgtgcccttcactctttttgcagtttttaatttttttttttttaattaaagatggggtctgtctctgtcacacaggctgaagtgcaatagagcaatcatagctcactgtagtctcaaactcctgggctcaagcagtcctcctgcctcagcctcccaagtagctgagaccacaggtggtgcatgccaccacacccggctaattattattatttatttttattatttttatagagatgggggtctcactttgttgcccaggctggtcttaaactcctggcttcaagcagtcttcctgccttagtctcccaaagtgctaggattacaggcacaagccactgtgaccagcaaaacttttttataggtgaaattgaggtaaaggattttaaaaagtgttgatattaagtgtgtctatagaaccaaatccctcaagaattattctgtatgcacctaaccaattttcatctacaaaatacttgagataaacctatgggaaacaattttaatacaaggtaggaaattctttagtgctctcttgatttcctcctaaactaaatgcttaatttatttaatttttatttttttgagacatggtcttactctgtcgcccaagctggagtgcagtggtgtcatcacagctcactacatccttgacttcctcggttcaagggattctcccacctcagcctcccaaatagctaggactataggcatgtgcaactatacctagctaattttttattttgtgtagagacagggtcttgctatgttgcccagctagtcttgaactcctgggctcaatcaatcctcccacctcggcgtcccaaagcattgggattacaggtgtgagccaccatgcttggccttaatttagaaaagaattacagctataaatgctgtgggtctgtggtatgtgtaataaaagttaatctgacttgtactcctcaaaaatatttgggaaagacagaagaattcaggtttgttttaatgtctatgtatgttggggtggggcaaattgcgtttatagaaaaaagatgtaatggtatggcaagataattaatatttaatatatccattatttctcttaaaataaatggggaaagatgtgtagagaagtatatgctacttacagtgtgcgttgtactagtttttaaatacacagtttatatcccaggatagtagagtaggcttttgacaaatgtttgtcaaataatttcagtcagttcttacacctgttgctttttatagccgttccattatatctctagcttagagcactgtgttttgagctttgagttgcagtttgcaaggggttgacttatagtcttgggcatggactcttatttgagccatgtgctcactctagaacggggtctctgacctcacctccagctttgaccctgtggctgacctgacttcttcttttccaaaatgatgggtggttgtttccagtcacctttttcggctcacagtgtaacagctccttctcttcccgagcagctgagctgtgtgctctttggatcacttctcagaatactaaggtatatgtattgccatgctggcttattttgtagtgggtttatttgttgttgttgcttggtttttgttgttattgtttggttggtggaaaagaaaattcctcgagaagatagttcttgacttgttttgtaaactgtacatggtatatgaagcatagtattatttcctcttccttcgtagctttagttaaacatcttgggttgacttgagaaagaattggtaagaatgatattttgataatacccaccaaccaaaaactaacaaagactttttttttttaattgagacagttgggaaacttgaaaatggaatatatattaggtgatatttaatagttacaaccataatgttttcagctataatagtcatattgtggttatgttaaaatattttcatgtgttaaaaatacatatggatgtacttacaggcagaataaaatgatgcraaatgttcattttaaaaaacttcaggatgggcacaaacacacagaagtgggaaatgaataaaagagtattgataaatttttgaaaattgttgaagctgagtaatgggtaagttggagtttgttattttttttacatttgtgtatatttggaaatgtccctaataatgatttaaaatatataaccaattataactgtagggtaagaaattaaatgcaataaaattgtgttgttgggttgggtatgagggttcattcttatgatccagtactttgggaggctgaggtgggaggatcgcttgaggtcaggagtttgagaccagcttaggtagcatggtgagactctgtctctgcaaaataaaataaagtaaaattatatgcttggacatttgagctaattagctaatcaaaagtctgcacttggctttttttttttttttttttttttgagacccagtttcactctgtcacccaggttggagtgcagtggcgcagtctcagctcactgcaatctctgcctcctgggttcaagcaattctcctgcctcagcctcccaagtagctgggattacaggcgtgcaccaccacaccagctaatttttgtatttttagtagagatgtggtttcaccagggtggccaggctggtctcaaactcctgacttcaagtgatctgcttgtcttggcctctcaaagtgctaggattataggtgtaatccactgctcctggcctgcacttgacattttctataagttctgtttttagtaataaaattttaagaataaggaaaatttcatagacacatcgtaagaggccaggcatggtggctcatgcctgtaatcccagcacttggggaggtgggcggatcacttgaggtcaggagtagaccagcctgggcaacatggtgaaaccttgtcgccacaaaaaatacaaaaaattggctgggtgtgatggtgcacacctgtagtcccagccactcgtggggctcaggtaggaggatcacctgagcctggcaggtcaaggctgcagtaagccatgttagtgccagtgcactccagcctgggcaacagagtgagaccctgtttcaaaaacaaagaaacaaaacatcataagaagtgtttaaaatgcttaactttgagatcttgtaataatagtgtaccttgtagtttataaattgcttttacatattttgtctcttttatccttggaagacatgagttacccattttacagatgaggaaactaaggccttagagagatgaagtaatttattgaaatcctaaagcaagtaagaagtggtgctagaattggagccaagatcttctgattcatattcaggtgtccattctcttgtatacatatacttaaaagtgctatttttttgtggtactataaactaatggttttcaaacattttggtctcaggacacatttatactcttaaaaatttctgaggaccccaaaaatcttttgtttatatagactatgtctgtccatacttaacattagaaattaaaactgaaaaatgtttaaaatatttatttatttaaaaaataacaaacattaggccaggcatggtggctcatgcctgtaatcccaacactttgggaggctgaggtcagtggatctcatgaagtcaggagttcgagaccagcttgaccaacatggtaaaaccccgtctctactaaaaatacaaaaattagccaggtgtggtggtgggcgcctgtaatcccagctacttgggaggctgaggcacgagaatcgcttgaacccgggaggcagaggttgcagtgagccgagatcctgccattgcactccagcctgggcgacagagcgagactgtgtctcaaaaaaaagaagaaaaaacaaagagggttgatataaataatatgcttttatgaaaaaggtattccaacacacacaaaaaaatctggtgagaaacatggcattgttttacgttttgccattctctttagtatatttctttatagaagatagctgggtttgcataattgctcctgtattcaatctgttgtgatatgttgttttggttgaaatacgtgaagaaaacctggctgcacacggatacatagttgaagaagggtggggtattttcatagtcttttcatataattgtgaatatttttgttacaccaaaattcaacaattggtaaatgctttttatttatttatttwtttttttgagatagtctcgctctgtcgcccaggctggagtgcagtggtgtgatctcagctcactgcaacctctgcctcccgggttcaagtgattctcctgcctcagcctctcaagtaactgggattacaggcacgcaccaccatgcccagctaatttttatatttttagtagagatggggtttcagcatattgaccaggctggtctcaaactcccgaccccaagtgatccgcttgcctcggcctcccaaatttctgggattacaggcgcagccaccgctcccagccagattcttaaatattagttgcactgctgaatctgaagccatgtcagtgaattttgtgtactctgtaacattaaaatccactggtccatcttgcactttgaatggatctttgacctgtgtgtgattttgtaactgcatacattgatcattcaaaaaataatggtttactaagctgactgggcacagtggcttacgcctgtaatcccagcactttgggaggccgaggcaggtggatcacgaggtcaggagatcaagaccagcctggccaacatggtgaaaccccgtctctactaaaaataacaaaaattagccaggcatggcagtgcacgcctgtagtcctagctactcgggaggctgagacaggagaattgcttgaacctgggaggtggaggtttcagtgagctgagatcgtgccactgcactccagcatgggtaacagagcgatattccatctcggraaaaaaaaaaaaaaaaggtttactaagttctgcacatctttgaaatgttggcacatttgattatacaatattaagcaaatcacagtcattaatatcaccatcagtctcatccaaaaaatctttaagaattgggaagtggtcaagatcttggtggcgaattcaagttttccaaaataccagttttctcttgaaagcttaatttatatcattggcaacagatagtgcccatttttttttttttttttttaatacagtctccctctgtcgcccaggctagagtacagtggtgtgatcttggctcactgcaacctctgcctagctcagattacacgcaccaccacgcctggctgattttttttgtatttttagtagagatgggggtttcgccatgttggttaggctggtcttgaactcctggcctcaagtgatctgcctgcctaggcttcccgaggtgctggggttacaggtgtgagccacggccagcagcccaatattgccggtttttcttaaagtgacaggttcactttattcattttagagaaaatgtctgccagataccaaagtctgaataagtgtaaattgtctgctagtcaaaaaagcaaaaatggtgtcctrtgaaaaaaaaaaattgtataaatgcttttccccaagataatcattatacttaggtatgcagcagaaatgctttatgtgtgcttcctatttcatcatacagaatatgaaaaaggccaagttctcaagagttgacgttttaaaaattaataccttttattattttatcaaggatgttgttaagtgagactggcttttttttttaattatacttkaagttttggggtacatgtgcagcacgtgcaggtttgttacacaggtatacacatgccatggtggtttgctgcacccatcagcccgtcatctacattaggtatttctcctaatgctatccctcctctatcctcccaatccccaacagaccccagcgtgtgatgtttccctcccaacagaccccagcgtgtgatgttcccctcccagtgtccatgtgttctcattgttcaactcycacttatgagtgagaacatgtgctatttggttttctgttcctgtgttactttgctgagaatgatgggtgaaactgggtttttaaaaaatgataggcagtaaagaatatacaagtatatgttttcttagctgtcagagtgatagatacatcatcaccacataccgtgcatcctcgacccactgttgtacactcatgagggaatgaaagtgaaaaagacagataacatcttcatattatcaaaaatagttttatagatcccttgaaggggttccttcctcatctctggatcacactttgaaaactgctggtgtaaactagtaccatgtgctgacatctttttagagcagtctgrtacacatttttttttttttttttgagacggagtctcactctgtcacccaggctggagggcaatggcgccgtcttggctcactgcagcctccgcctcccgggttcaagcgattctcccacctcagcctcccaagcagctgggattacaggcaccctccatcatgcctagctaatttttatatttttagtagagacagggtttcaccatgttggccaggctggtcttcaactcctaacctcaggtgatccacctgcctcagcctcccagagtgccactgcgcctggtctgatacacgcatctaaatcaataaagtaacatgtccatcttagttgatgaatttgtcagggagaagggactatgttagtgtgtaggatgagccatgtggccagatactattatgggtggaaggtcatataacatcagagcgtgttggataaagggtagacagaagggaagagtcagtgagagcactttataacataaaaaagtgaaaatttgctctccctattttttttttttaataaaaaagcactgtggccacatatatacacacatatctgttcatacttacttattgtattcaaaatccagggtactgagttattttttttcttgaatgacagaatgggagagatggtaacatatgtgagaggagaacggactgctcttggcagtcatttgtttcatccaggtggggagactgttatttttttcttttgggagagctaagggatggcagaagataaatgaaagaagaatggtaagagtgaatggagtaggcattagtgattatggaaatagctataggcaaaatgaggctgtggacagagagtggagctaagcatggagggcacggaggaagactccaggatcagctgggctcccccatgtgctgggcctggaagaatgggactagggaagtgcgggggtgggtgcaacaggagtcatggagatgcacatataattgaaggatttccatcaaaacacggttaaaataactatactagatagtctgccttttagcaacttaccagtattccatttctgttagtaggaattgtgtattcagttacacaggggaaagcagcagtgccactttttcagtcatcttgatgactgggttgtatccctaataatgatgtcgatggtaaagaggctaaagctaaaattaggttttgggttttgggcagttactcatatttcattgaaaatgaaagactaattgtatttttattttaatagagaaagatatacatatgtgtgtattgtctgtaattaaagtacactcagtacagtgttctcatttttttgccctaggggtttttcagcttggggtctgtcaccctagtctctgcttttcataggctgagggataaagtcatgatcatgattagaagtggaggacaacccacttgaaatcccctcctgatgatttccccttttctccacgattgcagacctgccctgcttactctaagagcagtatgttagctggccgcttctgtaggatggtttgggagaaggaagatagtatcctggagcagttcttgacacctttagattattaaaggttgggaggaacacagcaagaaaaaggaagagatctattgcaaaatatttcttttttttctttttctttttcttttttttttttttttttttttgagacagagtctcactctgtcaccaggttggagtgcagtggtgcgatctcggctcactgcaacctctgcctcctgggttcaagtgattctctttcctcagcttcccgagtagctgggattacaggcacgtgccaccaggcccagctaatttttgtatatttagtagagatggggtttcaccgtgttggccaggcttgtctcaaactcctgacctcaggccgcctgcctcggcctcccaaagtgctgggattacaggcatgagccactgtgcccagccaacacttgttgtttttagctgtcctaatgggtgtgacgtgatacctcattgtggttttgattcacatttctctggtgattggtgatgttcagcatcttttcaaatagttggccatttatatatcatcttgggagaaatgtttattccagtcctttgcccatttaaaaattggattatttgagttttttgttgttgagttgtaggatgcctttttctttaatgtgaatcagctacttagaactcacagattagatgtgatatagttcagggatacaaaaatggagtgagtggagtacagtaactgtcatctctgcttcttctgctattacyrgtactgcttagtcagggtttcatactccaaagaggatttggagggctcgggttgattctcttcttcttccctctcctcattatatgtaaaccagagggatggactaggtgatatctaaggtttttccagctctaaaattgtaaattttgcaagcattgccttttaccagctaacctcttgtgtctaagatttccttggaatctcagtattatctaacttctacactgagaaatctttgttgccagccaatagctagaaggtagcactccaccaaagctttgttggatctttgattttctaacttttgatcttacttattttcctgcttatagcatggtatcacctcagaatcctgggcttaaatatttgtttttttaatgctgctgtacacaagtcctatggtggatatggcctggagtagtagagcttgtacttaccctggagatacacagtagtatgttttgcttttttttttttttttttttttttttaagcctactcacagtcataaggaagtagaaggtgaaaagttcattggacaatgtattttcttttttttttttttgcttttttttgtttgtttgttttgtttgttttgagaccaagtctcgctctgtcgcccaggctagagtgcagtggygctatctcggctcactgcaacctccacccgggttcaagcgattctcctgcctcagcctcccaagtagctgggattacaggtgggcaccaccacgcccggctaatttttgtatttttggtagagacggggttttgccatgttggccaggctggtctcaaactcctgacctcaggtgatccacctgcctcggcctcctaaggtgctgggattacaggcatgagccactgcactggcctgttattgttttaaatacatagagcaaacaaaacaccagtccaaattcagtgaatttttatttctgttaagaacagctatattttcatgccaggtataaagaagtatttctaaactgatttatttgttgtccatggctctcatatggacaatgatatcatgatgttaattaaaggtaagaaataatgtgattgtggttgaggcttaagggtactgctaagataaaattatttttaggtttcaagcacttgatgtttttaattttttgtgtcttatagatagtatctgacagatagccagtctttagggagcttattttagttatggagttatatattattgccatatggtgccatgacttaaaatgttctcatgctgacaatactataggaggaataaagtaaacaagcaaaatccagtaaaccaaataggaatgggtaagcaatatgtagggtgactcagaatgcatgagatgttggtagtgcttacactagaacacagcatgtctatctagtgttgtctttgtgcttgaccatctgtgacatctatattgctttctggcctattkccaggtcttgattgaccattaccagtcccttcttacaaaatactaaaaacacctgggtgtgtaaatagcggaggtaatggaaggactgaggcagcttcaaagaactacattgtggaaagttgccataatggtcagagccacccttgttcattcattcttaactttggttatacagtaactcaaggattgaaatatatttggtagcactgacagtttcattgcaaaatattatctaggccctttggggctacttatcaccatccatccctctgagcataggctggacatttaattgtgaaaaaacacaaccacgaaacacaggtaaagtaaaaaagataaaactaaaccatgggtgatcattagtagaccagaattcattaacataatcattatccagagggtgcagaatttcccccccaaatgatagcatttcataaatttataatattgtataaataactctcagatgttttcattatccatttattttgcatgggaaatataacttatttttatagtgtaatttcatttgggtttctaaaagtacatgatgttactgttattacatcaatatcatttataacaagttcttttccattcagatattcagaatccacatattaaatattagattggtacattatggctctagaactgtgatttggttaccatttctcttaccggctttgaatttggtggggaaagatttgccaggaaatgagactgaagctgtcatatagttttggctagattgtagtttataggatatcgttagactttatttatccatgtactctcttatctgttattagggtaacttaagatttgaccaggatttgtttttgaattttttggagcgatggaaacgttctgcatcttgattgtggtgatggttacattacagtgtacatttggtcaaaactcatagaactgtacaccaaaaagcattaattttactttatgtaagttaaaaaataatgctttaaaaataaatgtagtggccaggcgtgttggctcatgcctgtaatccyagcactttgggaggctgaggcgggcggatcacctgaggtcaggagtttgagactagcctggtaaacatggtgaaaccttgtctttacggaaaaaaaaaaaaaaaaaagtacacaaattagctgggcttggtggtgcacacctgtagccccagctactcaggaggctgaggcatcaagctgagaatcgcttgaacctgggaggcagaggttttcagtgagctgagatcatgccactgcactccagcctgggtgacagagcgagaatccatctcaaagtaaacataaatttagtaagattactggatgtgaggttattatacaaaacctatatttctatataacagtaatcagaaaatgaaatgtttagatgctgtttataatagcatcaaaaaatatcaaatgctggtaataaatctaagaaagatacctgaaacttttacagaagtttatataagttgattctaaaattcatatggcagtgcaaatggcaagaatagtcaaggtaatattaaggaagaacaaagttgtaggattcacactattgaatatacagtgtggaataaatgaatggataatggaacagaatagagccctgaatcagacccatatatgtagayactaatttatgattaaaatggcactttacagcaatgtggaaagaaagatctttcgataaatgatcctacgtcaattgcctatctgtatgaaaagaaaaagaaaactaattttggtccttgcttgccatcacttacaaaaataaattataggctaattgtagatctcaatgcgaaaggttaaaaaaaactaaagcttctagcagtgttcagccatattcgtcatcaaaaaatgctgaatgaaaccacagtgaattaccactacacactgatcagagtagctaaaattgagaaacaaacaaaaacttgaaaataccagtatcagcatgggtgtagagcaactagaaccctcatgtatggattctggaattgtaaattggaataactgtggaaaactggttgtatctattatactaaagtgttacatacttatgcgtttaacctagcaaacccactcctaggtgtatacccaacagaaatgtgtacttatgctcaccaaaagacatgtacaagaatgttcatagcagcacaattcataataactccaagctggaaacaacccacatgtccatcagtggaagaatagataaatacattgttgtatattcaatgagatactaggtagaagtgaacatgaaaaaactcttgctacttacaacaacatagatatgaacataattttgtacaaaacagttcagacacaaaagagctcaaaaacaggcaaaactcagccatggtataagaagtcaggttcgtggttacctttggggagagagattagtagtaggaagacatatgaagccaacttctggagtacaggtgggtttctatttcttgatcaggatggtgattacatgagtgtgttaaccttataaaaattctttgagctgtacattcatgatttgtgtatgcttattggcatatatgttatacttgagtttttacgaaatttatttttaaatgctttgagttaaccacaggagtaagtggcatacaagattgtattagtttcctttttcattagtaaagcttgtattatcaatgctgtaagggagaaaattatttgtattacaaatacaaataactggcctcataaataaatagaacaggcttagcttctttcttaaccaaatccaaacattcctaggcttcttgagttttttattggttttgtttctagggataaaccaattctttttttctcttcacaaaagaatatatttctggaagtcattctatatcagatagacatctttctttttacatgtccatatggtatactacattgatataataatatatttagccaatttatcactcattaactttgaagttgtttctttttacagttataaacatgttacagggaaaagtatttcacataatatacttgggcaggtatttatataagacaaattattggaagtagaatttctagatctcagattatgtgtattctatttacttttttatctttttgtttgaaaataattttaaatttacagaaaaaaataaaagaacagcatctactattaccagtttgccccctttgctttattacttgctctctcttcatatttatatatgatacatttttctgaaccataagttgtacacatggcccactatcctcaagcacatcagcaggtctccgaagaacaaggacagtttcctacccacagtacagttgtcaaccccagtaaacctgacattgatttaatacttctaactagcccacacgtgtatttcagtcctgtaagttgacacaacgacattcttcatagcattgtactgtctagtacagtcttagtttgcttgggttgctataacaaccttagactgggtagcttataaataacaaattgacttcttatagttctgaaggctaaaagtctgagatcagagtgccagcatgatctggttctggtgagggccctcttctgggttgcagagtaccaatttctcatcgtatacccaagaaagagagctctctgggggtcctttttatatagcatgaatcccattcatgagggctccacctcatgacctaattaccctctaaaggccccagtttcagatactatcacaatggacttagggttttaatttaagaatttagtggggacacaaatatttggtcttgcatacagggtccaattgaggatcgtgttctacatttacttgtgtctttagtttctttacatctggagtcatgccttggcctgcctgccctttttaaaaatgacagtttattgagatacaattaatataccaccaaatttaccatttaaaaaaagttgagatataatttcagtcgtaaaattcgtctttgaaggtgtgcaatgcagtggtttttggtatattcacagttgtgtagtaatcactactatctaattctaggacattttcatcacccccaaaacaaactctgcacattaggtcatacaccatttcccactcctcccagcccctggcaactgctgatttacttcctgtccctatgcatttgccctttctgggtatttctttttttttttttttttttctcttttctttttttgagatgaagtttcgctcttgttgcccaggctggagtgcaatggcgtgatctcggctcaccacaacctccacctcccaggttcaagggattctcctgcctcagcctcctgagtagctgggattacaggcatgtgccaccacgcccgggtaattttgtatttgyrgtagagacgggatttctccatggtcaggctagtacctaactcccaacctgaggtgatccgcccacctcggcctctgaaagtgctgggattacaggtgtgagccacggcacccagcctttctgggtatttcatataaatggattcatataatatgtggtctttggtatctagtttctttcccttagcataacgtttttggggttctcccatattgtagctggtatcagtattaattccttttcatggctaaataatattccatagtagggatatactgcattttgtttatctattcatcagttgattaatttttttggctgtttataaatctgctgtgaacatttttatacaagtttttgtgggtccatttcctttcttaadttattttagatttggggtatatgtgcaggtttgttacatgtgcatacattttcagtgctcttgtatttacattttaatctggatgttatatctcactttacagaatttttttcacagttatttctctctagggtttgtggtggaacacatgtagacagagaaatagttgttaggaagacatagacctggtagtttgtcactctgaagtgggctgtcagctgaaaagcttgaagaccatgggtctagacagacagctcattccaactacaactatcatagattgaccaactcctgagaatttatgccatttacctaccttactgggccttccaataagatagactaattttaataagagtttcttattttccctccttaacgctttgtgggagatactgttgggtggaaataatgtcagtgtaaccttgtcaaggcctgtacctcttttattcttcatgtttgtatttgtgtggggcaggggactgtgtgtacctggggttgaagggaagatgaattgtcttcccctctgcctttccctctaaaatcagtgccacagtgagaatcagcaagtggccaggtgcggtggctcacgcccataatcccaggactttgggagactgaggtgagtcaattgcttgagtccaggagtttgagaccagtctgggcaacatggtgaaactccagctctactaaaaatagagaaattagccaggcgtgatggtgtgcacatgtagtcccagttactcgggaggctgagctggggggatcacctgagcctgggaggttgaggctgcagtgagccatgatcagcaccactgcactccagcctgggcaatcagagtgagactcctggctcaaaaaaaaaaaaaaaaaaaaaaaagaaaagaaaagaaaagaaaaaaaagcaactgtctgcctcctgaagaaagatgaatctgtgctaagtggcctcctggcaggaagcaaccagcctttagggaccagctgacaggaagttgcctccagaattagtagaagtttgctggctggtggtgtcgccgctccctccaaacctcttgaccaggggttatttgtgaatacaaagagattgtgtagcaccctaaggagttggggtaggagagcgtccagaataaatacataggtgggattgaccacctcctcacctcctcctgttgacttctagatgtcaccacttgaaatttttctctcccactcttgctatgtgatctcacggagccttatagatatcttatgaaattgctttaaaattgtatcctccaaagattccttgagcaaaaagccttgcacagtatagatgttcaaaaactgttgtgtaagtgaaggaagcacaagttagacccactgtacaagggaaatagctgaatgagcattttctaacctagtgttccttgtattggatgttaatatgttacgaaaactcctgactctggttaaataccatctttaaaaatttttttaatttatatttttatatattttaagacagggtctcactctgtggcccaggctggagtgcagtggcaatcatagctcactgcaacctctatctcccgggctcaagctccccagtagccttgcagcaacctccatctcccaggcttagcctcactagtagctgggactacgggcccctgtcagcacacctggctgatgtttttttttagtttttttttttttttaaagtagagtcggggtctcagtatgttgcctaggctagtctcaaactcctggtctcattttcttttttctttttatgagacagagtctcagtctgtcgcccaggccagggtgcagtggtgcgatcttggctcactgcaacctccacatcccaagttcaagtgattctcctgcttcagcctccccagcctcccgagtagctgggactatgctaccacgcccggctaattttttcgtattttttagtagagacggggtttcaccatgttggtcaggctggtcttgaactcctgacctcaaatggtccacctgcctcggcctcccaaagtgctgggattgcaggtgtgaaccactgtgcccagcctttttttttttttttttaaataactgctggcccaaccttgagaagggtggtgacgtcctttatttaatgtaatatagattggctggaggcccgaatcttggtttccatcatcatcctaagtgaagttttacaggattggattagagaggaattctaaagggctgtatgcccttgtgatggtgattagccgttagtaatgggaaattcctgggtggagatatttatttaacgtgcattcataagccggtgaacactgaactctatctctcccaagctttaacaatctttccttgacacatctacacctaaacatttgtagatttttaagaagaaagattggaaactagattgcttcacccataaaccctgtcttattaaaccctaattgggctctgtgccccagcatatccttgcagtcttctgttgggtatcataagtgaattgttgtgctcctttattattattcaaattatagaggctgtgacattggagaactggatctcttacataataaaatattcagaattccagactttcaacatataaaacatcgtaagcaatagattaatcacagtgttacatgtgtcaccagatttctcctctgctctctcttaaactgccttccaagtgacctgtcccttgtgacagttttttaggagaaggtaaaggatccacctctgcttgttcgtgtgaaaaatactgatgcctgggcccattcctcagagattctgatttatcattctgaggtacatctggatatttaagagctcccagatgattttaatgtgtaactaaggttcagagctactctgttagccaaaatgctcctccatttaatcatgtactgagttgttccctttttagcaaatgttagaatttacaataggtgggaggattacctgagcatttattacatgctttatattttattacatactttaactgtcttactgtattttcatggtgacccaggaagttgacaagcatttgcttcgagggttcctcccccttcactagagtcctgccgaggctgttgcctcaccatttggttctctatttcatgcctggcatttcatctgtaacttcatggcaggctggcattttggtgagggcaactctccacagccacacccattaagtgtttaaaagggtgcattatttctcatcttttgaaatattttgcgttctgtgtttttcaggagcctattaaaatttgcagaatgtttggtaagctctctagggttgtggaaagcacactccctagaagctattttctgtcttttaccactgatgaatagtgtgactttgaataaatatgtaacattttgtaaaagggacattattaacttgccagaagacatgcactagactaagtggaagtccttctttggctatgaaatttcagtagtctctgactttctttaatgacgtgacatgactgacttcccatttctcctcttaccattattttcaactcaaatccagcttttatgcctctatgtcctccaggtaagagagactgaaaatcagtaggtcttgacaactgattaaatgtgaacattgagagaaagaccaaagatgtctttaggatagatgtctttagccaggcgtggtggcgcacggggatgcatgttttcaaacctgcctgattctctgaacctcctgggacatttgttaaatatgcaaattcacaggttccactctagacccacgaatcaatctccagaggtgggcctggttgggcatttttatcaagtttctaagtgattcttgtgatcaggcaaaagtgggaaattgtgctataggaaattgaatctagttggtgctcgataaatgaacatatatatatatattctactaactcatttaatttttttcctggagttttatagattagctaagatccacaccccagaattagaagaatgaacactatttgcaagagaaaaaactgaacatttattatcgtgttctacttagaggggctttcagtctctgatacttagtgatgcttatgtgacacttaaatatgttgatagcaaatggtgataggtttcttttgaatgtatttcataatctgtccagtagagaattagactgtggagctttgtgagcatatttttagggtctatgccgtggactatgttttagatgagatggtgaaattagatattttggcatttagccattgagtttcttaatagacagttctatggtctggtttatattaagtttcatcaatagcaagcttactgtatttgtaatgattttgcttataattttaattttgaatatgtgttctttgatactgaaggttacatttggcaaaggaacattgcctggtactgaatcatatatagttatattgctttgtgtagaatacatatgaatgtcttttaccttgtagcattgctgtcatagggctatgtaattacatttaaaaactttttaaaaatttgctcacactatagtcactgttggatgaatgtcatgatagtgtattaaaattcatttaggtttcactttgacttccacatctttttttcatgacatgacatgagttacgtcttattaaaaatatatatagttttctgttatgaaagttatctataaaataggaaacttagaaattacagaaaaatatattgaagaaagtcatccttgaagaaatgtcaaccttcagagtctacctatttttcagccttttatttcagcctgtttttttgagatggagttttgctcttgttgcccaggctagatagagtgcagtggcgtgatcttggcccaccgcaacctccacttcctgggttcaagcaattctcctgcctcagcctcccgagtagctgggcttacaggaatgcgccaccatgcctggctaatttttgtgtttttagtagagatgggggtttctccatgtttgtcaggctggtctcgaactcccgacctcaggcgatccgcccacctcggcctcccaaagtgttgggattacaggtgtgagccaccgcatcggcgttttttttttgagatggagtttcgttcttgttgcccaggctggattgcaatggcagcgatcttggctcactgcgacctctgcctcccaggtttaagtaattctcttgcctcagcttcctgagtagctaagattacaggcatgtgccaccatgtccggctaatttttgtatttttagtagagacagggtctcaccatgttggccaggctggtcttgaactcctaacttcaggtgatccatcagcctcggcctcccaaagtgctgggattacatgcatgagccactgtgcccggcctatttcagccttttattatgtctaattattctggtttataaacaatgacctaattagtaaaacttgagcctgtacatagtgctcattttgctttacattarcttatgtgaagctgggacagaataagacattgagatattttcagatattattctggtgcaataattcaatcatgtagtctagatagccattttcatgggtactttcagtgcccatgacatataataagggtatatcttgtgccaggcacattgccttggatttagactattaacagtctcttggctctcaggttttatasttaccattctagactgagcgcatccataggcaactaaaactgtatggtactgtaaggagactagtcagtcagtctccttaaatctattctcacctcagtccattctgaatagagttaccagagtgaaattctcttagtagtgttcttatgttattttcataaagcgtacagtggcctagatggctttagacttcaggattctttaccatctagccccttttactctaccaacttattttgttacttgttgacataawctgtagccaggaaagcctgcatacagtttgttatccctctgtctttgctcmtgcgttttctgcatctggaatcatcttcctctcttctctctgctggttcatgtccctattttctttcaaaactctctttgaaatttacatttttcaggaagcctttctctttggcttgctggacatctgaccggcatgttatcttttcatatttgttcaaaatgtcattttcaacatttactcaactaattaatatcaaggacttgccatcaattctctttttccctgcattgggttagaaacctaatttaacttcaacactgacatattggtattttagagtgggaaattgagactttgataggaaggtgtttgttgctgctgcaggtaatgtgcctgaacccaactgacattacacccagaattatagagggccaagtatagtactgtgtaaaaatgacagaataacctcttaaaaaagaaaaaataaaaaagaatagcaaatagaaacaccattctctcaaactttgatttgtagaagcagatgttttgtaaaaaaaaatttttttccccttagactcattgatatttatcttcttctatgggatatagcccattactatttgttttgctattaagattgtttgggaaacccttctaaagaattagacaacagcgttactgggagctgaggtaaggagaactaacagctcaccgaggctggtggaggaggatgggcagggctgagcggctgagcactggcacaggtgtccgtcctaatgtgccaggcagactcttgatgaagccagctttttctgcatgtgcagaggttatttctgcttttagaatctgagcactagattataaaataattcagatcttgtttgttttctaaataatctagtgtgaaaatcctgagaatttgtgtcttcctgtgaggcttaggtggaagtctgacttagtatctggaacatgaggtatttaagggctaatataaatgtaaaatattgaattgatgatctttacttagtataaccaaccatgtgtgaaacaccaaactggaaaaattttacctttctcctccaaaataaaacttttttttagagtaacaaatcaaagattttaaaggctgatagatgataaaatacctgaattcacgggtgactgtctcaaaccagtctggaaaatattacttgttataatagcagtacatcaagggacttggcagttcctcctcaaaaaatagaaaatgaatgtatgataagagcttaacatcagacaggaagaggcttggttatactcatgaagagagaaattaagatgaatatgaggatgaagaaacagcaaagcctctaaggacaaaagaagggtccagaaactacagttagatgatgtgatggagccgaattatagaaaaagacagtggaaaggacaaagtggaaaaaataaccaagggatgaggacagagaatgttccgactcccgtctggggctactccgctagcctttagtgtccttgctttcctgtggtgctgtgattcttcagcctaggtcttggcctgtcactttgtggtactttgctcctgatacagcttcctgatatcattaacttccagggccccagyagggggaagtgtgcggacagatgcaatgacttaaattagcacagactaggatcctgcagtgaatgaacagcgatgctgttgctgcatctttctctgctacctggccgccctttcttttttccttacctggtagagtaacaaaatccccaaaggggtctcctgcatactgtgggattggaagagaagtggaaatagttgctcagagcaagccttgaaaatcccctgtcacaaaggaattacctggaacagttaccccagagttacccgttttagtttgtgtgttgtagggtataaactctcacaccataatatgactgcttaatgataagtcagccctgtccctgttaggagactttgctgagaactgaggcacacttacagcaatatctttttgttctaagtgaaataatctttagatattagtgatcactgaattcctcattatacaagtaggaaaaacacaggcttggggaatgtcaagtgacactgtatacgccattttagcattttagtagatgagttgaaattaggaacaaggtctcctgagtcctagtccacagtatcttttaaaaacaataacctcacttgtctctaaattcctagggttagttttgccctcatggagcaaagaaactgagcaggcytaggttgtaggtgactggcacaaagagactgagagaaggaagcctgtggtggagtgttctgtgattttagagtttttgtagctcctgcttttgctgttgaagctgagcaaggggcctgcagctacccctgggcctggctggtgtcccatttttgaggccccagagttatttttagccgcagggccttggaagcaggtgtggtccgggcttgaaggccacgcctggaatgtgttcaaaccttgttgtgcatgtctgcttaggagctgagaatagtgacgaagccattgcatatactttgttagaggaatttgcacttttccaagtgagagcaatgaaagtcatcttgcgttgcatttgtgacactttaaacaggtttattttggaaactttataaattgaatgatcttttacaagtattagtgaatataattaaaaaatacattagctataaatcctttgtataccaaataaacttttgtattataagagtcataccctaactgacctatttttaaagtctagcttcatagtcataaacatgtgatttaaaatttcatttttctcacttcccccacccctcaaacattattgctgtttaaaataattctttataaatccatttcagcttttaccttgagggtaaacattaatttccatacattacatttgttcatcttctttgtttttttttttttttgagacagagtttcgctctcgtcccccaggctggagtgcaatggagcgatcccggctcactgcaacctccgcctcccaggttcaagcgattctgctgcctcagcctcccgaatagctgggattacaggcatgcaccaccacgcccagctaagttttgtatttttagtagagatggggtttcaccatgttggccaagtagttctcgaattcttgacctcaggtgatctgcccgccttggcctcccaaagtgctaggataacaggcatgagccactgtgcccagttctcatcttcttaacctttgcccacccaaacttttataatggtcctgagaagaaggagtacagtaggacctggtaatagttcctgggtctgaatgtatgtcatgaccttatattaatatttttcataatttccaaggttatggaaaagagtatgacaattacgtttaattacctaagtaaaactattactatgttttatacatatccatcgtatgtgtttgtatgcctgtgggtgtttgaggttctattttacctagctgttctgagacttgactttattctcaatatatcatgaccatccttggctgtcaataagtatatttttacaccatcgtttttaaatgttgcataccatgttgcaggatttatcataatttataagttacttaagccagtctgtccctttcttatacatgtaggccttttccagtattttttcatgtgtattttaactgaaagataaagcactttcttgtaagtcactttgttttgttttttttttgagacggagtctcgctctgtcgcccaggccggactgcggactgcagtggcgcaatctcggctcactgcaagctccgcttcccgggttcacgccattctcctgcctcagcctcccgagtagctgggaccacaggcgcccgccaccgcgcccggctaattttctgtatttttagtagagacggggtttcaccttgttagccaggatggtctcgatctcctgacctcatgatccacccgcctcggcctcccaaagtgctgggattacaggcgtgagccaccgcgcccggccttgttttaagatgagtctcacgctgtcatccaggttggagtgcagtggtgtgatctcggctcactgcagtgtccacctcccaagttcaagcgattctcctgcctcagcctcccgagtagccgggattacaggcccatgccaccacatctggtgaatttttgtatttttagtagagacggggtttcgccctgttggccagactggtcttgaactcctgacctcaagtgatccacccacctcggcctcccaaaagtagtttaaaggagattcttgaaactacctccttgttgtgtagacttttttcatgcatatgtcttgcttaacatgtatttgatattttactacgttccatattgtaaaactaagattctcttagtagatacaacacacttttggcattggaaaaattctgggaaaaagtgctgggattacaggcatgagtcaccatgcccagccataagtcactttgaatttattctgtgagccattttgaaattatcttcaggagaatgtagttcagcattctaattttatttattttagtactaagagatttaaaatagattaaattatggaatattactattgtgagcttgagcttgagtgcaggtgggtgagaagtttggtgtcggtgttgcattccattgcttgctcctagagccttccagtcctgtttggaaaaattaaattataacccctctccccttagactgtgttccaaattgttcagatgtttactctggtcttaatacctttagtcaattagttctttgtcaacaaagtatactatatctttcatgtattggaattttgttgttctggggctggtgtggactaaaggagggggtgcatatattaatagataaagattataaacttattttagtgttatcaaccccttcaatatagtaatctaacttgtaaaggccttgtgttaagtatttgatccttctgacaaggagagaaccttgaaagcatttaaaaaatttttaatgtaaagatcctttaaactacctccttgtatagacttttttcacacatatatcttgcttaatgtgtctttgatattttactacattccatgttgtaaaactaagattctcttagtagatacaacacacttgtggggttggaaaaaatgtataatattaacattaatagtaatctttcttgttacaggatttcttttcatttctttgccaagaaatgcactgtataggaaccacagtttctctctttgtagttttaaggaagaaattgtactaaattttcttatatatatgttttttcacactgaagctaaaagttcaattgcctgcctcaaargcatggacaacaaaagcaaaaatagacaaatgggattatgtcaagctaaaaagcttctgcactgcaagggaaacagtcaacagagtgaagagacaacctacagaatgggagaaaatatttgtaaactatacatctgataaatagttaatacctcaaaaacatcaggaactccaacaactcaatggcaagaaagcaagtaacttggttgaaaaatgggtgaaagacctgacatttttcaaagaaaacatgcaaatggccaacaggtctatgaaaaaatgctcagcatcactcatcatcagagaaatgcaaattaaaaccacagtaagatagtatcccactcctggtagtatggctgttttcaaaagacagaagatcagtgttggtaaggatgtggagaaaggaaaacccttatacactgttagtggaaatatgaactatttatagccattatggaaaacactatggaggttcctcaaaaaaaattaaaaatagaaccaccatataatccagcaatcccaytactgagtaaagaaaatgagatgtttgcatacccatgtttattgcagtgctatttacaatagccaagataaggaatcaacctaagcgtctatcaaaatatgaatgaataaagaaaacgtggtatatatgtacacaatgaaattctattcagccttaaaaaataaggaaatcctgtcattttctacaacatggatgaacctggaggacattgtgttaagtgaaataaacaagacacaggaagacaaatactgtgtaatttcactcatatatgggagctgaaaaagttgatctcatggaagtagagagtagaatggttaccaaaggctgggatgtttaatggggaggggaagcctggggagatgttggtgaaagtaaataattatttaggagaaatacgttcaaggatctattgtacagcatggtgaccacagttaacgaggatatatagtattcctgaaaaattcaaggagtggatgttaagtgttctcatcacaacaatgatggctatgtgtggtaatgcacttgttagtagaattaaccattccacagtgtatatctacttcagaatatcgtgttgtacatgataaatacatacagttttatccattaatttaaaaagtttggccgggcacagtggctcacgcctgtaatcccagcacttttggaggccaatgtatgagaattgtttgagcccaggagtttgagaccagactaagcaacacagtgagaccccgtctctacaagaaataaaaattagccaggtgtggtggcacatgcctgtggtcccagttacttgggagactgaagtgggaggatcacttgagcccaggagttgaaggttgyagtaaactgagatcatagcactgcattccagccttgggtgacagagcaagaccctgtctcaaaaaacaacaaaaacaaaagttcagtttcctggaaatgcatcatttccaatagatataaccatagttctgaacaaagcatgaacacctgccacatcttttattggtatttgcccaattcagcattatcttggctagtatattcattggccccagaaagctacaatcttccaggtatccacatagctcagtctcttaccactctcctctctcatgttctcaaggtaaggccttctgtgactactctgtttacaatttaacagccacccccgcacaccctttgctcttgctctattttttctccctagttcttatcggcgtctatcataggaaatgttttgtttttgttgttgatcgtgtcccccatcactaaattagaagctccagaaaggcagtaatttttgccttgttaatttataaccaggcagtacattaataacttataaattataatgaatacttttttcatttattgctacattttcacagtgcctggcacatattaggtgccaaataagtacttgttagttgactgaattagttacagtaggcctgatgaattatagtgatttggcagatgttcaagaaaaccaggatgcacgaattaatccccatctgacctctgtttggcttgttctaaatctttcttctcctgcctccagcctacctttactgaaaatacccttctaaaacattttctcctcaattctcagattaagccaatccctggccgtatttcctcttgcccagtaacttcatccagggatccttccatttctaccctcccaagaccacctccatacaccggcccctctcccagtaggtagggtcctgagttttcaggcagcgtgtctggaggaagcattaagygtagaggggtaggtgaaggagcctgtgggccaggaggagtgtgtctaggatacatacatgggtggcagagggaaagaggaaggttgggagggggaaggaggaggagagctcaggtgggtcagggaaggggaagcgggtgaaacaggtgatcataaacaggaagcagtactaagaaaaagacaagagctctgattgagccaataccaggaggggagtgctccttgccctgaacagaaactttggtgaaggcttctcacagatttggcctctgcctgggctggcctgtgcctaaaagcgcaggcattataggtagtctttgaaggctgactgctattccagcctttatctgtgggtccttgagatgtatgtaaacaacctgaacctctgattggaggggcggctttcaacagtgtggtatgtcagtgcgaggcaactgggttctacggtgcggataactgctgtctccaggtctagtatcatctaaatagttttgcttcaagcagtctcattattgccatcacttgtcagaatatgtgtcctcaatttttgggtaaggaaatatgatcagacattaataggcagctaaaaagcacattaagtttgtagttttactttgttttatacttttataaataaaagtacatattataaagtatatattatacttttaagttctggggtacatgtgcagaacatgcaggtttgtttcataggtatacacatgccatggtggtttgccgcaccaagttcttagctttcttgattttggtgagggtggttttttgtgtttgtttttatttttttaattgaatatatttgccaaataccagagctcagaatttctatcaagtttatcttaacccacagcttatgagataaagttgctttaatctgtgtagcattgaggcagtcaaagtctaaggagttcttgtttgcttgcagatatgatagtctccttttttcccttttgattggtttttttcctgttattgaaagcctgtgtttagggctctattgaaaggcatttcggtatatcttgttgcctgtttcttcagttttrttggagggaaaaaatttaagtcaggcttgtagtttaataaaagtaaacttctcacctgattatatcctttccataaactgagaatttgaacttgagctctagcccaaccaaataaaactaaatccctctcctcactcaacaggcctgttaagcaccccatagctatgggatccttttcctttccctgataatttctctttgtaaaagaaaatgtttaaaatggagttgtgcctctctgagtgggaccccccgcttcctcctggagccccatcccctgctgtgggccttgatgcaggccttgggagtgggtgttttagggcagcagtagcagtagcagatgaaactattgctgccagcagaaaataacccatgggtagaaagaaaaaaattgtgtgtgtgagcgattatcactttttttctgagtgggatatagtcagtgtcagtatgactgacctagaacccaggatcatgtttgggaagttgaagagaaaaatcatctgggaagcagaagaagatccttaatataatcacgtaaaaataatcttaaaaaaaggattctctggctaggcacaaattttgaagtgtacaagtaataaaaatcgaaacaaaacattttccttttaagtaattaatggcaaatactggttttatacagactttatgttgttctcttagttgaaacaggccctacctgttcactttaacataaaaatagacttacagttcttaaacataacttattcagtagcatacttcattgatacaccgtatttgtgcagagttggatatagagtgaatttcaagaaataaaactccagtgatttctgttatagtcataaatacatttccataagtaaccaaatggaatctaaataaaaataaattacatataaaaacacagacaaaattgtatattaaagggggaaagttgttatacaacttgtgttaaatattataaaatataaaacataaatcatttgctgaaaggtaaaaatataccagaaatggtatytctttaggagatttgctgattttcttccatgatctgtagtcattttgttatactaagatgttgactcagtttatctttattcctagatagtcttttaaaacctttattttgaacttgggatactttgcagttttttgtgtagtagccctgattaaggttaccagtcttcagtttgataaatactgccttgctgactttaggttatcctttaaaagataatttccataacttcatgaatgttcaccatcacattttaactttcttttaagccagagtagttatagagggtactctctaactagtatgtcataaaacaggccagctgtggtgacccccagcatttaatttgctaaccttttgagcacactattatgagttacttgtcagcttcttaggtactctagtatgtaattctaggggggaaaattgtgtgtgtgtgtgtgtgtgtgtgtgtgtgtatacatatatttttaattttttgtagagatagggtctcactgtgttgctcaggctggtcttgaactcttggactcaagtgatcctcctgccttggccttccaaagtgcttggattacagtcatgagctactatgcccagctggagttatcttttaagtttaagaatttcgccggatgcagtggctcacacctgtaatcccagcactttgggaggccaaggcaggtggattacctgaggtcgggagttcgagaccagcctgacatggagaaaccccatctctactagaaatacaaaattagccgggtgtggtggcrcatgcctgtaatcccagctactggagaggctgaggcaggagaatcgcttgaacctgggaggtggaggttgcggtgagccgagatgcgccattgcactccagcctgggcaataagagtgaaactctgtctcaaaaaaaaaaaagaatttctacatgttttatttagatttccagacatgcatatatgcaaggcccatggaaatatagattgattcattttctaattaaatgttgaaaaaaatgagattcaagtactgtaagtgaaagaaaaagcaagatgcaagacagtgtctatactttgtaaccatttgaacaaagagaaggaaaagtgtgtatatttgtgcttcattctatattaatttaaaaaaatctttggaataaattagatgagactactaaaagttgttaccagttagagggcagggttgggacccaggcagatggaggataatggtagaagaaggattatgaatatatttagtttttttttatttaaatgtatttgctgaagtttcaatatcgtggcaattttaaacacctttattgatgtataagtgacacaataaactgtacacgttcatactatgtatacatttttagactttttttgaaccatatgaatatattacctatttaaaaatytaaagaaagtatttcaactttagcagctggctaaataaatagataaatagcaaagctggtctgctctggattttgttctatggacttgagcctttgyggttcattgtaaaaatttttattccccttgacttatagaaattctgggtaagattagcttggtgatgttgcaagcaaaatattctcttgtcatctttcaaatcttacctaatgcaaaggattttgaaaacaaaacagtaactacagagaaatttttaaaattagactcatagccagtgatggagatttaaccaaaattctctaactgtaaatgaaagagattaaggccattgttactttaccctccatgatcccttggcagggctctgcctctcacctcacccatttagcactacagagaattagaccttgggcatgaagtcctaccaggaggactccagctggcctcagtacagcactgaaagaatggaacttcaccctcacttcacttttacccctatgcttcacttacatcctcagcttagagtcactttgaccagagcctttcttggtcagggaaagggtctttttatatctgtaactaagctctgattctctgggcaagaatgacattctctgctctgtagaactgtttgttgtaacctgtctttgggtttatgagaaytggctgaggggaagcaaagatgagaactttctaattcaacttttgcatgtttgctgacttctccctccttttgtcccttgatctgctaacccagataactgctttgtcccatccggattttatctctttgagaggagccaatcagactcagagacccagtgccattgttggaatcaacttgctcttgttctcggatttccactttctgtgccacctgggtaccctcatggacaattggcatcattctttcccagtccagttccattatgggaacaagtacttagggaaaacagggcaacccagtagtagaarccctggtttgggaatcagacaatctgaatacaggaccttacattgccgtgaactctgtcactgagcaggcagaayctgattgagtggtatggctttggtaggcgctttgcagaagtttattagtggattgactaggacaaattctctcytatagttccttcagttgaaaatagagatgacttttgtacttcattaccataaagctatgcyaaaaataatacattaatgaaagttgtttcttggaaaataagaratggaaatataatgtattaaatggagctggtttgtaaaatatggtgtggttgagacagtatctcaggtgycttctawctccctgtgtgtcagcctctgtgagaaagggcacagtttggttgcagctgtactataggaggatggaattacatctgtttttatctgtgagtgatgtctttcagatgccagatgcaagccagctttgtttgccattggcatctgtagggtatttttcctcctgtctatgatgcatagttgcttttttatttaccagctttcaataaattagataattttgttctcagaccaaatttgaagagatgaggccactataatgtctccattttgtaggtgaagaaactgtggtttagagaggttatgtgatttgtccaaggttgcataagtaaatggcaaagctacatctctttatatcatgctccaccttctgtctccatgctttagcttctaatttgtaagtacaaaattaggaaacatgatctaaaggtttttaaaggctctgacatcctgacctgaaatcagctaatcaaatatttatttagaatcttaaactgtttttggaacaaggaagaatttacctactataataatatattgagtatgttatgtccaaagtactgtagaagtaagaaatataataaacttttgcaatcaaatatttaccctctaggctgggtgcggtggctcatacctgtagtcccagcactttgggaggctgagacaggtggattgcttgagcccaggagtttgagaccagcctgggcaacatggcgaaaccctgtctctacaaaaagtacaaaaattagctgggtgtggtggtgcgcgcctgtagtcccagcaacttgggaggctgaggcaggagaatcacttgagcctgagaggcaggggttgcagtgagctgagattgtgctactgcactgcagcctgggtgacagagcaagaccctgtctcaaaaaaaaaaaaaatttaccctctagaagttcagtgccagaagtagacatgtagttttatgtagtagaggatttcatataagcagagatggaccaggggagataggaatccgagagtattgaaggtcaaggtgaagtccaagcaataagcgcaaaacttcaactagtgttaattagaaagtgattgattaaaggagtttggcaagaaagggaagcactgggttcagctttaagggctctctatgtctgggttgccaacttagagttccaggttaaggggtgagatttttttaagactaggagttagtgattctctgaagaatgaagcaggaaaaagtgaaggataagcttacagggccttaagcaacttggtggtagggagatggcctccggaaggagacatgacagggccatggctgtgagcttcagcacttcacaggcctagctcagcagctgctgtgacaaacatatcagttgtttttgtccttcctcttccttaaaagatagctgaaatttatagaaactccagttttcctgcatcttctctcctccgtgagggcaattttaaaaggctgctgtttgcgccctggtactcgcgtgagctcacatgtgcacacacatacacacatatacacctacccattcatcgcaggaattctcaagccatttcagaaaatatttttttttttgtcctggtaacacaggattgctaactttgtcctcagctgccattctttgtgggatttcaataaataagcaaataaaatataggaaaactatttggaataataatacttcaagcagctttttgtagcccttttaattcaatactacaggtcatttagttctgagccctaggtgattataattcatgatatgtcttgttttgttttctttgagtttttacattttgaggtaaaatggaattatcactagcacatttttctgaagccataccaatttgtcctttttatttgtttgttcaaatgaagcagtgcatcaagtatggaattagattaatggagtaaatattatgaatcatacactstctctaatctgacactctttcttctttttttgacctcacgttttgttttctgtctttctctctccgcgtaggctttcagtccagtgtaaagctgttggagcgcgggagcaaaggtaaagaatgatgtaatgcgctggctgctccaaagcatcttttgttgtggaatggttattccagtcatctctttatgaatcaaatgtgaggggctgctttgtggacggagtcctttgcaagagcacatcaacgggaaagagaaagagacattcacttggagggctcttgctgaaaatgggtttaactctccttttgccagtcaccaccagcctgacctcatacacttttagtacaatggagtggctgagcctttgagcacaccaccattacatcatcgtggcaaattaaagaaggaggtgggaaaagaggacttattgttgtcatggcccatgagatgattggaactcaaattgttactgagaggttggtggctctgctggaaagtggaayggaaaaagtgctgctaattgatagccggccatttgtggaatacaatacatcccacattttggaagccattaatatcaactgctccaagcttatgaagcgaaggttgcaacaggacaaagtgttaattacagagctcatccagcattcagcgaaacataaggtaaacgctttcctttttgccttttcaaaataaatggacacactgaatgaggaataattttaattgaagcctcctctttaagtagagaaagtaatttgaggaagttttggttgctttttaaattttggtgccttgtggtacctcaaaataatttattgtccatattgycacatttaataatatttctaaactatgaaggattaacttgctttagtttggacaagtgctatattttcttgtggcttgctaaaattattttattaaacactattctatattatctgcaaatttactgaaaggaaagtcattcttttcaagttctttggaaagaaagtaggaactaattattaggggtgctttttatgtgtcataacacatgtggtaacattggtcaagacttaatgatatcttcaagggaagttattcctgggatactaaaatgttgtctgtgtggtgaggaagttggtttttttcttcacaaatacaaatgagctcatgttttaatttaaataaacaactgatttctttgttaaggtgtaaaagtcattttaaaaaaagtttgtttaggtccagggttatgtttattttgcatattgtttggtttattatgaactttaccattttatagtataaaggatttaaaaccagggaatcgtgagatcacctacacagaaatagcatcattttggtttttaagagttttgtatgtgtctgtctcgtaaattgactacatctcatttttattcaaattattaattgaaaacaggaagcaattattcgccccagcactggtaaatgtgagatcttaagcagtagtttgagattacttttctcaccttcttcctaacaagcctcatgtttgcatttcaggttgacattgattgcagtcagaaggttgtagtttacgatcaaagctcccaagatgttgcctctctctcttcagactgttttctcactgtacttctgggtaaactggagaagagcttcaactctgttcacctgcttgcaggtaaggctcgtgatggaattaaaaggactcagaatcttgctgagctgtatgagtaagcatatttcactgtgaactcagtacaatagatcatcccaactttgctgtgtaaaatgatttatttatagcttttgattgatgtcacygttctatttaacttgaatactatatcattcttccacataggtcagtgtatttttgacttggctcaagtgcctctttgcttgctattaactggtagtgccacatagatttgcacacccatatggatagctcaaagccagctgcttctgtctgcctttttccattcacctgtgatgtaagaacaccaaatgatgaacatctcagctcctgctagttcccacccctgtggcaagaaccagaccaatattacagtgtcaaactcttacttaacatttatagttggagcggactccagagataagccttatggtcacctttctgggcattataaacaatgaaatagggggagaatgtgtgcagaatgtttcttctggtaattaggggaattgttttaaaagttacttgtatatttttatttgttttataattaaaaaaaagtctcaacgtagaaatgctaagcaaccagatgatcttataaagtgtgtgggaaggaccaaatattctatatctctcctggaggacggcattgtaggagttaatcccatcaaattccaaagaaggctattcatcctttgcttctcgttttgcaaatgaaaatcctttcccttgccctgtgggctcatagagctgggaatatagtttgacaacacacagtaaccttaacataaagctgctgtgttgggcggattcagcttcagtgataggcaagagtgcttttaaacatttggtctaagaaaaacaaaacattaagattaattagttgttggtgtgttaataattttaaactctgggcaggtttagataagatttccatgtctccagttctctctcacaagcttttcctcagttctctaagaacaaggatagttcatctttttcagattgtctatctgtacacctttcatttatgctgtgattccgtctgatctttcaattagtgttcttaagtgaagccagcttgtcttagaatgtagttttcagaagtctgtaactgagaattataatattagattctgtctctgttgatagacacattcttttactgggagtatgagtgtgttaaatgtaacagctattattagcatttcactaaactaattgggtgagtttaggaactcatttcatgtttcaggtggccactgtgtgagggactttaccttggaatcctgttaatgggatcagggtttttcttttctttttttttttttgagacagaattttgccctgtcgcccaggctagagtgcggtggtgtgaccttggcttgctgcaacctctgcttcccaggttcaagcrattctcctgcctcagcctcccaagtagctgggattctgagcacctgccaccacgcctggctaatttttgtattttagtagagaccgggtttcaccatgttggccagtctggtctcgaactttgacctcaggtgatctgcctgcctcggcctcccaaagtgctgggattacaggcatgagccaccacacccagccagagtctttcttaaagaagcaatatgccaagatgtgcttcgtgacagagtggttatcccaccatgttcttgtttgagttacttttaccctatggggagaccttactcaacatctcggtcaagtagacagccccccagaggagtgagctcacattgagtttctagcacaggtgctttagctacttgtaccctttactcctttaccaaagagcattcctttgttacctgggaaggttcttaatctatcctgtgtagccttgggaggggcattcactgggcaataaggaagaaacaggactgcctgattagctatgtcaactctagggacacgtggtgtgacacactgagtcagaacaccctgacatccctgtttcaaacaggaagtgtttcttaggcctaacggcaagtccatggaggcagcaccaggagccacattaaatgtattagtagcaccatatcttcatccatacctccagaatcctgtgtttctattagcttaggaggtgacttcagagtctgaattgcttgtttgggaatttctgagcagctggatttcttgtgacacctaagagagggttctagatgattagaagccttcccaatcatccaaaagcaattggggattctcttggttagtgaattttttcgtcagggtaggtagataattggggtaagtggataacagtattggagaaggtttggccatcaattcttgggaaactgttttattgcaaaggtccagctgctcagaggacaagccagggatgtgggacagaaggacatattgacaaaagtttcttaaatattttggttggggagaaataactgaaaagcaccctagtttctcacaggggctactgtaagttacaaggtcactggagacaattttcactacaaactgcccctgtgactttcaacagttggagattgttgtcagtctygtttggacatggtaatagaaagacaaagtggtttcttggaataatttttccatcggtttagaactttcagccaccttgagaaaagaaagcatcagatatgtgagatggtttttatggtcattagctatggcagtgaggaattgtggccccacatctactcacactctcagggctaccttacccacggaagaatgactgtgaataaggagaacaagaggactcccaagaaattgatagcagtatcttaacgagctcttttccttcaaacaagaggagactgacacttacctggaggacctacttacatggtcatgaaaaatgaaggattactgaaggagaaggaagtgggatttggggaacctctacaggaatgcagtgggcttagttttttaatatggaccaggtcttgtttacctttgtgttcccgcaaggcctagcccttcttaagttttcagtaaatattttgatattagcttacctgaaggttttatattgtttatatttcctatgatttatcagtctagaatataagcatattaagcagtgatgaagtctgaaagtagagaaaacttcagattgtttcaaaataggtgatttggaaggtgtatttattctgataaagcaaatatatagctgcgatgggaaaatatctaatatgaaactttcttcatccatataagcagatgtgaagatggtattaaaatctgatgaaaatgctgctgtagtgaaacagtgctaattttctgtggtccttaaatactgatatttgataaagagctaacaaccctagaaatctagctccactcataggaatacgcaagtccttgaattcatgttaattgagaacagtcagaataattattgtatttttaaaaatgtaaatgtaaattgattgctctagtcattagtaaataacctactaaccaagtcaaactaagccatagcattgtttcactcccagtggattaaagggtttaatatcagtagcagctgggtgtggtggtgcacccctctatttccagctactcgggaagctgatgggggaggattgcttgagcccaggagttcgaggttacagtgagctgtgattgcaacactgcactacagtctgggtgacagagagcctgtctctaaaaaaacaaaacacaaaattatcagtagcaatctcatcttaaaaaaaaaacaaatttggatgctttagaaagttctccattactgcccggccatggtgacttacacctgtaatcccagaactttgggaggccgaggtgggtggatcacctgaggtcaggagttcgagaccagcctggccaacatggcaaaaccccatctctactaaaaatataaaaattagccgggcatggtggcatctgcctgtagtctcagctactcaggaggctgaggcaggagaattgcttgaacccgggaggcagaggttgcagtgagccaagatcgcatcactgcaccctggtgtaggcaacagagtgagactctgtctcaaaaagaaaaaaaaagttctctattaccattaatgggtaggtaatggcaaaccattgtttcctttttttttcaattttgaagtcaggttattgaataagtacaatttaaagacctgcatatcttccccacaaccccccttgaaatttagacttaagaattcatattggccaggtgcggtggctcacacctgtaatcccagcactttgggaggccgaggcgggcggatcacctgaggttgggagttcgtaaccagcctgaccaatgtggagaaaccccgtctctactaaaaaatacaaaattaaccaggtgtggtggcgcatgcctgtaatcctagctgctcaggaagctgaggcaggagaattgcttgaatccaggaggtagaggttgcggtgagccaagatcgcaccattgcacttcagcctgggcaacaagaatgaaactccatctcaaaaaaaaaaaaaagcatattaatagagtaaaaaaatgggtgtaacataaatgtatcataataatgattttataatctaggatgggcttttggaagggaaaaatgctgtaattcctatttggctaaaaaaattaactgggtttctcataatttgaaaagaatctaattctattgagaatatttcaggaaagcttatataattaagtatattaaataattagaattataggaaaatattggcagaataaactatatattttttctttttaataaagtcctttgtgtctgataaactatattttgaacttgtaatgagaagtcataaacgtagagaagaccaacttcctgggagcaataggtaatctgggtatagaaattgtacaaggtgccaggcatggtggcttatgcctgtattcccaacacttcaggaggctgaggcaggaggatcacttgagctcaggagtttgagacctgcctggccaacagagagagacctcgtctgtactagaaatttaaaaaattagccgggtgcggtggtatcatacctatagtcccagctacttggaaggctcacttgatcccaggagttttgaggttgcagcgagccgtgattgtgccactgaactccagcctgggcgacagagcaagaccctgtctccaaaagaagaaaaaagaaattacacaaggtagagctagagagaggtagtgccatgctctatgccatgtgccgggcctgttcttgttttttctcctgcagatgtaagatttaagattgaggggaaggggagagatggggattggagaatccaaaaaaggaaccattttcaagggttggtaatatctttcgtgttactgctaaactttagatattgactaaagaaaaaggatcagaaaagagcaggaggaagaaaaactaggtcctagtggtaaaggtattacctgagcacaggctctgtatctgcatctgcagaaggtttcagggtcttctgatcaactcagtgccatgcccacacccattccctaggtgatctaacatctgcattgaggaaatccctttaagctggaaagaacaatggactaggggtcaaagctgtagcctgtgttttctgtgtgtgtctctgctccttatggcaactttggataagtcatttaacctgaattatcttgtattttttcagctcctaaaaagagataataacgcttgccttattatgaggattgtattagacaatggatgtgaaatttctgtatcaatagtctaaaagactatccttcaaaaaaaaataagaaacttatcagtatgagtttgaaaacccaaaaaatcagttgccaacattgatttattgagcaacttttttggtgttttcaacaacctgcagaaaactagttctctgaaaaataaacttgtttcttggcttttacttattcactatgtatcagtttattctacttgtctatttctaagagcgccagattagaagtaaatatatgtgaaaaaaaggaaaactattgaatttgggcttttattttatgctgacatatggaaaagagagtaaatgggttaatttagtagaaataaagatcaacctgcatgtgaaaaatgctgttctactatgtccttctctttccccagtacagcctgagtaaaagcaaaagggctctgccaggcttattaattccacagcactcccttctgtcctgtgatgcagcacagaataaccctacagcgattgcgggagaaaaccataaatgaaccacagacttcagccctttcatttacaaatgaggaaaataacagagctgctgagtgactctcccaagctcttgctgcccaaggcccacatccacaagtaattccagagtcttctggaattttgtcaggaggctagattgggaatcaagggtgcccatttcagatcaggcttattctgaaaggctctttttgtaatagctctttctcagtctttttgagaatttcagtcatattcttcatactttatagaatatagcaatctataaaaatacactgtatataaattgttttaaagcattaaactatgttagccagaagagatcatcaagtaaaagtctactctgttttatgctggtgtatagctgtgaataaggatagaagataccatttattaagaacacagcaaaggtcttcgattaatgtttgctatggttaaaggccaaatactcatttcttcgttttgagttgaacttaactattgtagttagacctacgagtgaacaaaaatgtattagactctacacattttcaatttaataaggatctagattctgatgacagttctgtgtaataaatgtatacttttggtttaatagaattgattactgtccttcctcatggaggtatgatagaacctgatcttcctggttatggattttgctctttgtgctattaccataaattctgttatctagtttggtgtttcttctcctttgtctggagaagggaaatcttcagtaattccatttcgaatcctgtagaacttggtaaatgagattgaaattaatggatttcagtaaaagtatgccaattattaaggaactggctgctcttgggtctaaaaaactacagtgactgagagtcactgaaaacagactaaaaatagatgctgtatgcacacatacacacacaatggaatattcagccttaaaaaagaaggaaatcctaccattttgcaacaatatgggtgaacctggaggacattatgctaattgaaataagccagacacagaaagacaaatactgcatggtatcacatgtggatctaaaagagtcaaactcatraaaacagtagaacggtgkttaccaggggctggagggctggggtaatggggagatgctgcttaaagagtacagactttcagtgatatgatgagtaagttctagagacctattgtacagcatggtgactacggttgacaataaacgtaycatatacttcaaatttgctgaaagagtagatcttaagtgttctcaccacaacaaaaagagcatggctrtgtgaggtaaggtagtcattccaagtgtatatgtatatcacatcatcatgctgtacaccttaaacagataaaatttttgtttgttaatcatacttcaataaagctggggaaaaaggtgctgtttgctcactggctgctgtgtatttctggctctgtttctgagtctcagttggcatgaattcgtctaaattggatcatcttttctccgattgctatctgccagtgtggagagtcagtcatgtctcttcccagctaccagtggctaagacacatgcttgagattgtcttttgaaacaaacagactagagagccaactaaagcttaaagatagtcctttggttccccatcctgatattgtgcacaaaccaaacaaaagcatcccagatgacaacagtgacatcaatcttcccttgccccaggtggggcagctgtgtagtctagagaaacaccaggtccagcatattcttcagccctttcactcactcagcctctcaatatttgatgggtgcctccatggctgtgccttggactgggctctcgggggtgaagatattggaaaagcaaaaggcttgcccctgcctttgagaatgtagtggttaatttggggaaatgcacctaaagtggatgaaagaaagagaagtatatgatcatttgctaaaatgtatgatacagtgataagggatgattcagagtagtctgcagaagtcagggaagacttgattagggcagtggaattttaatcaaaccttgaaagatgaggagtaagatttgggtagggagggttctgcgcattctgagggggaaagaacatgattaaaaatgtcaggaatgaacatagatttggaggggcagtgagcagaccagagtggattttttgtgaaggagagaaatgggaattgagaggacatgagatcaaattatgtaagctctttaaatcagaaggaagaatttgtactttaaggtgatgggtattgtgagctattggagatatggctgcaatacctgtcatctcttagtcaccagatctttcttccaacctcttsggtctgtctggttttctggtcttctgctaccatgaagtcagttgaatgttattcctcccccaggttgctccaggagcctcttaactgatctgttcacatgctctgtcttgccaccttccaatccattgctcacactgcagccaaagttacatttttattttgtgtttttaactaattcagattacatcacttcccagtttaatatgcatcaataatatgcagtgctcttaagataagttacaaaatttttaactgattcacaaggccctgcagtggctggcttctgcctaccttgctaacttcatccagtgccactttaagtcctcagttgttgttttgcctcagctccttaggcctcctccctgttgctctaaacctaagacatcatgcrccctgggccttcacagaggctctstcctctgccctgggctcttctctctgctatttacctagttgttttcctgctagattcaatgtggttgtcaagccttccctagctaccaggcaaagttggtttccatatgcctttggccacttaccataattagttaattattcatctaattatttggttaaagtttatcccataaaactgtcaactccagagaaggctctctgtcttggtcaccactgttccattacctagcgctatgtcaaactcatagtaggtgctattaagtgttttttgaacttatatgtgaaacgcagttatccctttctccctcactgctctatgacgtctcttgtcaaaatgtgtagttggccaaagaggaggactgtacacagagtggaatatacagaagtggtcttaggggagagcctgtggctagatggcttagaaagctttgcgcttcacatggatagcctgagaagtgagctgtatagtgtgattcatggacagtttacaagttagtcagattttattcttgaatmattctccagacactagacttgtattcctttttcctcttgactcatcaagtttcccctatggataatctcatttcattatccattttgatgatgattatagacatgtccagcagccacaccatcctcatctggggtataatcatagttggtgtctcattggtttcctatgggatgtgccctgattccctgagccatggagatatattacgggactctccacaccggtgtggagtcctgcgccatttaggggcatcagaaaaaattttctttcccttttatgtaaagtcctgtggatacagcagaatcatagtaaggattcagtgtcgcttttggataaccaaagtgacactcgccaattttatcttttttcctgtagtagaagaaaaaatgtttttttcttgccctgtgcctcctcactcaccctgagagtcttctggggcattgtggtctaggaataggaagcagattttgtgcccccacccacaccaactagcttttggctttgaatggaatcaggaaatccttcggaacaccaaaaatatacaagacttatgtccatcaacagctattcattgtaacaaggaaggattcaataaacatttattgaattctaattatgtgccaggcactatgctaaatgctgaggtaattacaaagaattatggataattcttatccataagcagctcacaatagctggagaagtaagacgggtcacaacacatacacagttatttcacagttactaggtcagtggtaggtactgccaaatgattggtataaattttatagagcctctaagctggaccatgtctagatacgctgctcaaggaagtttgttttttttttttctttaaacgcaacagaattagggaagatagtatcatgaaacttttgtcttagtggtgagtatgtgtaggtgttcagagggtttgagtgtaaaatgtattttgttgatcctggtaaaaaaattttgggaccatactgctatagaagaggtgtaacttgtgcttgcctgtggtttagaaggaaatacaaaatggattggaaaggttgacttttcaaaagcctaaaggcgggaaagcacagatgtgttaggaaaatagtagggagactctgtgactctggctctcctacctacagagcttgttaattctgttcagccaagtggtagattctggctgtattccttttgatgggttattctggttgcagtctttagaacaatctttgtttcaggacgtttaagaggagtttttctgggcatagttatgtattgccaatttaaaagatcagcagaatagttaccagtctacatcttctgagaactcttccttcttgaataacacatctggatgttgctgatggagttgatttaaatattatcctgagttataagatctggacattctgagtcataagaaattataagttgcataattttagtgtttagtgatttgtctgctggtgctttgaaaatttttcattcatttgttgtgtatgtcataactgttgtgtatgtcataactgttgcatatgtcctaataccaaaattagatagaatttcccatttcccaactgtgtcacgtgatagggttgtttaatatagggcaagctcttttggaggtgtcatttatgggataagttttgtgagatgtaggctacttgtcagccttcctgaaagagaaatgcgtatctatccactctcctcttggtctgtgctccagtagatgggggtggatggaataagagctttaaattaatgctttagatcatttgggatttttctctttagtatggctcaattggagagttggctatatgggaaaaggtggaatgctgctaatgctgtggaaaaaatgctatgctctctaccttcctaggagtaatttaccaaacctgtgtggcttggcttatccagaccaaagtatctacattgaaacattagttacatattttgtttgctttctttaggggtatgaaattatgttgcttttttttttcttttcttttcttcaactagtttcaactctccatgtttactgtctgctgatcccgaaagaattgtgaccatactttagtctgtttttgagtgtctagagaataaagttgcctaaatcagacatgtcagactgaggcataacagaattactcttaagagcaattaaagtactttactgcaaaataaacattttcagtattttccatttttaatgttagagttgtctcctttgtgtgatggtaaagcaacagattttctttccagtatggagagaagagagaactgtcctctacaggtgaaggtgtactctagtttttcacatatattctaaaataagcaaatgaaaggattgtgtttatgttacaaaaagggagttttgttttacaaaagaattaaactacttgagaactacaaaagaatttaatggctgggcacggtggctcacgcctgtaatcccagcgctttgggaggccaaggcgggctgatcacctgaggttgggagttcgagaccagcctgaccaacatggagaaaccccgtgtttactaacaatacaaaattagccgggcatgatggcgcatgcctgtgatcccagctactcgggaggctgaggcaggagaattgcttgaacccgggaggtggaggttgcggtgagcggagatcgcaccattgcactccagcctgggcaacaagagtgaaactccatctccaaaaaacaacaacaacaagaatttaaccgcatagttcaaaaactgtgaaaccatatgaactatatgcagatgatttaaaatacaaaagttaaatttgcatatgactttttaggaaaatgtcttccataaagtagagctttatatcaatattatttctttgtataaccatggaatccattcacaatatagggtgggagggcagttctctttgattctgccttccttgaaggcggctctgccagttgataaatccctagtgacttgctccctatttaaatgaaggcatgagtggaaaggccctctgtctctccctgcaggaaaccatctttaaagtcatggaactgctaaaaggagagggatctatttttagaactttggccttaaaaacattttaagaatatcagtaagccacagtaaagtgctacttttgtttattatgtaaatatactttcatttaaagaaaatactgtgatatataactgattgcatgggtgagagggaagagaaaagagtgactaattggaattgtttagtagagttgttatatgtattttattttacttggcagatttttcccccccaaaatggaatggtggttcacgtttgcttttacagaaaatcatatttataattggaattgtgaaggaggtgatcttaagggaagacgttttcatggctgaattaggagaaggtgttatctaaatgaggaatgccttagaagctgtaccagatgttttctgtgtcggaagtagtatctatgtttttatttgtaaacatgcattcttttggttggatttatggaagactaacagaaacatgggttttagcattgcggtctggctgcctgtgcatccacagctgtagaggccaagacgcttctctgcctgcagggactgcccatccctgtttctcagcaggctggaaatagctgtgtatttgtcttccttcctcttagcacagatacttccagagtagggggcacagtcattcttaggttcaggtccatgttagggaaacacatgtgggttactatgactttgttttctgcattcccagatgataaacagcataaaattaggaataggagaaacttggcaagattggacagtgagccaagtcttcagacaactttaaaaaataggcgcaaattttttcaagaagcttatcagtttttcggtactgcttttcacagtaaatagcggataacggactgatgttatgtcttgtaatggaatctagcttggagtccctgggacaacaaagttatgataagggcagataagaggacgcttgattctttgtctccgttagccatttggagcagaacgtttgcataaatgaacttttcttctgaagtggatcttgtttgtaagagaacttacgaaaggaagagggacattttaagcatgtttcaaaactgagttgctggtgaggccacagttagtttttagaggtccaagggaaatcaggcagtgtctcatctgttgttaattaatgaaacgaaactggagtcactagagtgcagcagtgaatgaaaggtcagtgaatggaaaaaactgtcaatgaaggaggatgtcagcagagtggaacattgtcatagataaagatcagtgaaaatgtgctctggctgaggtagggttttctggaagtgactgggagccagtctgggacatttcaagccaaactgagcactaaatgaatgttctgattgcagctaaatctgttaaatatttttaaatatttgtttgagtttgttctagatatcagttgagaaagatttgtgaaaaagaggcttctttttgttttataatgtgttttacagtgtagtgttgttttgtttggctcttttgttttgaagctgaacaatggtttctttctctcctttctgttctctgtcttagaactttctagagccacacttacttttgaggtccactgaaatcaaagtgatctaggatcactgtaccaattaacgatagaactggacctcgaacagcctggctgatggctcagtttatgattattgcagaattgcatctcctctgaaagttgttctgtggggggtgacctgacagccaagstctactaccaacttgtaaatggtggtcatgaacaaaccagtgaccatatttacatttcaaccagttcatctgtaaactttgttattggtgtcatgtgaaattgcctttaaagagattctcctttctctgttcttgtcrgatcttcttccttctccctcattgaagcctttgagcgatatagctttggggaaacaagrctcttccatcagtttgggagaggaccatggcctttttagcctggtcacagctggggaggccaggaccccatgaatatcatcagcaaggctgtccctgcatccaagggagagttgaaagtaattccataggatttagaaaagtagacttataacctggctcttccggttattatattacgtgattctgagcctatattatgtgattctgagccttatctataaatgggattagtagtaacacctatctcatagggcagctgtaagagtgtgtaaatacctatagagtgcttagagcaatgtttgtcacgcagtaagtgttcagtacattctaggattacatacattatttataaaaataatcatttataaggttcaaatgaaattcaagtggtgtttccttggattctctgttttctctttgagaacatttattggaatattgttttgttggatgtatgtatgtatttttttgagacagggtctcactttgtcacccaggctggagtgcagtggtgcgatcacagctcactgcatcatcaacctcctgggctcaaacagtcctcccacctcagcctctcaagtagctggaactacaggaatactccaccatgcctggctaattttttctttctttttttttttttttttttttttaacagagattgggtttatccatgttgcccaagctgttttgttgaatttaaatgacaaccattccaggaactgttttagagccagaattgaaaaatatatgaagacagttcttyagagaaacaccagaactggcagggcgcagtggctcatgcctgtaaacccagcactgtgggaggccaaggtgggtagatcacttgtgcctaggagtttgagaccagcctgggcaacataggaaggaccctgtctctacaaaaatacaaaaattagctgggcgtggtggtgttcccctgtagccctggctactcgggaagctgaggtgggaggatcacttgagcctgggaggcagaggttgcagtgagctgagatcatgccactccagcctaggcaacagagtgagaccctgtctttaagaaaaaaaagagaaacaccaraactacatgttaatagacaccacattaaaatttaacatcatacaatttaattgtaattaaaatagtgcctgacagttgttaggttgggtaggtgtaagaaaagcaaagaatgatgagaatctttaacatttattgttacaagaactaccttggggaaaaaactcacttaaataatgactgtgttattcaattagagagactgaaaaggaacaaaacacgaatagaaacaaaagcataaattctaaacagtgggcacttatataccaatattggctgaccccctttttttgagattgtctgtgggttgtacttgtaagtacaggagttctgattgactccatttcagtagttgctttgaccctagcgtagcattttgtaagtgtgaattctactagctattaatatattttagggggaattccatggtcagataartttggggaaacttactagacttcaataaatgaaaccagtttctttgaaaatactttttagaacctttagtaagttaacatgtgctctgactctgccagggagctaggatatacaatatttctctcactttttagaccgctatcctgtctgtcagcttcttgcaggacgccagtgctctggggcacactttgggaagttaaccttacaggcattcctttttccactttttgtctcagatgaatactaaggaggtgtagctaaacagccgcagctcaaaggtggaggaaggccccacagatggcgctagatactgaatgtttgatcaccgtaacaaaaaaacggggaggccgaggtgggcagatcacctgaggtcaggagttcatgaccagcctggccaacttgatgaaaccctgtctctactaaaaataaaaaattagccaaatgtggtggcatgcgcctgtagtcccagctactcgggaggctgaggcaggagaatcgcttgaacccgggaagcggaggttgcagtgagccaagatcgcgccactgcactctagcctgggcgacagagtgagactctgtctcaaaaaaaaaaaaaaaaaaagcaataaccagtgatacctcctgagtgctttactatacgccaggcacaaaatacttttgatatactaactaattatctcaacaactctgtgagataggtgtgatcattatcctcattttatagatgaggaaattagagtaggagggcttaagtaacttgacaaatcagacaactagaaagtggtaaagccaggacaggaactcaggtacaagggcttgtgttcttacttcctctgctgtatgatcatggggcttgcccacatgtgtatgctgtatgtaccgtggcttctacgtgtgcatgcatggggcggtgtgagggtggtattcttggacaagagaacggcatggaaatgtgaaataacartgagttttatgtggctggaggtcatcattggaaacggtaagaaatgaaactggaggccaaggcaggtggatcacctgaggtcaggagttccagatcagcctgaccaacatggagaaaccccgtctctactaaaaatacaaaattagccgagggtggtggtgcatacctgtagtcccagctactcaggaagctgaggcaggagaatctcttgaactcgggaggcggagattgcagtgagctgagatcatgccatcgcactctagcctgggcaacaagagcaaaacttcgtctcaaaaaaaaaaaaaaaaaatgaaaccatgaaactgtaaggtgcaggtatcctgagggcctrtgacacaaaggaatttgtgatttctataatggatccatgtattctgcctatcagattaccttaagaacttcagtaagtggaagagctttaactgcttctgtgttaaaaaatatatagaaagacacttggtcaggttggaggccaggccactctttttacattctgcaggtggcatagttgtcaactgcctaccattctaacttgttgcattgaggaccctgcactgagcctagacagtagagacaggcgtctggctgaattatgcttgaattaaacataatacagggcataatgaaagatgattccctctcaacttcctgcacttctagcagttttcaagggcatattttgtgtgtttcttgaagtgggagaaagtctaatacaatataactcaaagagatgaagataaatacttgagtcagatttcaggatcttgttcaaggctcagttaaaaaggtactatcttctaataagacttaacatgttatttgttgtttttttatttttatttttgtttttgagacggagtgttgctctgttgcccaggctggagtgcagtggcgcaatctcggctcactgcaacctccgccttctaggttcaagcgattctcctgcctcagcctcctgagtagctgggattacaggcacccaccaccatgcctggctaatttttgtatttttagtagagacggtttcaccatgttagccaggctggtctcgaacccctgacctcaggcaatccgcctgcctcggcctcccaaagtgcggggattacaggcgtgagccaccgagccctgccttgtttttaaatttaatrttaaaaatatacgaggatcccgtcatccaaatctccttgattcggacttagtgaatagcgagggtttgaatagcaaggcgtatatctgaaaatttatcagaatctgtttggtgtttgggtttggacagcaaggaatatttagattggaaagcaaataaccttactcattttttcttttcccggagggagtgaaagcacctcctttggctacatagatttcactccattgagtggtggcaagactgtgacttagtgaaggtcatagagcagatcattgtaaggacaggactagaaaaaactgaattcttctaattctgagttcagtaatcttgccacaaagccttcctgcaccctaagcaattagtctgtcagcacttctttatagtgcttgctgagatgaacgggagctctccagacatcagtggtaattatggagaccttgactaactgcccagggaatccccagaacttgatagaatattcgtaggtgggagtatgtttgtgatacctttgcagtaaaaaatttgtatggtaagaagatttaaagttagttgtagaaagaatttttgactcgatcaattttattttgaagaagttgcattcagcctcagttttcatttcttacatccccattctgcttctgtgaattattggcttggttacttgctactaactttaaatcctctttatgttttacaaaaaaaaacatttgcatggggagtggggagcaaatgttgtagggtatgtgaagatgaagagaatatctgagagagaggagtcattcattataagtgccttcaggacttgcctatccccatggtagcgttataggccaggcctagtgctggattatgcttcagtcttagcatcagcagctgtagccaggaataggtgtgcagtgatatccacttggattcgtgggtttaaactgtttgagcagttcacagaaagctggtttttattttgtgcgtggcataattttttataattttataatgtttattcttaggtgggtttgctgagttctctcgttgtttccctggcctctgtgaaggaaaatccactctagtccctacctgcatttctcagccttgcttacctgttgccaacattgggccaacccgaattcttcccaatctttatcttggctgccagcgagatgtcctcaacaaggtgggtgctttgaaaatatccttcattgctgggtttatattgttagctggagaaacagcagttacccattatgtcatttgaaacacaccccaatctcaggagctgctatgccattctcagtgtgctccccaggtaacagttgcgtcatctcttggagtgttaatttgtttgatgttactttttactgcaggaaacctaaattattgtcatgtctacttgttcttaataggtccaagagaactgaaataggacaggatttttcagaagtttagccttatattcttagggtattaattgatctattataattgggcactctcaggctgttagttcctggattatcacacatttagaaatatatttatttattgcaacatactagaaagggatgcaggttgggcttggattgaggaaggtcctcatgatgactgctggctgggggtggggaaaggtgttaaaaagatggtgaggacaaaggctgaaactatgcactgccagcctccctgggttaaagctctttggaggagtttggttgagaargaagagggaagagcatggattattgatgaaaaagacacgggccctactggacaaagcgtgccctaatggaggaacacattggattgagtgaggcctttgtatatratggtacaagcagaacagcaatagaactataatctgactccacagcttgtatgctcttaattagtaatgctgcmaaatagtgctcttactgcgtggaaaagtgatttttctctaaaatctcttaatttacatcaccacaaattgaaaaagcagtcagagatcttaattcaactattggtgatttacaagtgctattttcctatgcaaagggaagaaccccttaacacgttctccttgagtaactagaagaattgggctgattgtaaaaataagcttccagactggctttctttagcacctggaaggcaaggctttctaggaggaagaaaaatacccgatcatcgggtcattgggtagcaataaggcattcttttgtgagtgtgtgtrtgtttaaaactcctgccttttcaaaattttgcctcaacactgtgttgttaatatgtctgcttttactgtgagatctgccgatttgagatttaatagctyatgcttgtaccgagcctttctggtggggtcacaatgcctttgagtgtgcagttattattaattctttttagagataagcaggctatgttacagaaagcaaaattaatttcttaaagtcccatgcattcctagggcaaagctggagctggtttatttaatcttcagatcagaaaataaaataaaattcctagttaagaatcctgtttaatcctggtaaaccttaaccagccatcagcaggtcattccacaagtaattgtgttacagatagtttttgttacttttgacactcagttaaatgacacattcattttgctgtatacctttttcagatttaataaatatgttggttaaaaaaggtgacagcagttaaaccagaatttggagttgaggatgggaaaaatagtagttttctttttttaactctggcttctaaacatatacagcactaagcaggatacataggtagatgtatcgagaggaaatatttgcagtggggagaatgggtttgtggaagtttataggacaacaccttgggcaaggagttattatagaaggcttgtcaggaagcacccctaaaatagatgtatagacttttatttttattctgcaaggatggtgagaaataagaataaactattaagctggatagctttgaaagcagtgaatataaatttatatttgtggctcacacactttggaatcctagcaccttggaagggtcaggtgggcagatcatttgagctcaggagtttgagaacagccrggacaacgtggcaaaaccccgtctctacaaaaattacaaaaattagccgggctttgtggccctagcctgtagttccagctacttgggaggctgaggtgggaggattgcttgagcttgggaggcagaggctgcactgagcccagattgtgccagtgtactctagcctgggtgacagagcaaagccctatctcaaaaaataaataaataaataaataaataaataataaaaaataaaataaagaaatgcatgtttgacctctaggttcgttgttgacaaaaaccttagcgttgaaggagatttsagagatcatttagtcagccaccagcatttgataagtgaggaaatcagtattccaaaaatgttacatgaattccccaacattatccagttgagttttagaactagatttgcctcttttttacaaatagtattaactaacctatcatcctgctgaacttcgtgatttatactttccaagagaaataatatgcttctttttttcctaaagatctccaaaratgaaaattttataatcttccctaacagtacagttctttttattaaaattcagaagttgaagtctttacaaacagtaaccatgagaccactaatattattagtgttttgttttgttttgttttgttttgtttctttgagatggagtcttgccctgtcaccaggctggagtgcagtggcatgatctcggctcactgcaacctccccctcccgtgttcaagcaattctcctgcctcagcctcccgagtagctgagactacaggcacgcaccaccatgcctgactaatttttgtatttttaatatagacggggtttcaccatgtttgccaggatggtctcgatctcctgacctcgtgatccgcccgcctcagcctcccaaagtgctgggattacaggcgtgagccaccgtgcctggcctattagtcttttttttttttttaaatgaagtgccaccaaaatatgttagaagcatgtcacagaaattttcttgggagaatcataatgtttcccatttaaaatgctgggctttttatattattgcatttaaccctcataataggattaggagatacatttgccctgagctaagtcacttacccgagattatgtcatggacttcagagctagtcagtggcacagatcaaatgtaaaccgaggctgctgtaattttaagtcccatgcttatattacaccaaaaatgcccatcttctggaaaaaggaattctctatagcaggctgttacgaaggactgaaatcttaagtctattgagtcacaatggagaatttctttccctgttttttctgcaacatcatctataccagtaccgtccaacagaaatataatgcaagtcacatacataatttaaatttttccagtggcctttaaaagtaaagaaatgggcaaaactaattttaatgtttaaaaataacatatttaacctagtatatctaaaatagtatttcaacatgcaatcagtatacaaaattactgagatattttacagtctctttttgtactgagtctttaaaatctggtgtgtattttatacttacagcacatctcaatttggagtagtcacattttaggtgctcagtagccatgtgtggcttgtggctgctaccttattggacagtctaggtctcagcatgtattaatttttactgatgttttaaagacatggttcttttgtagaagaccataagaggtcatcggtaccaaaaacatacttttattttccttttccctcacaactgtactttgtttctcagagtgtgttctttcatcctctagtctttgtactagagctgaaatgggagcagcttattgtactaaataaaagtcatctgctgatgcctagttcatatttgaaatgagtgggatttgagaaagaatctctggttactctgtgaaagacaaaagttcttgattgcttttctctcttatcagttacaatttcaaatgcagacttttgttcacatttaaatatatgcagcatatgactgacttacctattgggagtagttattaagcagaactgtatctgaggtgaaccactgcagcttcttttctaaaggagctctgctgcctgctccttctccatttaaataatctgctgtcaacattttttgtatagcttcttatttcagcctcttaacatgcaaaattggttttcctaggctttcttattgttctgcctggtacacagtaggaagactgactgctacattctctgttgttttcttagaagagttaggcaacaaatagcctaaacacaatataggctaagaatgctttcagagtttccagtggaaatatatgatctaggaacacaaaagcgtgtcaaaattatcaataaaatatttcttcaatgtctatgatgtcactctatgtagaacaccatacagtgttcaagttggttagacaagacctattcattaaacaacaattgacatgacaaggtgactacagtgtccctcccagtgtggaagcagcacggcatgatggttgagagccagctttaggggtggacagttttgcatcccagttctccaccttaccagccatatcacttcagctgttactgcatctcagtctctttacctacacgccacaataactccggcctcctggtgttcatgtaacattcaaatgaaatggcatatgccaagcacagttcctggtttatagggacacttgycattgtcatcttagggtagactatgcagcctactagggtgagtagtagatacagtgtgttttgtcgtttgaggaaggcttgatggagttaagtaggacttgaggccagttttgaaggcaaatggatgggcaaatgcaaaattagtcatggaattgacttcagaaagaaaaattacaattcttttatctagaattgaaatgcctgtggttatttaatgagatctctgtcctcagcctcactgaacagagagaatttgaccaaacagagcagtttcattaaggccatatattaatctgttctctctgtactacttcacagtctgcatcaaaggatcatagaactcatatttagaaattagtctgactgcaggagaaagcttatttcagggttaggagagagaaagttttcaagggagaaaagttgtgaatggaaatcataataataaaatgaaatttgtcttggtttacagataatcatttttgaaagtttactcaactgtgtgttgaaactagaatcactatttaaatccttagggggagtatgtcttcactttgcagatgaacctcgcctgctgtattcaatgtaatttccctacttaacaccaattaggagaaaagacagtttggattagtgaaaaatatacatcatgggcttttttttttttttttttgtaatggctttactgagatataattcatataccatacaatttacaagcaatttttacaacaagataaaataagagaactaacatttcaggggaccctatattatgtgtcaggcactttattatcctcatactggctttacaaaatacacatcattagccttattttacaggtgaggaaattaaagctaccggaggttaggtaaccttcccaagatcacccaggcgatgagtggtaatgcgctgggctgtgctctggtttttctggggccgttacccatgtactttactttattccgtgccacactgagattccacactaaccactaatgaattgtttccaagaagagatcctttaggagtttgctttaataaatcgatcagtcttctcagtatggcatttgataaagttctgtagcttggcagtaaaactctttagcttgatatttaagaccttccaggacctaataccacctttttagttcttacctctcctgttctcttcctctgctcatcctctttcaatgtctggasacactcacctagtgagtgcaccccagatatttctgtcctgtccttggtcttcattcattttctatactccatctggaatgcctctaccgccatctgagcttcagctgacaattttagttcccattataaatagtcttctcagaatccttccctttggttttactcctgttttccactgccattttgtttatcctgctacattatattcatcggatacctctttgtatcatcattattcgtgcaactgtcttacagttgctagtagactattcatccctcagtgagaacacttgcttttttatgccccagaataccttgatgcatagtaagcccttggtgattatttttcaaaataaatagttatatcctaatttgtaacccatgcaacttgtatgaaatgtacatgtccttaaacattaagtaaacacaccttctgttaatttactcagaaaaccttctgttaatgaatttgagaatctaaaattttcaacccaggaaaaacagtcttttttaaattatgaaatgaatgtaagttaatgatattttacagtgacttgtaaaatgaaaatgtgcaaggaacatatatgaaggtttctcattagaagatgctaataaaccagttactagatactgattttagtcagcttcagggataagggttcgttcatgtattcgcccaacaaatgtttattgagcctctaccatgtgccaaacagtgttctaggtgctgggggtacaccaggaaatgagacaataatctctgctttcattagcttacatcctaggagaaagaaacttgataggaagcataataaataggtaaattacatagtatagtacagtatgagtgctatgaagaaaacagggtaagagggctggggattacctgtgaggtgtgggttgtaattaaatgggtgatcaaagtggcctaattgagatagaggcatttgaacaaacactcaaaggaggtcaaagagtaagccatttgaatatctggaggaagagcagtacaggcagaagaagccaccaaggcaaagcacatgtggtatgctaaaggaagagcgaggccagtgtggctggagcagagtgagcatgggagagtgtcgtcagagaggtaayaggagcagatccagacaatacaagatttctgcataggacttgkaaagacgggagcttttactctgagaaaaagagttcagagggagtcattggaaggttccaagcagaggagcaacataatctgacttacattgttaggatcactttagcttctgtgttgaaaatagcctgaatttcctactggatggaagcaggaaggccggttaggaggctccatggtaatgtgttgaagtcaaggtggcagtaatggtgagatttgggctctatattgaaggtatagccaataggattggatggtaggggtgtgtgaaaaagagaggtgtcaaggagactcggagatgcagttgccattaactgagatggagtctgtaggaagggcaggagtcagttctggacacgctgagttcgaaatgcctgttatacttccaagtggagatgttgagtagacagatggatgtatgaatggggcagggggatccctgaaggaggaggtataaaggtgggagtcattaacatacagacagtacttgatgtcataagagatgatcagataattactaagaggcaaaatatagatgagaaaaggattgagccgtgagcactcccaccctgaaagtctggggagttgagaatgacccaacaaagaatattgagaagtaaatattgaggaaggaaggaaatcaagtaatcagggaggcaaataaacaacgtgttttccaggaggaaggagcagtcgagtgtgccaagtagtactttaggtcaagaaagatgaagactgagaattggtcattggatttagcaacatgactatcgctggtgatcatcgagcagttttggtagagtgttgggggtgaaagcctgaatggagtgggttcaggagataacaggaggagtggagctggagatatcaagtagaaggggttctttcaaggaatttcaaagatatggggtaatggctggagggagacgcgaagctgagaggagatatttttaaggtgggagaaataatggtttgtttgattgcaggtaggaagaatgatcctgtacagtggaaaattgatgtaggagaaaggagaatcacaaagctatgttcttgagcaagaggggatggatttatttagcaagcggagggattggccttacgagtatggacagttcgcccaaaacagcaggtgggaaggcattatatctgggcgcatttgctgagagatgggtaaatgtggtgatggaagtctatcaaaatttgcctctgactgtttcartttttccattgtagtaggaagcaaggtcattcttcagctgtgagtgaagatgagtggggacatatagggagtttgaagaaaaagggaaacagaatggcatatgggaaagagaaaaagtgaatggactggggaaatacagagattgctgaggagtatgaattgaaagttagatcaggtagcattgtggagtgtttttctctggccatgttcagtggcatgggcagtgctgactaggtggagaattagacttaactagggttgtaatcttgccaagtgagtacgaacaattgatgagggcagaggaagttggggtaaaaggaaaggagtgattgtaataactgattatagaatttacattgggcaaggaaggcagacagacatcatggggatgaaggacagagaaaattagtagatcatcagactgtaggtcctcctgcaggggtttacagattctgggtgtagtgtagtataagagatcttgagtgagctggaaagtggaagggtgcatgaaatcaagattatggagggtttgtggtaattggtaatgacagagaccaggctagatctcatgagagtgagaggccaagatgaggagttcaaagaactgtgaggccaaggtgttggaaggatctttgaaggccagtgaagaaggattatctaatcagtagaaagtgtgtatttgcagacttagcacaaagttgagctaaatatttaacagcatatggtgactgctctctagaagcttaaagattatgatgtttaattatagggcagagtaaatattcagttgtgtatgttttatacagcatgctgaaactaaactgaatgaattatataaatatctttttataatttagtaagaagtcattgatacgtatctataaataaaagcaatccttattccacaaaagaatcagactcattcttcataattatagttccatctcagtttcaccattacaaacaataagatgagtcaggtatggtggcacacgcctgtaatcccagctactcgggaggctgagacgggaggatcactcgaatccaggagtttgaggttagcctggacaacatggtgggaccctgtgtcttaaaaacaccaacaaaaattaagatcccctcccagccatttgtattgaagtttgtaaaaaaaaaaaaaaattaaaaaaatcaagagagcaaactaacaacagttacatgaaactttagaaactttcttaactgactccagagatttcacgacatcttttccccacatctttggaaggtgaatgcctgctgcatgagtgggctctttgctgtagcacgtctgcctccaccatttgaatagtatacttaccaagaatcagttgtgtttgttctcgaactttaggccactggacttgttattataattatgtatgttaattaaaataggacatacaccaatgaaatgtgaaggaagagggatgcttttctgtgacctaagtcaggtgttttggaaagattcaggaaagacagattgccatatatatgtttgtcaaattaggtgggaataagggagctgtaaagtatttgggggacagttttaatctagaaggctttggcactgatagtgttttacaagttcctgctcttctttaaaaaatgaaaagtagaagtggtagatgcacttaggtgtgatttgcttacgaactccagtcagctaacctagaaaacaagaagctgtggtcctgcatcagaaatcagtgtattcatgcatgtttatttgttttaagttaaaatgatgtttcgagtatgtatatatcatttttaatgatttcccccttaactgactttttccactgactaccaatccagataagaaggcacttatttatgatatttaatttagtagccaaattatatttagtatttaagggtttttttttgtttttggtttgtttgtttttacaaattgtacttgttttatttatcaagtcccatcttactattccaaaaaaattttcaggtagcatctggatagtagatttaatcaatagaccttttaagctaaaaattttataaataaagccattgaaattatttaattttttctcagtccattttgcgtttaaaatattttactagctgcatacagtagctcatgcctataatccaagcactttgggaggccaaggtaggaggatcgcttgaggccataagtttgagagcagcctggacaatacagcgagaccctgtctctacaaaaaaaatgtttaaaaatttgaggggagcagtggcacatgcctgtagttccagctactcaggagtctgaggcaggtggatcacttgaccccaggaggtcaataattgaacccacatcaaagggtggttgtgagaattaaatgagacagtccatttaaatgcttaatacagtacctggcacattgtaggcattcattaaatgttagatatgattttcttaatcagtaccgtgtgtcattgtctaattaaaaggtctctaacaaaggtgctcaataaatattttttgacttaatataggttgtcatttctttaaaatgtaggctattaagtttacttgtcagaagtgtacatcgtattttttctatggaaaatcaattttgacagtccttattgacttgcaacatgttttctcttagaatttcctgttgtcttttgattgtgtacagtgtgtaacactattagagtcacctcatttctcagaaacttctgtaatttcttcattattgaattgagtggatagggatattactaattcctttacttttaatttaacatatctgtagtaccattggtggaaaggagaaaaatgtagtaccgttggtggaaaggactattggtgagaaagtcctcaaaggctgatttaactccagtgacccacttctgttcttacatgagtgatcctgaatcagtttctgcaccctgttgttgatcagatagtactagataaactcaccttgggttcacacatagaaaaacaaatgtaacctttgctacatgtacaaaagtttaaaggttgtagtaaataccattaagatctacgtagcctgattgttaacctaacagaagcatgagaccatcagaagacttgggctctggcatagctgaagggtgttggccaatctaagaaatccacctagttccaaaagctgtttattgacattgtcatctcagagataagagatggttgcatacacaatctggatttatgctgtccacttttttgtttgtgtgtttgtttgagatggagttttgctcttgttgcccaggctggagtgcaatggcgcgatctcagctcaccacaacctctgcctcctgagttcaagcgattcttctgcctcaactttcccgagtagctgggattacagacatgtgccaccacacctggataattttgtagttttagtagagttggggtttctccatgttggtcaggctggtttcaaactcccgacctcaggtgatcctcctgcctcggccatcccaaagtgctgggattacaggcatgagtcactgcgcccggctgctgttcaccttttatgtaaaataaagtatatttattgtgccaaatgtagtaaatgaagagattagggaactggcatgtttcagaagggtaatataggaagaaaattgcccattttctttcaggtagttggaaaagatttgtagaaaaggtagtattccaagagaaggaagaaatgaccaagattgcttagactaagataattattccaggcttggaacgtctcctgagaggcagcagggggatgactaaatgaagcgggtttgtgtgggcttgcctgctaaatggtggatggatgtcagttgaacagattgttttgagtgcaattctatagctgggctgaaggtgcaaaaacaagacgcggtccaagatcttactcattacttcattacataacaggggagatgagaattatctgttaatggtaacacactatggtaggtgcttaattaatggtgtgaacaaagtactttggaaggacagagaactgaatggttaattatgcatgagtgggaaagagttcacagatgaggttaaagtaggaaaagtgggaagagtgtcttctggaagaaggacagggccttctaagcacaggaatcgtgtgaacagagggtgggtatacatttgacgttgggggtgctatatgggacaggagcaggaaatgagactcaaggaaatgaaaagaatgtggataaagcacccagcttggggttaatcataacaaagattcctctagttgttcagaacatggtttggagagaaaaccactgcaaacttcaagagctcctggtggcttttttggttatcttggctactgagcagtgaatgggtatagagaggagagaggatcaatggaagaggttattccaaaaggatttggcagccatttggatgagggtcatggggaagagaaaggagccccattttattctcgagcttagttggctgggtcgatgttattaccctaaaccaatttggggattacagagaggaggcaggagttgggggcagaaaagggaaaaagagaatatgtttagtttctgacattttgaatgtgaagggcctgtggaacatcctgatagtcagtaggtagttggagatacgggttggaaatttaagaggacacacacacacacgccatcagcatgtagaactggtaattaagactacagaagtaagtgcagccttcaaagagagtatttagagtgagaagaatgactagaattgtatcttagagaaccagcgtgttccgtgtgggaagaaaatgttgtgtgtccatatattctaaaatcatataaactgttgttttcttttgtattctttgttccacttctctctctagtaatgaagataatagagacttgactatatgaatgatgtgtgggcttcaagcatactattttaaatagcgtttgttgtccttaaatttttttttttctttaaacttgtctctagatgtcattttgctaggtttttggacttcactgatctgaatgaattatatttcaaggaaactgggcatttttatcatcacattaaacttcactctttcagaatgatcatgtttactatattattagtcactttaactgctactctttctctccataggagctgatgcagcagaatgggattggttatgtgttaaatgccagcaatacctgtccaaagcctgactttatccccgagtctcatttcctgcgtgtgcctgtgaatgacagcttttgtgagaaaattttgccgtggttggacaaatcagtagatttcattggtaagtagctcaaataatattgcaggtcctgtgggtgatcgtctcatgtgtaggtgaaccccctcagccccccattttttctttagagaaaaggagcctatttcagagatttcaaaagtctgaaaacagcacgtggtgcagcttactcatctrgtggtcaaggtgacgtgtgtgtcacactgtccctaaggactggccttgtgacattctagctaacatttaacaccaccaaggttaagcttcacaggatctgtaattatgtatttgcaggtgtttgaaaatcagttaagcttttagggttaaattcttcccccaactttttcaaatcctatccaagcctttgggaaactttggtaatattccctgttgccttgttgctgtgttttttacagagaaaagtcaaatcttttgaaaacaaatcccattacatttaagtctttatgtcagtgtttctgagccggggtccacatgccaataatttcaggtagtgtttgatctaacagaattttcacacacacacacacacacacacacacacacacacactctcatttggttattttcctggcaatggtcttgacgggatctcatctgtgccatactttgttgtgcttcctgggcttgttcaattctggagcttctctggcccctgggtacttactgctgaggcattttggtgccacaggatcagatctgctgggtggtaacttggtgatgtgtatttggaatgtggctttagtggacagtggctgagcagaggagaaacactgctagctcctgagcaacataccacagtgactcttgatgttccatgtaaggaattttttttcccccagttacataagttggagcaccctaatccataattactctgaattggttaccattaccataattaaaaataaaagaactagttctttcaaaaaagtggaattggccaggcgcggtgggtcacgcctgtaatcccagcactttgggaggcctaggcgggtggatcatgaggtcaggagattgagaccatcctggctaacacagtgaaaacccatctctactaaaaatacaaaaaattagctgggcgaggtgacaggaacctgtagtcccagctgctcgggaggctgaggcaggagaatggcatgaacccgggaggcagagcttgcagtgagccaagattgcaccattgcactccagcctaggcagcagagtgagactctgtctccaaaaaaaaaaaaaaaaaaaaaaaagtggaattggccaggcacaggggcttatgccttaatcccagcactttaacaagccgaggcaagcaatcacttgaacccaggagttcgagaccagcttgggcaacatagcaaaaccttgtctctaccagtgcacctgtggtcccgcctactcgggaggctgaggtgggaggattgcttgagccaggaggcggaggttgcagtgagctgagattgtgccactgaactccagcctgggcagtagagccagaccctgtctcaaaaacaaaaagtggaattatgtatattaagccccatattataattttcacctgtgaggggaatattctatttaatgcttttggaactttaagtaattccaaaacacttgcctttttttcaagatttccaggttgctgagggtttcatcttcaattaggattcattctgtgaaacatctgaagataaatgacttagttcatattaaagtaatcacaaacaaatggccaggtagctcacgcctgtaatcccagcactttgggaggccgaggctggcagatcacctgaggtcaggagttcgagaccagcctggccaacatatagtgaaaccccacctctactaaaaatacaaaaattagctgggcgtagtggcacatgcctgtagtcccagctacttgggaagctgaggcaggagaattgcttgaatccaggaggcggaggttgcagtgagccaagatcgcgccactgcactccagcctgggtaacagagtgaaactctatctcaaaaaaaaaaaaaaaaatcacaaacaaacccccacaagttaacacacaccctcccattgtacttctaaaaaacattcagcaaatcattgtttttgtctctttaaaaaataacaattggctgggcatggtggcttacgcctgtaatcccagcactttgggaggccgagatggggggatcacctgaggttgctggagtttgcgatagcctggccaacacgtctstactaaaaatataaaaattagtcgggcatggtggcgggcacctgtaatcccagctacttgggaggctgaggcaggagaatctcttgaacctgggatgtggaggttgcagtgagccgagaccacgccattgcactccagccttggcaacagagtgagactttgtctcaaaaaaaataaaaataaaaaaaataaattacggttaatgttcccattgcacgtcacttccagagacattggctctaatttcagctaaaaatcagatatcaaaatctacctagaagagaacatgattttcttaagtcatgacaatgtgtgggctttaggagacaaagtttagtagaaaagagaagagaatagagaatatgaataactttgctcccaacttattttttcctttcatggaagatattggggtcatcctgccactttcattcatacaaaagaactttaactactttgcaacttggttaaacacatacacacaaaatacatattataatttatttgtaatatctgcaaatacttatcagtatttcatttgcttggttctattagagccatcatccttatcccacccaagtaattcaaggcaaaatctccaggccactttttgaattcagcccatattcactacaattgctaagtcttctcctctgtggggttttttgttgttgttcttgctttttatttactcaagcagaagaaagacacaagaatgataacccacatacatacagagtagtagaatggcaagagctaattattctcaaacacaaattcttaaagataaatgtaaaatttttttttaatttttaaatttttttatttttatttattattatactttaagttttagggatctgtggggttttaagccatggttagtgatagcatgtcatttgaagatgtacccccttaatgacttacaggctcatagtgattttttcttttttgttgttgttatttagattagatttgggtaagtctccgggttggttggaaggactcaggtttatgtggagttttgtcttttagttaatgtgccagtaacagagtttgcccgtttgtgctatgggatactcatgaggtgcccccaaacccagctggctacatatacagcctcttgcttcctcttcactgtctcctgggctcttcctccagctctcctcatgccaaactcgtgactgcatggacacaacatagggaggtgattaggaccatgtattttggaggcaaactgtctgtatttgagtcctgcctaccctggttattagtgaagtggtttgagtaagttacttcaaacttctgtgcacttcagtttcttgatctggaaactgaasgtaatatacctaccttacagggatattgtgaggattaaaatagataatgtaaaatgaaaaaaaaagaaaaaaagtaaaccaaaaagataaaataaaaataagtaaaatagataatgtccattgaacaccttgtaaagtacctgactcataattggctgttaataartattttaaaaattgttatctgaagttcctccttttttctgtcctttgagctggactctgtaacacctcttagtattacttccttctttttagcttttgtaacttctcatcctcactgcatctttgcccttttcatttgcagttctctctcccctttcttaacctagattttagccttaattgcggtaatggccacctgcttgtttccagttttcatcatcattgccttctcgttctttattcagaaacctgaagaggcttcttagttttctgcgttaaaaaggtagccttggccaggtgcagcgtgtgtaatcaatcacagcactttgggaagcggaggcgggaggattgcttgaggccaggagtttgacaccagcctagtcaacatagcaagatcctgtctctacaaaaaattttcaaaaattagccaggcatggtggtgtgcacctgtagtcctagctgggaggctgaggcaggaggatcgcttgagcctaggagctcacagttacagtgagctatgtttgcactatggcactccagcctggatgaacagagtgagaccctgtctgaaaaaacaaatgtagcccttagcctaacattcccaccaccctcaaacacctgcttcccacctttgaaaccttctcaaaccttctctctggtttcttctccaaggcaggctgttttcgaatgagcactttgctcagtcccactgcagggctttctcgcacacatttcccttctcctctctgccagttgtgtgtgttaaattaattcctttgcttgaagacacagtttagggctcatgtctcccaagatgcatgctggtgaacctcaactccagtatagtcacttgtttttttcatttttaaaagacgtcatcaaaagagttgtggttataaaaacagttgtaagcacattgcagaaaatttgaaaaacagagaaaaggaaacctataacctcaacatcgtaacgcatgttactgtcattgttttatttccttccagccttcttctttttttattaaaatctcttttgaaaatatgtatcagccagtatcagctggatgcctaccatgtgcctagcgttaagtcttttgggggattgttagaagcaagcaagatccttctaggtccttataatctaggttttgagatagataattattaaaattaatgagagagtattgtcaacattaaaaaacaaaaacccagactccttccagtaaggatttgaagcagttttcaataataggttagaaccaaaagatacacatattctcacacatacacattataatggtataaaggagcaataatcaagtaataggggctaggaaatgtacagtaactgacaaaaagtctgaattgctacttcttattgaaattgagtagaaaccttagctttgagcttcttagcagtagggcagaaagggaaggaaacactgagagtaacgtggggtaaatgatagctgagaaggaaggggatgctggaggcacaggaaggcatgagactgtgtacacgagtttatatgttcttacttgtatagcatgcaattctttgtttgagtgttgcttggtattcatttgttagtgttttattgtgtttggtttcctgatctagaagggaagctgcttgctgcttaattattcatatgctacccaaaacctgtatgttgctttatatatgatgaataattatgttatatataataatcattacactagaaacttatatttatagcataggcagtgagattgaatagctttgtattattcagctgccaaagtaagattctttgcgcatctgttaatcgcaagaattttaacacaaggttcagtagacttttggtagtatctaccaagaatgaaaaggggagaattcagcttcatgactgagcacacatgtaattatttagaattgaggcagtcatggaactggccagaatgttagtakcttccaggctgtgtggaataacctcgtcccctgccacatgtacatattgttaagcccctcagcagtgagagatggcagcactgcttggatttccttggttctttggttctaacaaagtgtccgtgagtccttccatcatgttgtggggaattgagataatgccataagacartaactcctggtatcaaggaagggataaaagttctcttggatctcattaaagtgacctgctaaacctgattcatagcctatacaaggttttcttctaaaactcagtaaataaagttgagccattttatgacatacagaaaagttgcttaaaatagggaggccaggggcagtggctcactcctgtaatcccagcactttgggaggctgaggtggacggatcacttgaggccaggagttagagaccagcctgcccaacatggtgaaaccgcaactccactaaaaatagaaaaattagccaggcgtggtgctgcacacctgtaatcccagctactctggaggctaaggcaggagaatcacttgaatccgggaggcggagattgcaatgagccgacatcgtgcactccagcctgggcgacagagcaagactctatctcaaaatagtaataatgattttaaaaaatgtaattatatttcttaggtaatcagggaaaaatttgaagtgtcagataacaggaatatattaaatattacccatatcttaggggaaaatactaacataagtcaggaaacctgagttagtagtagcttgcttattaacgaattgcttattaacaaacagttttggaccccagttgtcctgcatgtcagtggtgagggaattatcttcccctgcctcctcaaaagaatattgcgaggataaatatgatatacacagatgagatttgcgtagaggttttcaggtggaagacactgagtaagtaaatggaaacaagatttcactgctgaacaaaatagttagtagtgacctttcttgcatttgacttatacagagaaagcaaaagcctccaatggatgtgttctagtgcactgtttagctgggatctcccgctccgccaccatcgctatcgcctacatcatgaagaggatggacatgtctttagatgaagcttacaggtgagggcaggaaaatgtcttctgtgattggcttttcatttgacctgaaacataaagaatgatgaggatgggtaaccaaattaaagcagatcatgattattttagtcacattttttacaggttactgtggattttttaatggtcttgtgaagattggaaaagaatgctgttttactatttagcattaattctgccttcacatgtgtsagactcatcctcagccactttttatgtttaaggaacaacagatccaggcagagatctctatcctgttacatgagtttattgctttccctaaatgcaaaagtatcctttgttttaatttgcatatgatggggggaagctctaatagaatgctcactgcagaatctctgttctgcttcaaactttggattgctgggaagaaaaagcctcatamatgcaaatatgaaccagattaactgtcagactccattcttcagtaaaatttcctacattctagagtcggccagattgtgtgtgtgtgattttgactgggttgcctccagtctctgatttgtctgactcccctgcatgtatcgttgggtagagatggttcatttttatctgataaggaatcaaaaatatagagactcatggagcaggcctgatttaacagttggattttttttttctcaaattgcaaagtttggaaaacagaaatgagctgcccaaacagcttcccatgttaagtcagcagcctggaggacgtgggtcctctggtcatctgcacgagctctcatgccgccgttcagacctccctgaggtcctcctgctccatgtagaaatcagaagaaaaggcacccttctatcacgttatgaagtctcattatgagcaccctacatttatacttgttattcttgagccagttatttctatttttgtgaatttgctttaggttacttgatttccaagtttttttttttccttgttccttattcaaatgcaaattttcagtgtagttctactcctccatcacctgaaaagtatccatgaggtgcaggggccgctgaagaattggtctgtcatctctgagtctttatttcctccatgaaacatgaaagccatctagtattagttttgatcctttgatgaatcttttttttaacatagtggttacaaaaatggacccagatatttgaccagcctggttttgaatccagcaccatcatttagtagctgtgtgattttgggcaagtcacttaaggattctgtggagctatatgatggggataatgacacccacctgataaagggtagttctgaggatgaaatgatgattcagtgcataagcacagtgcttagcacacagagaccactttgtcttggttagtctgtcatgttgactataaaaagaagtgttgctttgatactttgatcatctgataccatcttctttttgtcattaaatttaaaatgtgaactgtcttgagaagtgactggtgactttaagaggggatgacattggaaattgaagaaggagagtggctgttatactgtacttttgatggtagcactggtgtgtgtgtgtcaggggtgtccttggtggtgaataaataatcatctcttggccaggcatggtggctcacacctgtagtcccagcactttgggaggccaaggtgggagaatcacttgagcccagaagttcaagaccagcctgggcaacacagtgagaccctttctctacaaaagaaactttaaaaattaaaattagccaagcgtgtagtcctgtaatcccagctactcaggaggctgaggtgggaggactgcacgtgcccaggaattcgaggctgcagtgagctatgatcatgccactgtattccagcctgggcgacagaacaagtctctgtctcttaaaaaaaaaaaagaccaccaccaacaaaaccccataccatctcttatcagctgcattgggagccctgggcctttgaaaataaggagacaaaaactagagcctttggggcccagctgcctcttctggcatactccaggatgtgtgcaaagcttccccagtgcctagggcctttgtattctccaccttgaagcatctccccgaacttgtaaaccaatcatcttccaaagtttttgaggtctgcctgataattccctatctcatttattcacttaatattcttaagataaagtgtagttgtaaaattcgggtttttgttttttcctctctctgcagatttgtgaaagaaaaaagacctactatatctccaaacttcaattttctgggccaactcctggactatgagaagaagattaagaaccagactggagcatcagggccaaagagcaaactcaagctgctgcacctggagaagccaaatgaacctgtccctgctgtctcagagggtggacagaaaagcgagacgcccctcagtccaccctgtgccgactctgctacctcagaggcagcaggacaaaggcccgtgcatcccgccagcgtrcccagcgtrcccagcrtgcagccgtcgctgttagaggacagcccgctggtacaggcgctcagtgggctgcacctgtccgcagacaggctggaagacagcaataagctcaagcgttccttctctctggatatcaaatcagtttcatattcagccagcatggcagcatccttacatggcttctcctcatcagaagatgctttggaatactacaaaccttccactactctggatgggaccaacaagctatgccagttctcccctgttcaggaactatcggagcagactcccgaaaccagtcctgataaggaggaagccagcatccccaagaagctgcagacygccaggccttcagacagccagagcaagcgattgcattcggtcagaaccagcagcagtggcaccgcccagaggtcccttttatctccactgcatcgaagtgggagcgtggaggacaattaccacaccagcttccttttcggcctttccaccagccagcagcacctcacgaagtctgctggcctgggccttaagggctggcactcggatatcttggccccccagacctctaccccttccctgaccagcagctggtattttgccacagagtcctcacacttctactctgcctcagccatctacggaggcagtgccagttactctgcctacagctgcagccagctgcccacttgcggagaccaagtctattctgtgcgcaggcggcagaagccaagtgacagagctgactcgcggcggagctggcatgaagagagcccctttgaaaagcagtttaaacgcagaagctgccaaatggaatttggagagagcatcatgtcagagaacaggtcacgggaagagctggggaaagtgggcagtcagtctagcttttcgggcagcatggaaatcattgaggtctcctgagaagaaagacacttgtgacttctatagacaatttttttttcttgttcacaaaaaaattccctgtaaatctgaaatatatatatgtacatacatatatatttttggaaaatggagctatggtgtaaaagcaacaggtggatcaacccagttgttactctcttaacatctgcatttsagagatcagctaatacttctctcaacaaaaatggaagggcagatgctagratcccccctagacggaggaaaaccattttattcagtgaattacacatcctcttgttcttaaaaaagcaagtgtctttggtgttggaggacaaaatcccctaccattttcacgttgtgctactaagagatctcaaatattagtctttgtccggacccttccatagtacaccttagcgctgagactgagccagcttgggggtcaggtaggtagaccctgttagggacagagcctagtggtaaatccaagagaaatgatcctatccaaagctgattcacaaacccacgctcacctgacagccgagggacacgagcatcactctgctggacggaccattaggggccttgccaaggtctaccttagagcaaacccagtacctcagacaggaaagtcggggctttgaccactaccatatctggtagcccattttctaggcattgtgaataggtaggtagctagtcacacttttcagaccaattcaaactgtctatgcacaaaattcccgtgggcctagatggagataatttttttttcttctcagctttatgaagagaagggaaactgtctaggattcagctgaaccaccaggaacctggcaacatcacgatttaagctaaggttgggaggctaacgagtctacctccctctttgtaaatcaaagaattgtttaaaatgggattgtcaatcctttaaataaagatgaacttggtttcaagccaaatgtgaatttatttgggttggtagcagagcagcagcaccttcaaattctcagccaaagcagatgtttttgccctttctgcttcactgcatggatacagttggtaaaatgtaataatatggcagaattttataggaaacttcctagggaggtaaattatgggaagattaagaaaggtacaaattgctgaggagaagcaggaaacctgtttccttagtggcttttatcccctcggcatgcgatggggctgatgtttctatrattgcctcagactttcacatttactagtagggctgagagaggctttagtgaggaaggaatattcagaataaaacggttgagaaagctgagaagaccattgagttttgatcagttgtgaatagagtgcaaagccatggccaagctgtttttggaaacgctggccggcgtgtcttcagtggaaaaagcaaatcaaaatggagcgagagcaaaggggcgtcctcagtcctcaacctacaatcactgtatggaatcggtcctggcagctgaacataggaggtcactggaacaagtgatagtgcagattggctttcaaacatcctcctggcttgagttttatcagctacartgtgggtcctcttttgaagccttaattcacaacagcagctttttgggggtggggctgggcgggtgttgtcattgttctttcccttcctgtaagtgtcgctagttgctgcctcgtatctcaggtttttctctgtttttgagaaatggacagttttttgaccaggatgtgacttcatgtttcctatggtgacttctaaaaccagcacagaatgatatgactcaacacagaccgacttggttatggggatgatgagccgcacagacctcactagttgtgcacaaataatgtgctatgatggggtgtaaagtgaaggcagaagagggtcagccgcattgttatgatactgggaaagtgcyggtcaacgatttgagttagtttttagatatacattgaaatctttaatcagacattctcaagtttcacacagtagtttttgatgttatgtacacacacaccaaatgtgtaacagttcaccacttccagagtgtggtcatgcccaaaacatgtttaagaaaggaaagcagtagctccttgctaacgatgtttcaggaggtttggggsacttggttttaatgagcttctgtcatttagggcttctcttggccatggtccccttccttctggaactgtgatgtagtcacatcctacagcctttagtgctggttcactagtgtcagataatcagttcttggaatcgagactgccgtggcgaaggggtggcctcggaggcaggctctggagctgcttggatgtctttaggtggggtggtggctggctctcttcagcatgtaattggggaaaccctcgyktctactaggggtgatacagatggtgattttaaagagcaaaactagacttctatgtgagaagtgctggaaaatgatttaggacatgtgtaaagttagatggaaagactgtaaatgtttaatatgaatatagtgttcttttgaagtaaggccagctgttgaacggttaaactgtgcatttctcattttgatgtgtcatgtatgttaatgtatgaaatgattaaataaaatcaaaactggtacctgtttatacataaatacgagaaaagacctatctttgcagccataaactcggtgggaacaccaccactcaagttgccaaaggaggcagtggtgaaacctgtcctgttctcacttaaatgaggatttagctcaaaataaagtggtggtgtcatcaggtttattccgtgttctgtcattcacatggaacaccggatgattagctaacagtttagtgccagccttcattctttactgtgtacgttaaatgcacactacagtgaaaaagcctaagacacttggtaaatattttctagctgactgattccagaacacacaagtacatggtaggaaaaaaaaggccagctacacactcatggcccatttcgatataacatgtaaatgatgttacgattcctacaggaaaaacaggaagggcaattgttgaagagctgtcctttgtccttgccacatacatctcaacaacctctctgctcatgacactagatttgatgacttatgagactagaaacttagtctcatcagtttcataaaaattaggcattgaaggaataaagcttcagtgcaaacagatggaatattgactacagaaagaatcacaggtgaccttgaagttggttgagttgaagttacatttaagaaaatttataagaaagattgggccgggtgagctagactagaagagctatcttggccaggaccctgcagaaaaagaggtggaagtgagatagaggaataaagggaattagaataaatcagcctccagagatagagggtaacaggaggaacagttgtttcagtgagaggcttccaatgagaagatgcagatcttgggagagcctgaagttcaggccagttgctgacagwgctcggagccccttcatgaccagcctcagcaggctattgttggaggactggtttggatgtgacaactacaattagaccaggaattaaactaagaggggaggctgggggcggtggctcacgcttgtaatcccagcactttgggaggccaaggcaggtggattacctgaggtcaggagtttgagaccaaccgggcctacctggtgaaatcccttctctactaaaaatacaaaaattagccaggtgtgggtgcctgtaatcccagctacttgggaggctgaggcacgagaattgcttgaacctaggaggtggaggttacagtgagccaagatttcgccattgcactccagcctgggcaacaagagcgaaactccattttaaacaaaaaataaactaaggggaaattagtgagaggtgacagcgcactggcagccctcacacccctcactcactctcagcacctcctctgcctgggcttccactttggcggcacttgaggagcccttcagcccgccgctgcactgtgggagcccctttctcggctggccaaggcggagccggctccctcagcttgcggggaggtgtggagaggtgtggagggagaggcatgggcgggaaccggggctgcgcacagtgcttgcaggccagtgcgagttccgggtgggcgtgggctcagcggaccctgcgctcggagcagccagctggccccaccgccggagcagtgaggggcttttagcacccgggccagcagctgctgtgctcaatttctcacagggccttagctgccttcccacagggcagggctcaggacctgcagcccgccatgcctgagcctccccgaactccgtgggctcctgtgcggcctgagcctccccgagcgccgccccctgctccacagcgcccagtcccatcaaccagccaagggctgaggagtgtgggcacagggcgtgggactggcaggtagctccacctgcagctctggtgcaggatccactgggtgaagccagctgggctcctgagtctggtggggacttggagaacctttatgtctagctcagggattgtaaatacaccaatcggcactctgtatctagctcaaggtttgtaaacacaccaatcagcaccctgtgtctagctcaaggttcgtgaatgcaccaatcaaccctctgtatctagctactctggtggggccttggagaacatttgtgtctagctcagggattgtaaacacacaaatcagtgccctgtcaaaacagaccactcggctctaccaatcagcaggatgtgggtggggccagataagagaataaaagcaggctgcccragccagcggtggcaacccgctcgggtccccttccacactgtggaagctttgttcttttgctctttgcaataaatcttgctactgctcactctttgggtccacactgcttttatgagctgtaacactcaccgcaaaggtctgcagctttactcctgaagccagcgagaccacgagcccactgggaggaatgaacaactctggacgcgctgccttaagagctgtaacactcaccgcgaaggtctgcagcttcactcctgagccagcgacaccacgaacccaccagaaggaagaaactccaaacacatccgaacatcagaaggaacaaactccggacacgctgcctttaagaactgtaacactcactgtgagggtccgcgacttcattcttgaagtcagtgagaccaagaatccaccaattccggacatattaggaaggtgtagattgagatgtgaagaaaaataagacaaaattggagccgagtgtccaaagagattatgtgaagggtagagggtgcatatgggactagttgatggaaactttttagtctcaacacgttcactgttactttatcttaaatactcctttggttttgtttttctgagaagcaggaatgttttagatctagtaaacaaaatttgtctacgtaatttttctgtgaatattagtcttctgcatctagaaatggaagcgggaagtaaactatttctagcttctgtgggacccattcatccttgaacggcctaattatacttggttatatctttaaagttgcagaatcaactggaaaatcacagcattgtcctggaagatatttacaagtcagtcatattgttgtactttatttgcagagacagcaatatgcacttatgtaaaaacagtttcattcttttggttccagctcaaacactagaatccgtttgaaaatgctgtcccacaggaaatgcaggatgtggccggtagaagcaatgtgacaggcaaatagggtaacctgaagagcattcagtaatggtctgtgttctctgtcagaattatgacaattccaaagaccagaatgaaagtacttggtgcagaaaagcttttcgcataactcatgcctcaaggaatgagccttgattggtgaagaaaattgagtcaacggtaaattccatcagatcttacactgacattgataaccctggaaaaatcccggaggcatggacacgcacacaccagcataacgctggtcatcctggcaggcaactagatctagttgccaacttttttatctttttggtttgaagcatgtggataattatctggctaccctttccctctgtagccatagcatttgaatggaagagacatgcctggtgtgtcaaaaaaaaaaaaaacccacatgaaattcaatgttatttatgacagcagtccccaacctttctggcaccagggacccatttcatagaagacaatttttctacagacagggaagcagggggatggtttctggatgaaaccgttccatctcagatcatcaggcattagattctcataaggagcgcaaaacctagatccttcacgtgcgcagttcacaatagggttcacgctcttaggggagtctaatgctgggtctgttctgacaggaggtggagctcaggcagtgatgtgagtgatggggagcagctataaatacacacgaagctggccaggtgcagtggctcacgcctgtaatcccagtactttgggaggccgagtcgggcagatcacgaggtcaggagtttgagacctgcctggccaacatggtgaaaccccatctctactaaaaataaaaaattagccgggtgtggtggcgggcacctgtagtcccagctactcgggaggctgagacagtataactgcttgaacccgggaggcggaggttgcagtgagccgagatcgtgccactgcactccagcctgggcaacagagcgagactccatctcaataaacaacaacaacaacacgtgaagcttcacctgctcatccgccgctcacctcctgctgtgcagcacacttcctcacacgccacagatgggtaccagtctgtggcctggggtttggagacccctgatttatggtaagttagtgaacaataatgccacctcctcagaggcactatatagttcttaacaaaggaatgaagcgaaaggtcagggaaagaaaagcaaaactactctcgtgattaaatttcatacctaaaaagtccacaagaagaaaagttttcatttctccctaatccatccttcaatcttgagtatcaacattttgaataatttctgctgagcactatatatctgggtttggctgaagtataaacaaatcaggaagaccaagtttcccaattgcactagaattttaatacatgtctggtcacgtctctgacaattcctggttttgccttgggaattactaggggaaatgccaaagctaagtaagttctacaaatcaacacaaaagtggcatacgtcattcgccccagggccattagtttatgtaaccttgtaaaaccgagtttgtaatacctataacgtaagggtaacagtaccaacctctttcataactgaagaagccgcaaagaaatactcaggatacagaaacatatatacagacgcacacatacataaaatcaaacttttttactcaaaaagcagattctcccagactaaactcatttctaaacggagtttcactcttgttacccaggccagagtgcaatggcacgaacttggctcactgcaacctccgcctcccaggttcaagcgattctcccaccttggcctcccaagtagcggggattacaggcaccagccaccatgcccgggtaatttcygtattttttttagtagagatggggtttcaccatgttggtcaggctggtctggaactcctgacctcaggtgatccactcgtctcggcctcccaaagtgctgggattacaggtgtgagccaccgcgcccggcctaaactcatttcttgaatgtactcctatatcagggtatggagtccttgaaactcatttaatgaaatgtttactctgtgcagagaatactgggtaggtatctaggttcaaaatatatttcatattttaaggatgttatcatctaagacacaggaaactatatatgtgtggtctataaaaccatatatagcgttactaagaataaaactttgagggaaacaaagacatgaaggccagtttctaccaaccttccactttgaccagggaaaccaggagactgcacatagaggcctatttgactgtgttcatcaacagaaatgaacagattgcaagataagcaaaacaggctctagaaagaagcagccaatgaacagctaatttataattaaaaggaagaaaagcagctgcaccttgggagctcggaatttagtcactaccaagacccagggccactgctcagagacaaaaggtaaacacgctcattgtagtcaagatgtatcggaatcacagacttggaatcttagagctgaaaggggcttgagagcccacccagacctgctcacgctgtaggaaggcggaaactgaggctcagggaaatgaaatggcttgccaaagattaaggctagaaacgtccagccaagggctctttcacaactcctatccctgaaatatcccataacggccagataggtcatggggtattaaccaacaaagagatccagcataactgcttcttgaaatacaaatcactcagactcccaggttccatcaggaaatagcaaaacatgagagggaaaggactggtaatgccatgttaccagtcagaggttccatcagaaaagaaccactaggaa

SEQ ID NO: 95361 - DNA, 28642 bp, Homo sapiens
gtgcttttacatatctccaaaaacaggttttcatttctttcaaaatcaaaagaaggccagggcagggcgcggtggcttatgcctgtaatcccagcactttgggagactgaagcaggtggatcacttgagatcaggagcttgagactaccctggccaacatggtgaaatcccacctctactaaaagtacaaaaattagctgggcatggtggcacgtgcctgtagtcccagctacttgggaggcaaaggttgcaatgagctgagatcatgccactgtcctccagcctgggcaacagagtgagacctcatctcaaaaaaaaaaaaaaggagggggggccaggtggctcacacctgtaatcccagtgctttgggaggccgaggtgggaggatcacttgagtccaggagttcaaggttgcagtggcacaatcagaactcactgtactccagcctgggcaacagagagagcctgtttctaaaaactaaaaaaaaaaaaaaatttgttaactcggagaacaagttttaatacataacattaatatatttatctgtatactaatgcagttgtaaaatataatttttaatactttttttgtggaagaagaggtgcatgaaggcaaaggagtctggggctcatgaaaacctttgagtaagatggggtcaggcccttcgacctctccttctggagcccatatattgtttcgggcttgcttttcctccctcatcatttagagtgtttatttagatttcctctttaacctttctcattgttctgaaagtacaggatatgacgtggctcagtgactagaatggacctctattatttccattcccagagtataaatatccaaactgcttcaacctgataggaatagtcaaaagcagacaatcatctcggctactgcaggctttcctctttggaacccacctatggtcatcctgtcagtctgacatgaatctggtcactggggtaggtgctgttccaaggcccaaactttgctggcaggaacagactaaagaactgagcagcgctgacgctgctgtcactgcatgccacatcctcttcacggccctcgataccctggggacactgacaccagaggaagttttaaaaacagcctgtgtctgaattatccaagaacaaacagaaaagacttgcttggctaaaatcaacagggtttgatgttacaactgcagttgaaaggcttaaatcggttctctttaaagcagcaggcacccccagacatcttatgggtgattccttttcttttctgtaacgcattcgaacaaaactcaggtaactttagaaggtatatgatatgcaaatttatagaccttccagttgtttccatctgagtccccttttcaggctttttatctctgcttcccctcgctccccaatcaggatcctctcctctcagctcttctttcccattccactctcctaaatgcaatcacaggatgagtcaaggggaagcaaaataaatactgcagctgctttctctctttgtttttacagaaaagtctgtgtggctgcttttgaagaagaaagctgctttcgattatgtaagatgatgctctctttggtaaaagttttggtctggtctcaagagacttggctttttttttttttttctttttgagacggagtcttgctctgttgcccaggctggagtgcagtggcatgatctcggcttgctgcgacctccacctcccaggttcaagcaattctcctgcttcagcctcccgagtagctgggattacaggctcacaataccacacccagctaatttttgtatttttagtagagacggggtttcaccatgatgaccaggctggtcttgaactcctgacctcaggtgatccacctacctcagccttccagattgctggcattacaggcgtgaaccattgcccccagtctaagaggcttggcttctattcttgtctcttgtgatctttactctttctttactcttgtgtctctttactctctgggactagagttcctcatctgtcaaaagaggaatacaaactccccagccggtctatgtaacagaggagaggaagaggaagagcccaatttagctgggtagattctctttgggagaagttgacttccccttatcccaaagcatatgtattgactttggagaccatctagagtggcccaattccaagtcataggagaatgagatggtagccatgaggagggctaaatagagagatggaatgccttagactgggctagcataattgtatgcctgtgactgcccagtagaatcaatttcagggtgacctgttgtcttatgcagtgtgtattttctctcctttcctgtaacttggagtgaactaatgtaaaaagaccaaagtccccagcctattctgcagcagtgtaatctttttttactacatatatatgtgtatatatatatatatatacatatatatataaaattaaaaaatatatattttagacagagtctcactctgttgcccaggctggtgtgcagtggcacgacctcgactcactgcaacctctgcctcccaggttcaagctattctcctacctcagcctccaaagtagctgggattacaggtgtccgcaattatgcctggctaatttttgtatttttagtagagacaggatttcaccatgttggctaggctggtcttgaactcctgacctcaaatgatccacctgccttggcatcccaaagtgctgggattataggtgtgagccactgtgcccggccaggaatgtaatcttaaatatggaaaaacctcactccctaaaaaacaaagagtgaagtcctctctggtctgctatggttcctgatcccaatgctttgctgttttacttcagccaggcagcatttccagagcatccacttcttgccagggcctgtgcttagagccaggggtatgaagatcatcccttgtctcttagattgttggggaccagcctcaacaccacccgtagggtacccaaagtccggtggcaacaaaggaatgagaagagacaggttaagagtgcataaagagtgggggcckgggggccaattgcaaaatggaggctgcaaaaggcccagagttctggtcttcactctatttattgagtacaatcccttagatctaagaagcagatgtttagggtgaaacagtgaaagggaggcagtatgtcataggcgtaatctatagcaatggctgtttaaatgagtctcctttgttctcaaacagcatatctttaacttatcgaagagtagctagtgggagtgggcttaactaggagcctgaacgtctgtccacatttcaatgcttcaaaggagtgtctttctccttgaacacagtgtttatagataagagagcaggttgcgctcagagcatgggaacataatggcgataagaaggctttcctcctcagaggccttttgtgacttgccacaacttattgtcccatatttttatggcccgtttatgcaggcaccccacaagcccttttcccaacatagatcaggggtccccagcctctgggccatggactggtgccagtccgtggcccgttaggagctgagttgcacagcaggaggtgagtagcaggtgagcaagcattactacctgagctccgcctcctggtaaatcagctgcggcattagattcgcttgggagcacaatccctattgcaagggatctaggttgcgtggttcttatgagaatctaatgcctggtgatctgtcactgtctcccattacccccacatggaaccatctagttgcaggagaacaagctcagggctatcactgattccacattatggcaagttgtacaattatttcattatatattacaatgtaataataatagaaataaactgcacaataaatgtaatgtgcttgaatcatcctgaaaccatccccgccccaattctgtgcaaaaaatgtcttccacgaaaccagtccttagtgccaaaaaggttggggaccgctgtcttagatggtctccttttctcactctttctacagcctatctccatatagagttagagtaatattttaaatgtgtagatcatgtctcttccctgctctaaacccccagtggcttccttctgcatttaggataacatccaaaaccccagaccttttacaacagggtcctgcagagtctgagctgagcccaattctctgaccacatcctaccctttttgttgttgagacactgctgtgatgcctaaatcagggcccttttttagttgtggtggtggggaggtcggcaggcacattgagttgagttcctcacaattctcaggtcaagcacactggcatcacaagtctcctctcttgctttgtgtatttattatccttttttttttttttttgagacggagtcttgcgctgtcactcaggctggagtgcaatggcatgatctcagctcactgcaacctccgcctccggggttcaagcaattctcctgccccagccccccgagtagctgggattacaggcacaggccaccatgcctggctaatttttgtgtttttagtagagactggatttcactatgttgaccaggctggtctcgaactcttgacttcaagtgatccatctgccttggcctcccaaagtgctaagatacaggtgtgagccaccgcggccggcctattgtcttatacacttaattcttttattcccaattcccagttttattctaattcttctccctctgcaggcaaccattctaaaatatttcaagtgtatcttctgttggatgtgttttagcagaatgtgatatctgtgggcctatattttaatatacttgatatattttatgcttttctcactaagcactaggtttttcagatctaatcatattgttaagggcatgtttgtagacaccatgttcacattttaactatgcattttcccagtgacggacaccagattgcccccaacttcccatcctcaggaataaaactgcaacgagcaccctgcgcagtgtgagacccaagtgacaggccacaggagggcactcgctggccatggggcatgcaacatacagctctgaatttgctgctttccagaatagccttagtagcttcacagtcttggtacttggaattctctcactctggaatgattatctcctgggatcttaaagcgttttctcctgctcaacagtgaggtcttaactcaaatatcactgtctcagagaggccttcccaatctcacagttatccccacaacccaccctccccaggttactctgtaatttttatgtgaacagggtttcactctgttgcccaggctggagtacagtagcaccatctccactcactgcagcctcaacttccggggtcaactgatccctcaacctcagccccctgaatagctgggattacaggcgcatgccaccatgcatgcctgactgatttttgcattttgcagacacagggtttcgccacgttgcccaggctggtctcgaactcctgggctcaagtgatccgcccgcctcgtcctcccacagtgctggggttacaggcgtgagcacacccagctacttttcacaatttgaaatgctctgtgatagcttatttatgatctgtcttctttttcttcacgagggcaggggtcgctgtcctattcaccagccatctagcatagccttagcaaatggtaggttctcaacattattgaataaagtaatgacataataaaaaaatagtattgtaatatcaatccgttccaaactctatggttagaaaagcggggaacataactggcgacacacgtagggaaggctctttaaaagggacctaaaggtcaactggagtccctggtgatcagccccttctgcactcggatctattccgcaagcctacgcgcctatattcactgggccccacctgcctagcggacgggtgcaatccccggmaagcccgcagggggcgcgcagagcacgtcgtccggggagaactaaaactacatttcccagcatcccgcgcgccgcagacccacttccggagacctcacacaagatggcggcacccgaggaacacgattctccgaccgaagcgtcccagccgattgtggaagaggaggaaactaaaacatttaaagacctggtgagaatggatgacgctggcttcttttatgtactctggtgctaggctcagggagaccccaggtaccttagatcccgctctgatagtgtacaaaagcatcttggggcctagcttgggttttccccagaatttcagagggctgggtttcggacgtgctctgagtttgggtggtgggagggctgctgggccctgagaccccctatttgccctattcgccactttagtgtggcaacgtttgtatgtgcatccaggaggttgtacatatggggaatggaattggtctctttataactggagctttggagtcagatgaaccaaccagatttgaattttgacacagtctcttactgaggacaagttgttacctctctgtgtttctctttccacatctgtaaattggggatagtaataagtacttacctcgcagaattgttgtgacgattaaatgagatgatacatgtaaagcacctggccttggccttggtgagcagaaagtgttcgttaagtcttgagctactgtctcatggtatagttaaagagtaggctctgagatgcacagtaaataccttttaaatcaartacaatggttgtacatgatgggtctgacagtcagttaagtaggagggaggtaggggtgtgctgttcttggctaaggtatatttttstgaattccaagggtgtgacagatgtgttgtgtgaagcttgtgaccagttgggatggacaaaacccaccaagatycagattgaagctattcctttggccttacaaggtaggttgtatgacttcgtacagatttaatataaagttatctcaattagataccccttttgaaagctgttgcttgcatacttcaagtgaaataaggatatggtcastaaaggtacaaagtttgggtaatggtatttgaaaatgtcattctccaattttactgagcttactttctgtcttaatagctgaaagggtttgttctctgccacagatgctgactttaaggaagccctaggttaaagttaaagtatattaacracaatcttggtagactttatgcatcartgggcgcacacttagggaaggatgcctggaacacatatgtgtgtcttgaggagttgagaattcttgctgtgagccatgtttatcagatttgtaaaacagtggttaaagcagattgatggctactggaactgaaactaatgggatgaacttttttctttttgagatcttttttttaagatggagttttttttgagatagagtttcgctctgtcgcccaggctggagtgcagtggtgcggtcttggctcactgcaacctctgccttccaggttcaagcaactctcccgcctcagcctcccaagtaatggattacaggcgcaycaccatgtccggctaattttgtatttttagtagagatggggtttcagcatgttggccaggctggtctcgaactcctgacctcaagtgatctacctgccttggcctcccaaagtgctgggattacaggtgtgagccaccacatctggctgtaacaggatgaactttaataggagtagaagtaaagtcctgctcttagattcctaaagtaccaactttacaggattagggtgggtgataaaagaggcccagaggtcttagttaactgaaatctattaagatcctcagagagagtgaatgtaatcatagcaattgttataagaggggtaatgtggctaattattgttagtattaatgtagctattactgtattactatattattagtgattaatgtaagctataattattactcattagtaattaatgtagtgattattattgataataattgaaagatttaatgatttgaagagctgtcatgtggaaaaggggttagacttactctacaaaattccatttgctctttccataaatagttactatttgttgtaaatgtaaggcactggaggttaacagtctgtcctctccaagagtctataatctattaaagagataattataaatttattacaagttgaacagggacctaagaaagttacattcagagtgcactgagggagaagagattacttctaattaggatggattagagaagatttatttcattttatttttggctggggaggttgggaagacatgtgagctgaaccttgaacactgactttagaaggatttagacattcagatatgatgggaggggaggactttctaggcatagggaacagcatgaaaaaaagccaactggaaaacatgggcatgtatggagatttgcaagtacttagcagagtggtgaaaaagtttagtaaggtgattggggccggattatgaaggatttgagtgctgggtcaaggaatttggtcttcgtttcataggcagtggggcatttttggagatgaaggatttagagttgtactcttggaagattaatctcatagctgtgaaagatcattagaaacaagagactgagtctgggaaaccaattagtaggtctttgtaatgatttttgcaatcaataatgggtagggtggtggtagaatgaaaaagaaaatgttggaaaaagaatcattatgattttacaaccagttaagcaagtggaaggcaaggaaggggtggggaaaatctaagtttctaggctgtatgtttagggcatattattggtgtaccactgatacaaaaaaggaacgggggaaaaatgcaggaaagatgagttcagttggaagtaattgattttggatatcaatgagatagagttgaccttgtgggaggggaatggggaaatgttgctcagggtacggtttcagttagccaggatggataagttctgaagatctattgaatagcatggtgactacagtgaataatgttttgtgtatttgaaaattgctaggagagtggatcttaaatggtctccccacaaaaatgacaagtatgtgaggtgacagatatgttaatgagcttgatttaatcacttcacaaagtatacatgtatctaaactttgcattgtataccataagtataattttttgtcaattaacaaaactgggggacaataaaaaaggaaaaaaatacccagttggaatcctgggattggaacttgattgagaggccagagctggatatacacactgtatccaaagagcggttatagctgagattggaaatggattagattggcaaagatgacagaggaaaattggaagattcaatagagggttgaaaatcatgagagtatagtttcacacaaattagggaagggaaactgtttcaaggagggattagtaaacacttcaaacttgtgcagagaagtttggaggataaggaccgtataaaggccagtggtgggaaagaactatcagckgcccagtgttacttttaaatagcaagaagcgttcatgcattttaacttttccagcttgccctacagtgtaggtgagaaggagtcaaaatagctggcagtaatcctaaaattattctgatgttttcagccataagtttaaatttgatgcagaaaagaatagggaggggtcagtggaagattactaggaactgacagaaatgatcaccatagaaatgtctttatccttattcttgggtttgtctcattctaatgaatagtttataaatgcttcatttgaatctatagaaatgattcaaataatctgtttgtttttgttgctgttgttattcggtgaaaataacttctaaatttgaatttgggactactgacgttttcagtttctgcaaagttactgagcccagattgtccgctgttcttaaaccttataacaatgctgaatggtagttacggataattattttattagtgaggaaattgagactcagggagttaagtcctttggctaaggtcacctaactaattattgctagagcctgaatttgaacatagaatcttatagctcaaaaaacctctattaatggacctgcatcaaagtttgttactatcaagagatcaaaagttgtttgatgggcatggtggttcatgcttgtaatccsaggactttgggaggctgaggtgggaggattgcttgagaccaggagtttgagacctgcctgggtaacacattgagacaccatctatttatgtctgtttcagagatcacttaaagttgtcctcaaggaatttcaaacaatttattagtggctgccatatagcaagcgcttatgttcggtgccagcaatgtggcaggtctatatgacaaaatctattctgctcttatggagtttatgcattctggtatattctctacaggtataaacactgaaaaggcttagcggtttcttcagagatgaagaaaggagatgacgtagaaaaatatatcagtttcacaaactgagggttgctgtgagggacttactaaaaaactgaaagcagtgcaggcctcagctgtrggcagtgagcagtgcttattgcttcatgaactaagcgacttcagctcctttacttccctaaatctttcttatgtactcctttcttctgaaatgttaagatttcccttgacaaaaaaaggacaaatcctagttcccccgcctgctgttcccgaaggtgtattgtgttacacaggctgggacggcagtatccccaaggagttgaggaataaaaagctttgggaatcatttgcttgcactgacctttatttctcagataggtagatgctgttgcaattcattgttacctaccctgccactgggaacattaaaataagtagatgagtgagacattttatccctggattgtcatttgtctgtaatctttaaaaaaatcagtccattggctgggcgtggtggctcacgcctgtaatcctagcattttgggaggccgaggcgggtggatcacgaggtcaggagatcgagaccatcccagctaacacggtgaaaccccgtctctactaaaaatacaaaaaattagcagggcgtggtgacgggcacctgtagtcccagctactcgggaggctgaggcaggggaatggcatgaacccaggaggcggagcttgcagtgagccgagatctcgccactgcaccccagcctgggtgacagagcaagactctgtctaaaaaaaaaaaaaatcagtcccattgtctggtttgacttgtatttcacatctgtgcatatgcttttgaatggaaaacactgatgttaatgaaaagaaggctaaagaatagaattcactaggatacactgtatgttagtcctttttcacactgctgatacagacacacccgagactgggaagaaaaagaggtttaattggacttacagttctgtgtgtggctgtggaggccccagaatcatggcaggaggcgaaaggcacttattacgtggtggcggcaagagaaaatgagagacatgcaaaagcagaaacccctgataaaaccatcagatctcatgagatttattcactaccatgagaacagtattggggaaaccacctccatgattcaaattatctcccactgggtccttcccacaacatgtggaaattatgggagtacgactcaagatgagattgggtggggacacagccaaaccatatcacactgttgtctgatctggcatggcagatcctggtttaactgattaatgtttaagaggtggatcttacaggtctgttctacttgatcagtgacattgaacgccactgatcactcttctttcttgaagctgccttcctccttaatttcaagacagcattttcttctgtctttctagctgttctttctcagtctcttcttctggttcttttccctttgccttacaatattgattctgtctttacccttttttcttactctgaaatactacataacatttctcattcagtcctcaagcttaaaccctgtctgcatcagtgagtctgtattcttcagaatcatctatggagctttttttttttttttaaatagagatttctaggtcccagccaagacctactgaatcagaatttccaggcatgggaccgggcatatatatatatgtaagtctcatcgattattctgaagcatctgcccctgaggaagtaccagtggtaggatactcatggctcccatgtctgttctaacccccacttttttcctgagctccaaacaagtatgtccagctggtttttagacatacctccaaataattatgcccaactggtttttagacatatctctaaacaagtatgtccaactggtttttagacatatctctttgagtttactataggaatcttaagttccaagttccctgtgtggaaaccaaagtccttattttcctcaccaggactaatttttctgttgcctatattgcagtttttggcttttgagtgtcccgtactaaaaatgtgtgagtcacccacatttccttttgttagtttctgaatctcattcctgtgctcattcctggcctcagttcaggccaccatcatatctcccctgaattacatccaatgtcccagttaagcctttgttttccctgttctggtcatttaagtcatttctgattgtaagtcatgttcaggttatgtcagggaaaagagatttgtttattgtaggattatcttctaggtaaagaaaacttctcagcagttacacagtcagaacaggggcagcaactgtaggggtcatgatttaatagggagcattctcactggccactgtggtagtgcatagctacctcatgggctacagccagctcggagatagtgatctcaactcaggagttaatttccaagtcttatgagttgtggcttgagtggtgatagcaaacagtggtgacctgttcttaaagaattacttagagcattcttccctcagaaggagcagtaactggcatgcactgttaagttccttggctcctccttatgccatcaggtctagagtttatcttcctaaacagtaatattgatcatgatattccctgtttaaaatcctttaattctttcttataggaaaacatcaaaactctagcctcattcttccctctttctcccttaacacttctgtgttccagccacattgtacttctcagcctaactatgcatgctatgttctttttattttttgagatggagtttcgctcttgttgcccaggctggagtgcagtggcacgatctccgctcaccgctgccgcaacctccgcctcccgggttcaagcaatactcctgcctcagccttccgagtagctgggattacaggcatgcaccaccatgcccgcctaattttgtatttttagtagagacagggtttttccttgttggtcagactggtctcgaactcccaacctcaggtgatctgcctggctcggcctcccaaactgctggggttacaggygtgagctaccatgcccagccagcatgctatgttctctaaagccttaattctctttcctcttacaggaatatcctttcttcccttctttgcttacttccaggtttaactcacttatcacctctgttagccttttctgactcttctgggcagtagttacttttccttgtgttctcgctgtattttgcaggggcttatattaaaactcttatcacattataatgcatttgtatatttgtctgtctcaccactgggttttgagcttatctaagagagaggccatgtcttttctgtttattcaactttcctctctccccagttcatcagrtatttattaagcgtctactttgtgcccagcattgtgtcattgtagaaaacacagaaatagcgcaaagagattacttggctgttgaatttctttttcttttaggtcgtgatatcattgggcttgcagaaactggctctggaaagacaggcgcctttgctttgcccattctaaacgcactgctggagaccccgcagcgtttgtttgccctagttcttaccccgactcgggagctggcctttcagatctcagagcagtttgaagccctggggtcctctattggagtgcagagtggtaagtgtctgagagggaagggatcctaggttgccatcacaagtgaagaatgagtgtggaggaaggagaatggaggaaagtattgctagcataatttattgacctaaagagctaatgttgtatttgagctttgggaagagtattaattgtaagggaagaacaaatctaagtagaaatctggcattggctttaaaagatgttcagtggastgtrgaaaaaattaaggatctcgtctctatgttctttttttctctgtagctgtgattgtaggtggaattgattcaatgtctcaatctttggcccttgcaaaaaaaccacatataataataggtgagtaactgacaaaggtaaaagacactggcagtgatgaattggagaaaatctaccagtgttggatagaaagactttgagaaacagattttgtaaccctgttaaattttttaatttcttaagttaaatttggtggagagctgtgggrtggggcagataactttatttgtttatttgttttgttttttttttgtcctgttctgaaatgtcactgtttctcctcaacctttcttggtagcaactcctggtcgactgattgaccacttggaaaatacgaaaggtttcaacttgagagctctcaaatacttggtcatggatgaagccgaccgaatactgaatatggattttgagacagaggtgagctctcaatttctttcctcctcttagagcatctcaaggttcctgtttcaaaatttggttcattgcccacttgtttcatgtagaacattgcattagtatcagtttcattcttgatattcttcaaattgcagtttctcagcacccttttatctttagaatatagtctgactctgacttcagaaatgggaaatatcaaaaccggattttcttttccctttcgtttaatttagaccttgacatacaccctgaaatatctttattttctttgatgacccactaatcccagcttacttagttgattaatactttttcttgacttttctcttaaatcagctctggtctactaatttaaactgttcttttctcagaaaggtattttttttaatagtatttggtagggtatcagatagtaaatattcagtaaactttagctgaatcaaattgaattttcgagtcccaaatcttcacagtgatatatttagtttgttagtgtctacctccttcactacctagaggatttgcagctcttccagtctgaatatcatattggcatcttttcctctttgtgctttaggttgacaagatcctcaaagtgattcctcgagatcggaaaacattcctcttctctgccaccatgaccaagaaggtgaaatttgctaggacttttgtttcttctttatgagaattgatacataaagtaaatagtaatamcaataaggaaaaataaattgctttagtccgttttcacactgctataaagaactatctgagactaggtaatttatacagaaaagaggtttaattgactcacagttccacatggctgggaagacctcaggaaacttacaattatggcagaaggtgaaggggaagcaaggcaggaggtgggggcagtgccacactttaaaaccatgagaaattgtgagaactcactatcatgagaaccgcaatggggaaaaccacctctgtgatccaataacctcccaccaggtccctcccgtgacatgtggggattacaattcaacatgagatttgggtgaggacacagagccaaaccatgtcataaataaagagtgtttaggcatcagtgtgctattctggatcttcttccttcaggttcaaaaacttcagcgagcagctctgaagaatcctgtgaaatgtgccgtttcctctaaataccagacagttgaaaaattacagcaatattatatttttattccctctaaattcaaggtaaaatgtttactttgatcattcctgcctctccctcttcttttcaccaaagcatctgaaaatgtgtcaactcttgattagktaagagctgtaatgcagattggcatcctgtctgtttgctttagagtgcatatcgtgcttatattatcaccgataagccagacatgccaggaattcacaacacattaaatcacaatactgaggtcatgatgtaatcatataattccttcccatccccatccttgaggtaatttttcctttgtctgcttattatgtggcttttatttaggatgaagcccctggttttgtgctttgatataaggacttctcctgtttgctgagtacagatctcctgcctgccttaaggctaagtggggaatatgtggttcacagagatgataatgctggttaaggaatgcaaagctggcagctggaggtctggataattgaaaagcgactataggcttagtctttaccttatgtatatgccaggtctccaatcctgtctcccaggttcaatgacatatattgttttgggtttgtaacttaggatacctacctggtttatattctaaatgaattggctggaaactcctttatgatattctgcagcacctgtaataatacccagagaacagctttgctactgcgaaatcttggcttcactgccatccccctccatggacaaatgagtcaggtaaggattcatcatcatcatcagccatgcactggtggcgtgagcgagataaacctcctaacagtaggtttgtacaataaggccatagggcaccgatgcctgtttccataattgttgtaattttatgggctttgaagtgttgctctagatacttactttctcctttcagggtagcgagaggctcccattagaatatttcatatgtacctgtctggtttgcaagctgttgagttgatttattcagccctagtggtaataatgactctggcctctaaaaacattaataaattatttcccagttacctttctatcgtgtcaaactacccttattttgtatcatatatatttttttaattttttgttgcttccatatttctgttttgacctgtgaagccccattcaaaacttagggggaaaaacctttaaaaaatttatgtctgtttgttctcrtgtttgtctattttgtgttttgtattccaaaacataggttaagttttccaacatttctttttcattacctcagagtaagcgcctaggatcccttaataagtttaaggccaaggcccgttccattcttctagcaactgacgttgccagccgaggtttggacatacctcatgtagatgtggttgtcaactttgacattcctacccattccaaggtgagtcctattgctaacttacctttctagtcctaaagtgtatttcttaatggactgtcttctgtctttccttagttacagcagttattttgttcctggttaattaagtatcaaaaaacaagaaagcccttggttagttcattcacatcatcttgcacaggcctgtgtatgtaacattagtacatatgaaagaggtagccaaggagagttattagatgctcatagaaggggctggtgcgccacatactgatcttgtcactgtcatttcttgagaatgacagcttgtagtttttttgaggcggagtctcgctctgagttttctgaggtggagtctgcacccagtctggagtgcagtggcgcaatcttggctcactgcatgctctgcctcctgggttcacgccattctcctgcctcagcctcccgagtagctgggactacaggcgcccgccaccacgcccggctagtatttttagtagagatggggtttcaccgtgttagtcaggacggtcttgatctcctgacctcgtgatctgcccacctcggcctcccaaagtgctgggattacaggcgtgagccaccgtgcccggcctacagcttgtagtgcttagtgtatctcaaggtttctcagccttggcactattaacattttaagctttcgaattccttgttgtgggggttgttctttgagttgaaggattcctagtagcattcctggcctttacccagtagataacagcatcacacagtcttccacctgtgataatcagaaatatttccagacattaccagtgtcscttgaggatggcagaatcacccctggatgagaactgttgtgtctcttgtctttgtatttaactgctgtagacaagatgctgtctcatttgattttcataacaactctgtaatatgggcatgtatttctattcctgttcactagatagaaaccaaggttcagagaggttatgtgatttgcaggtaattgtgtaactggcagatgggaaggaycagagctgtaatccagctctgcctcgagatccagtgctgttttttaaaataccatgcagcctgcgaccatgtagatatgctttgtagatttatctgtctgtgaaagaagggaaagcattggatcaattttgtgctgcaaggagaacaaaaaagatgaagtagatttgtctcaacaaattgccccggccatttattttctccatgttacgaaatgaatctaytttctttcaaaggttttgcagcaggactttgcatatgtagttttttttaaacttataatccatataacttgaatttatttaccctttttgttttaggattacatccatcgagtaggtcgaacagctagagctgggcgctccggaaaggctattacttttgtcacacagtaagtaaatcagctttagggccgagcaatrtrgagaaaagagcagaactttcaagccactggctgagaacctgacactaccatttactacactaatcactttcatactgaaaaccaggatgaaggagttgaaagatgggaataataatacctatctagcagggttttggtgaaaattggagattatatatgtaaaagatctagtatagtatttggcatgtagaatggtacctagagctggagagcaattgcctttgtgtcaactcagaaagtattagaataactatttccaattgttttttttaaagaaacaaatttttatgtacccaaggctgttctgtgaataaataccttgagggattttctccctccctcctttcctttttttttttgtatttgtctcgctctgtcgcctaggctggagtgcagtggtgcagtcttggctaagtgcaccttccaccccctgggctcaagcaatcctcctacctcaccatagcttcccaagtagctgggaccacaggtgcatgccagcacacctggctttttaaaaaatatttttagtagagatagggttttgtcatgttggccaggctggtcttgaactcctgagctcaagcgatccacctgccttagcctctcatagtgctgggattacaggcacaagccacctgcctggccgatttttgtttctttttctttttttaagcagcaaggtttcactctgttgaccaggctggagtgcagtgacttgatcatagctcactgcagcttcaaactcctgggctcaagtagtcctcatacctcagtctcctgaatggctgggattacaggcacatgccaccacggttggctaatttttaattttttatagagatggcatctcactgtgttgtccaggctggtctggaactcctggtctcaagtgattctcctgctttgacctcccaaagcgttgggattacaggtgcaagccaccatgcctggcctcccttgagtgattttctaatgggctatgcacagagattgcacttaacccatatttagaaaagaaataatatgttcaatattgtttaaacctatggttcctattgcgttgtatcatataataatagtttgggaatggacaggcatttgcgttaccaggcaaccagagctgtgcagttttccttcctcaggtatgatgtggaactcttccagcgcatagaacacttaattgggaagaaactaccaggttttccaacacaggatgatgaggttatgatgctgacagaacgcgtcgctgaagcccaaaggtttgcccgaatggtatgcatctttctttwctcaccagtgtctgtgcaaacaatgttaactgtgtgccactttattatattaaccctcatactaaactgcagaagctgggtattattttattccaaatttaagacgagcaaactaaggtkcagagatggtaggtaatttgcattagaccatacaaccaratggttgaatcaaggtttggcctcattctgacattcacacattcacagcacctgttcatgtgtcgcacgtggtgagatagttcatcagacttgaggtcagaagatccagctgtgaactgtgtgagcttgggaaatttgcctgatttctcagaatcagaatcagtttctcacctgtaaattgggaataacacttgcctgaataccttatggggttttatgagcaccagagaagccaatataaactacatagttactagtaggggttgatcatacctaatccaaaaatttgaaatccaaaaccaagatccaaaacttttcttttttttttttttttttttttttgagatggagttttgctcttgttgcccaggctggagcgaatggtgcaatctcggctcaccacaacctccgcctcccgggttcaagcgattctcctgcctcagcctcccgattacaggcatgtgccaccatgcccagctaattttgtatttttagtagagatggggtttctccattttggtcaggcgaacttctgacctcaggtaatccccccgcctcggcctcccaaagtgctgggattacaggcttgagccattgtgcccagcaatccaaaattttttgagtgcgaaaaggattgccgcaagtggaaaattccatgcctgacctcgtgtgacaggttgctatcaagacacagtcaaaatgtttttaatgcacaaaaatattaaaaatatgatgtaaaattaccttcagacaattaaaaatattgtgtaaaattaccttcatatataaggtatatatgaaacaagtgaattttgtgtttagagttgagccccatccccaagatagctcatatgtatctgcaaatattctagaattagaaaaaatctgaagtccgaaacactgctggtcccaagcatttcagataagggatrctcaccctgtaagtagtagtaacagtaatagtggtgatgagaagattctagaggaaaaccattggaagtgctgcctgctttctggagttctggtctgagggatggagaaactttgcccatagtttgtttttggagtagctgaggtgcacatttggtttttattctgtccacatgggatttttttgtttgtaaaagtattacatgtgcattgggaaaaaaattcaaaaaatacagaaaggattaaagtagtaagtgaaaaggtaaaccattccccacagaaaaccattgataacatttggctatttttctttctttagccataattagactttatctaattatataggattaacatttttctgtttcaacaaatacagattcatgtgatcgtttcttaatggctacaaagaattccatcatgtgtatgaaatacttacattcatggatgcttacgcttttttccagtttctttctactttggtacagtgttaaacaccctactttgtacagctttgcatatttacttccttagaataaattcctagaagtacacttgttgggccaagggacatacacagttaaaatttgaattcatacagaatgccaaattgtcccccgccccaagaaaagctatagcagattgcactataaatgagagtatatgtgaatttttctacaccttggccaatactggggattacccttctcttaagtctttgccaatctgccatgtgaaaataaaaccttactttagtgttcacgttttgattactaataaggttaacatctttgyatatttggagttgggtcttgttcctttgctaatgtcaggcatcagcaagttacttgatacttgatcttaaggagaggggactagaatgagtaaccttcagtgccagtaattcattttcaatcccatcctctctttttttcttgcaggagttaagggagcatggagaaaagaagaaacgctcgcgagaggatgctggagataatgatgacacagagggtgctattggtgtcaggaacaaggtggctggaggaaaaatgaagaagcggaaaggccgttaatcacttttatgaaggctcgagttctgctgttctgtaaaagagaattggagaatgaaacctgctccaacagagatcatgagactgaaattggtcagaattgtgtccagaatgtgctcagctaattcagtattcttccccattctgggttggagtttactgcagagtaattcttacagtgctgatgtcaagactgttactgttcttcgactttgattccttgctcatgacatgagtagggtgtgctcttctgtcacttcacacagaccttttgccttttttagctgcaagtcaaggactaggttgatgatgcccatgacctgtaattgtaaagaagcttggacatctgcaaatgatatttaaaccatcttggcttgtgctttattcaaactaatgtgaaacaataaatttaaatattatttttaaaagattcaaactccttaaagaccttggtgttaaagggccttatagatttaagtaagatcttgttaataggtaagaacctgacagtgttgattacatggcaaattcattggttgtcctaattaagataaatatttattacttaaaaaaatcaacaaggaaacgagatgatggatggctttgaaagggaagccccagccgggtgtggtggctcacgcctgtaatcccagcactttgggaggccaagatgggcagatcaggaggtcaggagattgagaccatccttggtaacaccgtgaaaccctgtctctactaaaaatacacacacaaaaaaaacattagcctggcgtggtggcgggcgcctgtagtcccagctactcgggaggctgaggcaggggaatggtgtgaacccgggaggcagagcttgcagtgaacctagatcgcgccattgcacactccagcctgggcaacagcgagactctgtctcaaaaaaaaagagaagttctacttaaaaaaggaggttgtgtttttcttgcagatggagcaaagtctatcagtaagacagcagaggtctttaaaatccctaaatagatttacttccttcattccctcaattaagcaggtggttaggaagactggtttctcacatagactcttttttttttttttttgagataatcttgctctgtcatccagggtggagtgcggtggtatgacctcagctcagtgcagccttgaccttccaggctcaagtgatctcccacctcagcctcctgagtagctgggactacaggcacatgccatcacgcctggctaatttttatattttttgtagagatgggatcttggcttgttacccagactggccttgaactcctgagctcaagagatccatctgcctcggcctcccaaagtgttgggattacaggtgtgagccactgcacccggcctctttttttttttttttttttttttttttgagatggagtcttgctctgttgccaggctggagtgcagtggcgcagtcttggctcactgcaacctctgactccctggttcaagcgattctcctgcctcagcctcccgagtagctgggattacaggcactcaccatcatgcccagctaatttttgtatttttgtagagatggggttttgacatgttacccagactggccttgaactcctgagctcaagagatccatccacctcagcctcccaaagtgttgggattacaggtgtaagccactgtacctggcctcttttttttgagacagagtcttgctctgttgccaggctggagtgcagtggtgcgacctcagctcgctgcaacctccaactccctggttcaaacgattctcctgcctcaacctcccaagtagctgggattacaggcacgcaccaccatgcccagctaatttttgtatttttagtagagacagggtttcatcatgttggccaggatggtcttgaactcccaagctcaggtgatccacctgtctcggcctcccaaagtgctgggattacaggtgtacgctgctgcacccggccactctgcctcttatgtagattcttttccccaggtgacaagaataaaatcaatatgcctcagaaatgtataattctgagacctaatttcatccacttgtcattagtgcccactggccactcatcttttttgtcctcatctattaggcgatgcaggagatgtagagctggggcctcagctccaggggaggaggtaggcattggcactctaggggctggttgttgggggagggttactgaaattcagaaacaactttgaaattcccaatcacaaacagtctcatgttctgaggatgtttacacgtagaagatgcctaatactttttgttgtctataacagttttattagaagagtgtgtctggagtggcagaaccaaggtaaagagcgtctaaataatcactttgatggattaagattggaatgaagtttggctgaaaagaaactttccttatccatctaagtcagagtatctggtgaggagtaaagagtaggaggcaggctgggcgtggtggctgacgcctgtaatcccagccctttgggaggctgaggagggcagatcacgaggttagatcgagaccatcctggctaaaacggtgaaaccctgtctctactaaaaatacaaaaaattagccgggcgtggtggcgggcgcctgtagccccagctactcgggaggctgaggcaggagaatggcgtgaacccgggaggcggagcttgcagtgagccgagatcgcgccactgcactccagcctgggcgacagagagagactccgtctcgaaaaaaaaagagtacaaggcaataaaattctctgtgatggtccggggtggactgttcactgcaggaagatctttgcaaatatcggggcggggggttttctaccacagatgcattttaaaatgggcacctgtgggcaaggcattagcaatgaattgaaatacagcgcataacttactttttgttttgtttgctctgaatttcattgctgcttattatggtacctttgtgtgaaggataatttagaggaggtaggagatacaagggaaaggaaaggagaaaggggtaccagaatcgggaggcaaatggttgagcrgggccgtacctgttcctatttgttatgagttgtgcctcccacttggggctaattctccattaacattgtgttttctcgatgggactctccagggtggcttaggatagcagctctcttcgagtcagcccatggatgctgtttcagctcagtggaggacttcagaagcaagctgaaatggaattggtgtaccagtagggggtaagaaggagagattggaatcatcctcaaggatgtctgaactttccaaataggcagtggtctctggcctgggtttgtggaccactgaggaatatgcatatttttggggagactaaaaaggttaaaaaccactactcgaaagcttaactgccatctctaatgtatatgcataattatgctttgctaggatgggaagaaaggacactagtgaaagaaatgtggacgggtgtgtcttcaggtatattaacaggtccagagcatggagtccccagcagaaaatgcacagatgccattgcaaaaggcaggaggcgcagaaatgaacgtgatccaccagtaagtaaaaacaagacatgtaggtttgctctattagtcagtcattcctgtgctctcctgtcctctaaggtgagataggtcgtgctgctgatacccttacaraagtacgttttaatgtcctaggactactgaaacaaagtaccaggaactgggtgactttcaataacaactttattctctcatggtcctggattttaagatgttcaaaattaaggtgtgggcagggccatgttctctctgacacctttagagaagagtccttcctggcttcttagccagcattgccccttggttgcctgcagtccttggtgtttcttggctgtagcaacatgactccgatccctgtctccatccacacatggccttctgccccatatatctttgtgtcttcacaaggccttcttagaaggatactagttgttggatttagggtgcaccctaatccaccctggcctcatcttaactaattacatctgcgaggatcctatttccaaataaggtcacctgaggttctgggttgatatggtttggctgtgtccccaccccaatctcatcttgaattgtactctcagaattcccacgtgttgtgggagggacccggtgggaggtaattgaatcctggaggcggtttcccccatactgttctcatggtagtgaattagtctcacaagatctgatggttttataaggggtttccccttttgcttggctctcattctctcttccctgccaccgtgtaagacgtgcctttcaccttacaccatgattgtgaggcctccccagccacgtggaactgtgaatccattaaacctctttttctttgtaaattacccagtctcaggtatgtctttatcagcagcatgaaaacagattaatacatgggtagacatgacttttcgtgggatactattcagcccagtacaaggcatctttgtggactctgctacattctgcggggtttaaggttgcaattacggaataaaatggtggggagaactagttacaaagtgtggagaagacaggagatgggtcttcagaagtatttggttaggtattaataggagtatagaagaacgttaaaatgtcattctcttaaatacatgtaaattgcctttgcagtcaagataccaaaagctctagattaggagtggggaacgaggtccctgacccctctgctattcccttcttggtacaactccttagttctgcattcctgatttaagaaactgtgagcttcgccggccgggcgcggtggctcacgcctctaatcccagcactttgggaggccgaggcgggcggatcacaaggtcaggagattgagaccatcctggctaacacggtgaaaccctgtctctactaaaaatacaaaaaaattagccaggcgtgttggcgggcgcctgtagtcccagctgctggggaggctgaggcaggagaatggcgtgaacccggaaggcagagcttgcggtaagccaagatcgcaccactgcactccagcgtgggcgacagagcgagactccatctcaaaaaaaaaaaaaaagaaactgtgagcttcaaaacaatcttctcccaccctaattgtaaacagatacatctaacttttatgacttaataaagggagtatcttggaatagtcatatgatatcagcccagagaaaatgtcttcttatttctcatctgaattataaaactgatttatatagtattcattgtatgcagttgcagtaacaatggcttcatggtactggctagcctagttttacttcctctgtacagagctgagtgagggtgagaatgaggaaaacacctctctatcttatgaaggggtcctaggatcctagtgagagggtttcagttggataggctatttcaggcttaaagcaggcccagaattccagggaaccatgaagcaggttctctgagggcactctgaggggattgtagttgctaagaggggcctagaccaactagatcatgattattctttctcagtctctcaaaaaatgcaatgaatatcccagaacttggctggctctttaaggacatcttgcttacagacagagtgttttccaagtagctttctgcctgcagaggcatccacaaacctaaattggagactttatctaccttgggtccctcaaaaccctgggaaataggaccagaaagaaccacaggctgtggtgttggttacagaaaatgaaaggatccaagttatcaaaagtgggtaacaaagcaacatcaagaaactgtgtccttaaaactaagagaatatacaagacattmtaatccacatggttcttagggtgaaatctagcctctgggcagataagaaatcagggtgtgagtcacccctctttagctggaatgacaagagactcagaccataactctagagattgaagggttacccacacccgcattccttttcatgcctcacctatcccaggtatgcactaaaactaccgctaaaaataactgcagaaacttgaagtctgggaaatagcactgaacagtctcacctgaagtgaagagctgattggtgccaagtggaaaggagacaggaagaaaatgggctcctctggaaccatgcagtctctaggaggtgggccccaaggtctgctcagagtcttggagcttttgtttgctcgtagccatccatccccttataccatccaaacacaaaggatgtctcctgtcactgtcacccttcaatcatctgccagtgccgtcaaagaggccggaaggagcaggaggaattgggaaaggaactggtggggaaagtgtaagtcattggactgttcactgttgctgtgtgaccttgtgggagttactaaacctctctg

SEQ ID NO: 95362 - DNA, 74665 bp, Homo sapiens
tatactcactctttgttgagtatcccacaattaccattgttcctggcccagacttccatccggcctcccacattattctggataccacacctgacccccatgactgtctctctttgatccacccgatattcactccatttgcccatgtttccttctttcctgttcctcaccctgatcacacttggtttactgatggcagttccaccaggcctaatcgccactcaccagcaaaggcaggctatgctatagtatcttccacatctatcattgaggctactgatcttccccgctccactacctctcagcaagctgaactcattgtcttaacttgagctctcactcttgcaaagggactacgcatcaatatttatactgactctaaatatgccttccatatcctgcaccaccatgctgttacataggcagaaaggtttcctcgctacgcaaaggtcctccatcattaatgcctctttaataaaaactcttctcaaggctgctttacttccaaaggaaggtacagaggatcagaagggcagcagggggcatgggcaatgctggtgatagatggcctagatgaagtgaaaaatatgatagaaagctcttatcttccagggagaagctgtgacacaaggagcaaatgggtgaagcagcactcctttggaatgcttcccacattttcaggtcactagaagtagtcttgagagtcactagttacctaggcaggttgcccatcatcgaagtctttatacacaggagaggctttatgtctagtgggcagttggatctgctggatcagagcctggaccacaaaggtgcctgctacccctgagcttttttcctggaagtagttgtcccacactcttacctatcttgaaatgctaaccacctttctttgaaaagcctaggggtcaggacataggggtaaagtgtacagcctagatgactcacacccttgctatgccccagtgtaggatcaagtggctttcttatgccaggagctgatcctctatgggccacacacacacacagcctgcctcattatagtacaggcagagctgcttatactgataggcaagatgttggaaaaaacagcagctgcttccctgccaggtaagagacaagaaagaaatatattccatttttcttaaggactagagcacagaatctccatatacaactgcacttagaacaaggagcagaacaccctggagggagtccctgtgaatttcttgggctggcagaagcagaaagacatcaggccaggggttttttatgtttgggcaccagtagctctgtgctcatctctgttgtttgacgacatgagttcctcaccatttcactggtgccctatagtgatgcattgcctagaggtgagaaatggagcaaggcagtggcatccatctcattagagcagataactaccctcgtacctctccaatccatcctccacccaggagccagaaagatgttttaaaacgcaatatgatcctatcattcttcagtgatttcccagagctcaaaagtgtccataagacctagaaggcactgcacaatctggctcttacaccacctgtacagttcactctcccgctattcctcccatcatcaagtcacattggcccattctgctctttcccgtttcacagcctattgtccccttttctggaaagctcttctctctttgcctggctaatgcatactcatccctcaggtcttcctgagaaaggtttttctgacttctcaggccatattacaccccctgttttatcctctgattacatggagttattttccttcattgcactaacaccattctagttatataaccatgtgtgtgattgtgtgattactgtcttagtcccacaagactataaacttcatgagagcagacaatgtacctgttttgtttactactttattcccagtgccaagtacagtacttgacatagtatgtgctcaacacattctcttggaaggaagtcaaagaaggaggaagagtaggagggaaggaggaagggaagaggaaaggatgaggaaggaagcagggaggtaggcagaagaggaggaatggaggccttattggtgctgggaaaatattagatttcctttctctagtaggaaagctgaaagggttaagagtggccacttaactgagccacacagaccccaggatttaaaggcagaagttgaacatcagaattttgtccatgagacaatgctgagttcaaaccacagaagcaggtccaaatgagtcatcagagcaaagggagtctgaggtgagttttaggtacaccagagcaaaaggagaatgaaaaaagcaggaaagatgagggcaaataagaaataatctgtacaaattcaataaacaataggaaaaaaccatcagctgggtttatttcttgctgctttctatgcaggggcaaaggaagtctgattaaagggatgtagaccacaaacagttgcaaaaggaagaaaagaaaaaaggaaagaaaagaaaaagaaaggaaggaagaaagaaggaagggagggagggaggaaggaaggaaggaaggaaaagaaaagctggctctgagcagtcagctggctgttctcttccctacatctctatggcatcttattttgaaccaaagttattttgaaccctacatttctatggcatcttattttgaaccaattcaacattttgaaccaaaattattaagttcttaacttacacattgttccatattatctcccgtccttaatcataagctcctagggaacagggaaagtgtctatttcattttctcatttcctacagagtctagcccaatgatttcaaatagtgagtgctcaaaaatatggctaaatactgatatatatttcataagtgctaggagttgttactttaatgaaattatcaactttctgaggaaaaccttttagtcctgagttccttctgaaaatataagagagttggggtaaataatcgctaaggcatttccaaagtgtaagctattggggcaatggcaaggatatgccttatacatatgttttataatctatcatttccagtatattattgggcaaatagcgggaactcaataaaggtttccagtgaattgactccaatatagatgtatttaagttaagacgaaatacatagatgtgtttctgaagcttcatataaattgcctgtgaattgaacatttaaaaatacatgagaaatctattattaaatggtttcctaagatgaaaattttttacaatatttagaatcattttgtaaaataataactcatttagtcaactttcttaagtttcacatatttatatatcaaggatgctgacaataggataaaccagattagtagtttacagttatgagccaattgatttaatattgaccaaattaagttattctgcatagagatgtgtctgtttccctacaatttcccagatgatccatccccacctctctcccttcttcctttccctccccatccctctttctctttctctctctctttctctctctctctgtttcacacacacacagactttcccccttgggtcttatatttcagctttagtaggtctacgctgatttataatactatgcatacaactttcactttcccatattcctttgaacatttctcactgttgacccacatgcctcaccagttttgaaaacaggtatgcttcccacggtgtctggatcatccatagtatctagactcttcaagatgtctgtctttggtggtggctttggtatgagcatgctggaagtagaagcttccccagctgagaaacaatagctttaggtcaccctcaaggtgggattctgggaagggagtgttccttactccctttcattttccctatgactctgagctgtccagggctttctttccaaaaatccagtgaaaaattagagacgcgatgtacctcaaaaagattctattcccttgacatacatgggggaaagcagaacatataactagatactttgaggtggggtggatgagaaggccatttttccttagggcttgatttatctgatagttttggagtgtcagttataatgacaataaagattcccacagatgagcccagactggtcgaagtaattcacataacaacacaataatgacaagctcatgggataaattttgttcccccctcaactctcaagtcctccttatctgcctggcatctatcacaacaaaccaggtcaaaatcttacctggaaaatacacgactcagtgatcaatattttatcaaagtgagaatgtgataaacaaggtcagttgacccctaaaatccgtatttacactagaaagcctcacatcctgtatttagacttcttgtgagagaacccattctctgtcactggagtatgatcaggagacaagggtacctgttctctgaggagtcctgactaactggcgagactgaatcacacacatgaaaaatttcagatgaaactcgtctttatgcatggctgcctcctagaaatagagacagagtttaatccaaacgaacagagctgtgaaataagatgtcagtgactgacatggaccagctacactcatgactacttggccttaggacttgacaatataatataaaagtatcagcacatgaggcaatacaaataatctactttgatgtatttgacaggggaggaaaccctgaactcagcaagctgctgagagtatcagaaaggctgggggcctccagaaactgcccttctttaagtctgagctcagactgtgcctgtggctgtgatctgggtgtaaaggacctattaagggggcatttctctaagacttctacagggcctgggtccagaggcctgccaagctgaggtgcttgacaaaaagcctgaatgaacaaacatatttcttcccattatgttctcttagaaagtatggcagattccaggttaatcaatgtgtcccaggaacaacaaagcccttcaaaggtcacaggtgattcctgggtccttctctatctctacccagaaaagcagatctctagtgggctcccaaaagctttcctcacagctctgcctgtttcaaattcctccagagttctggaaggttctacatcttgccagagtctagcctaatccgtcctcaagttgcttgtttgtttgtttgtttgcttgctgaatggtcaatcaagtatgaggtggtgcagagtacaggattgcaagttaagaaacttgtttcctagtcctagatgggccgtgcacttaaaacctttgggaaatcacttcacttctctgaacctggtaagactaaagtatctccaataacctctacaagcactaacgttctgtgattctcaataaaacacgagatagcctgagatcgatttagatctcaggtccctatctgtcgggggaagccacaggtttccgcagatttagggccaccgcgaaaagctgccatggaaactggaacgcaagcaagcaaaactcgccgggcggaaccagaaggcggcgggtaagggagcagagggaacagagaaaagcataggacgaagggctcactaacagtattccgagtacgagaaagcgaaaaagcccagactgaaaagggtactgagaaattacgactagtcttaaatgctcccttcgcttctcgggcctcgccacaccgcgcaggcgccccactggtccttaactctgttctttgacctcctgccccagccccctcctcttcagccacctagcgactcttccggtgctgtgaaggcggttccggttcgcggcggttcccgggttttgcgttccgcgcccggccggaaaccccttcgcatggcagccggttccggttcggtgagtggcggcgggaagctgggggaggggtgaggatggagggagcctggtccaggagactgtgtcggacccggtcagccggcccgggctggactgggcggaagcggggagcactgtggggccggcgccttttcctctgccccgccccctgggaccacctcccctcccccctgctgtccggtggccgcgctgtggccgccggtggccgttaggctacctgaggccgttccttctggtctctctctcctgggccgcggagagaccgtctccctgccgttacagcaggccccatcccagcgcccagccgtacttggggaaaggccggttgcgattccggggctttcccgccagagctgggtsttctctggggagagctgttttcaccgggaagctcggctttctgtggtacyggcttcatctcccgccttccttgagacccgagtgatatttcttgactacttctgcgtctcacgtaaacatttctccaactctcctactctgtggtatctccctgagatgtgatatcgctagtgccaccatcagaaagaaacgtctggaccctcctgctcaggttatgaaaatccccttaactgccacaatttgcttacctggcwcatcgcctcctggtaattcccttgaaccgtctctttcttggtgtaccctaacgtgatctctggatmtatgcctcgtttctctttccttgagcttgrtgatttctgtttatcggtgcctgtgcagtatttccactatcttgttagcagtaacttgcttctttatcactttcaagtcagccttgttaaagtcattttacttcatatttggtacacttattatatttggagtggtggtgattcttgtaatattcatataaagccttttatctactaccaactatttgactgagggtctttgttataattggttattctggatgtattagatctcatcatctcctaaatctttattcttcataaaaataatttgtgttaaggactcatgttgaaatacagattaccctgactttgaaattacagttaaagcgcaactttaagcatctctataagcatgatcccttaacctacttccagtttacactctaccaccctttatttttcctctctagtcccttttaggaaggcttattcatttttaactgacttcaattaattatcccaactgcaaagatggtcttcatgtcactcatctaatgagttgtctagagggagtggatgggtacaaaaacaggttctgctacttctggctaagggaatgcagttgttgacttgcattgcggctttggaactcttgtccttttcttcccaacttctacatcttctatcagttgtaccagctctactgtcttgcggtacstgtttatggatmtggctttccctactrgacagtgagctgctcagtggcagggaccctttcttaatgcacgtagtcggtgcacagtaaatgaatgtgtatgaaagaatttgaacacttagggtttacggcgttagagtgttaaggtatttaaggtgttagagtgattgggagagattacatgtaaaaatagaaggaaagaacctcaaacacatgacgatatagtacaaactattgtacacataattgtttttcagaacttggaaaagggtgatttcacatggttgctttcacacccttcttatatcataaattgttctaaccacatcttggtcctggataaagctaacattgcgtctctctctctctctctctctctctctctctctatatatatttttttcttctttttttagacagagtctcgctctgtcacccaggctggagtgcaatggcttggtcttgtctcactgcaacctccgcctcccgggttcaagcgattctcctgcctcagcctcccgagtagctgggattatgggtgcctgccaccatacctggctaatttttgtatttttcgtagagacagggtttcaccatgttagccaggccggtcttgaactgctgacctcgtgatctgcccacctcggcctcccaaagttctgggattacaggtgtgagccaccgtgcccagcctcaatatatattttctagtaacttccttgcagccctagacattgtctttcataatcccctttttgcatatatgtaaggttataagtgtttcaccgcagttgtcaagactgtgatcttttttgttctttcaggtttcccattatcttgtgttccactactaacctgacttcatctgaatgtctgtaacagcttatgttctttcagtaaattacatgaccagtgtatactaggaaatgaattattagaatcatttttttaaaaagaaaacatttttacagttgcttgaatttggtggcatcagaggttccagatccaacattttcatggagaatcttggggtaaaatattccttctcccaatgtaactgcaagtggctaaaagaatgtaccataagcacactgaagtagctggatgtatttgtagtaaaatataaatgtggggttttaattatttaaaattataaatcagtgtggattccccagggttagtgagggattacttttaaattgccagtgtgtattaatctttgaggttgtgttaaaggatttgaagttgtataatgtttgaaatgtgcatttgccctggagtcaggatacatggattcttgtcttctttttgccccatctgtgtgatttcagggaagtcacttaacctctctggatataatcggtaaaattctttgaatttctagcttccttttctcttcacatctatcccaacaaaatgcaaggaaattgacatgggattattctgttgggcaccaagcttttaagttggcattcttcttaataataattttaaaaaggctagtaatgacaattatgaagcaactttaaaatgtcaaaaaagtgttgctaatatattagttgataagattttttcccccttaatctggaacccaagggagtctactctattaaagaagaaagaaggggaaagaataacctgaagaatttttagtaaagaagccttttaagttgagcatttggaaatatatttgaagcataaatctaaggcttaaattctttagggatccttcctggcaagactaggtaatcagataattactctgcttagtctatagctatgccaagaaaacttttttttttttttttttttgagacggagtctcgccctgtcgcccaggctggagtgcagtggccagtggcgtggtctcgtacgccaagaaaactttaagctgccttcctttgtgtgactttcattattgtgaccacaaagaatgcctattatcatcatccagcctcatgaatacattgaagccctagtattgctatgtggttgatgaagtgcttaatattttttaaaaatatggttataagattataaatatatataggtgtgactattaccatccctagtagcctcctcctcttggaaatctaccaagaccatatgtgccgaggatatgtttattaacctagttccaagcagtttggttgtgtttttgtgtttggtttttttttttttttttttttttgagacagagtcttgctctgtcgcccagctggagtgcagtggcatgatctcggcttactgcaacctctgcttcctgggttcaagcaattcttctgtctcagcctcctgaatagctgggattacaggcacgtatcaccacacctggctaattgttgtatttttagtagagatgggttttcaccatgttggccaggctggcctccaagtcttgacctccttggccaagtgatctgccctcctcggcctcccaaagtgttgggattacaggcgtgagccactgcacccggccagcagtttggtttttaacatctttattttgtggaaaaagtggatacatcagaggagacagtaatttttatataggcaaaggggctttggtttgtagcagtttgattgatgatgttgggggaagtactttgtattactccagagtagttcttgattgtcattagagtatcaggctactgagtaagacatggaagaaaagtcttaataggaccatcacaaagtctgtcacttgtttatgaagtgatttagcatgaggtaatagaacaatggattgggaagaatttctaggttataatttcggtgtagttgctaacattatgactttatgcaaaccactcagtctcttaagggttggcgctcccaatttgcttcttgctttaatattctgtgattctgtgcgtagtctgtaattgctgtttaatgtagtacaggttgcagaaatgtttggaagtacctcaagctagttttagtttttactcttttcccatcaagtcaactctttaccaccttagatttttctccactaagaacacaaacaaatgtcacttctagtggctgcaccttctaaaattaagtgaagtaggtgtttcagtatgtaatttttctgttttgtgtcttcttttataggactttgtatctttgctaaagtcagtgatgtgaaaagacttgaaatgggtaagactaactagctgttgaatccttttagctactttcattggttaagctgtagtgaaagaatgggttttcctaacattttcagtatttgtatctttgtgcttaataataattttaagagaaattttaatcctaattatgtaatactatataccaaacaaaattattattattgctatttttgaaacgtagtcttgctctgtcacccaggctggagtgcagtagcacaatctcagctcactgcaacctctgtctcctgggttcaagcaattctcctgcctcagcctcccaagtagctgggattacaggcatgtgccaccacgtccggctgattttcgtatttttagtagagacggggtttcgccatgttggccaggctggtctcaaacccctgacctcaggtgatcggcccacctcagcctctcaaagtgctgggattacaggcatgagccaccgcacccagcccacataattatcttttggttagaacattgtttatatgctcatttaggagtattatctcattgattgtattgaaaaagttaagtataccctagcaaacatttactgtgtactagaccctgttctaagtatttaaaatatattggttcatttaatccttataaccatcttacaagggtacctaatagtacctaccaagtaggttactgttgttatccctattatatcacaaggaaactgagacacagaagttaagaagctcgcctagagtcatgtactataactggctgagccaggatttaaacctaggcactctggttctagagttttctagagttctcgttctttttttttttttctcttttttcttttgagacggagtctcgctctgtcacccaggctggagtgtagtggtatgatctcagctcactgcaacctctgcctcctgggttcaagcaatccccctgtctcagcctcccaggtagctgggattacaaacatgcgtgcgccgccaagtccggctaatttttgtattttcggtagagatggggtttcgccatgttggccaggctggtcttgaactcctgacctcacgtgatccgcctgccttggcctcccacagtgctgagattacaggggtgagccactgcgcccagccaagagttcttgttccttagtactatgttatactacttctaaatgataaataatttgattaatgtaaatattctatttcatttagctagtgttactgagaattgtggttaggacatttttcactatttcatttgtagtactttatgtctgttaaggggatcaatataaggtcaggactagtagctaatttaggaataagttgaaaaatctatacacttaggtcttataacatcccatatgttccttttacattcacattagctttctctctattctgtgttttccttttccttagtctgccttctccttccctgttcatttgtttccattttctctcattgctgatagcagtgtaagtcgttgaattctgttacgtttattgcttctattctagctcttctrtagtaacaaaggtatcaaaaatggttctgaagtaaaattctgccataatattatagttattgagctgatacctgttaagagcaatatgaataaaattatgcttttaaaaaaatgttcaggcagattattattattattagagacagggtctcactctcttgcctaggctggagtgcagtggtgttatcttggctcactccatcctctgccttgggttcaagcgattctcatgcttcagcctccaagtagctaggattacaggcatgtgccactatgcctggtgtatttttagtagagatggggttttgccatgttagccaggctggtctcaaactcctggcctcaagtaagtgatccgcccacctcagcctcccagagtgctgggatyacaggtgtgagccaccacacctggcaggtggattacttcttaaagcacttctttgtgttaaaacaggaaatgaaccagtgttaacagtgtgtgttactgaatggtgaattttttcccccaatttttttatatttaaaattttttctatagttaaaatatttaaaaagtttcttttgggagcatttttgttttttgtttgtgtttttctttgttgttgttgttgttgttttctgagacagggtctcactctgtcrcccaggctggagtgcagtgactctgtcatggctcactgcagccttgacctccccgggctcagagtatccttccaggtcggcctcctgagtagctgggactacaggcatgcaccaccatgtctggctaatgttttgttttgttttttaatagagacaagattttgccttatttcccaggctggtctcgaactcctgggctcaagccattcgtctgcctcagcctcccaaagtgctagtattacaggtgtgagccaccttgcctggtctcgttatttttaaagctttaaattaagctgtttttatatgtgtacaagttttgaactgtttggtagatggcctcaattaattccaaatgagccaatttctgcacatggacctcttttgacaatgacaatatgagatttttgccattggttagctatgaaagagggattttattttattgcagagttgttcttcaagttcttttttgtctttttttattattattgttagacatagggtctccctctgtcccccaggctggagtgcagtggtgtgatgatagctcactgtaaatttgaactcatgggctcaaaacagtcctcctgcctcagcttcccaagtggttgaggctacagacacgtgccacattggctggctaactttttttttttttttttgagatggagttttgctcttgttgcccaggctggagtgcagtggcacgatcttggcccactgcaacctctgcctcccagggtcaagcaattctcctgcctcagcctcccgagtagctgggattacaggtacccgccaccatgcctggctaatttttgtatttctggtagagacagggtttcaccatgttggccaggctggtcttgaactcctgaccccgtgatccacccgcctcaacctcccaaagtgctgggattacaggtgtgagccaccacacctgacctgctggctaatttttaaatttttttgtagagacagggtcttactatgttgcctagatagatcttgaacttttggcctcaaaaaaatcctcctgcctcagcctctcagagtgctgggattacaggcatgagacaccatgcctgggtgggaattgtttttattaggtgaaaagattggttcataggaaaaacgttattgaagaattatgtgacttgaactaatccagactgtctccccagatgatattgctgataggatgaggatggatgctggagaagtgactttagtgaaccacaactccgtattcaaaacccacctcctgccacaaacaggttttccagaggaccagctttcgctttctgaccagcaggttaggagcaattttcttcctttaattaattaattatttgggctcatcataagttttcatcttatgtagtttaaatgccacactcaaaaatacaagcatagctataaactttttagaatcagtaattttagtgtttggaattctgctctrtatattaaaattaagacaaggacgttaagacaaaataggctatgtatgagttctttgagaacagtacgttttagaaaactcattgttcctctgaattttaaaattacttatatgcagatcagtgttcttttaaactagcacctaaaattgctgagcattaaatgggggagaaatgtgaaaatatacagcagctctaagatgtctgtgctataatgcctgatttctcaaggtctagttcgggaccagcagcatcaacattacttgggagcttgatagaaatgcagactctcaggctttacctcatatcactgaatcagaatttatattttaaaaacatcctcatttgatttatatgcacatgaaagtgtggggagcactattaagcagtctttttcaataggaaagccattagtaatttggatgagatcattctttgatgtgtgaatctttcctaattatagtaggatgtttagcatccatgagccctaggcactaaattcctgtaacatccacctccccccataatcattttaatagttaatatatatccacacatttccagatatgtactcagggtayagcaccacctctgattaagagctatctctgtaaagttatcaaaagaaccaaaaccagattgatttttctcaacctttttaatatgtgttataaatggctttcagacaggatgtactaaatacatatttaccttctagtgaacattctttgaattaaattgtataacaaatattttgcctgtttttttccttgaagcctgaattatttcattagwttgtctatgtgttttcctttcttgttagtatgtagtattaatacgtataatatataaatataattatattgagttctgaaatagtcttagttctgctatagtctttatttagagacggggtctctccatgttgtccattgctagtcttgaagtcctgggttcaagtgattcttctgcctcggctttgcaaagtgctgagattataggcatgagccactgcacctggcttatagtcttgtttaattatatatttttcctagtatatgtttttattttattgttaaaaaagtgacatggccgggcgcggtggctcacgcctgtaatcccagcattttgggaggccgaggtgggcggatcacctgaggtcaggagttcaagaccagcctggccaacatggtgaaaccccgtctctactaaaaatacaaaaattagccaggtgtgatggcgcgtgcctgtaatcccagctactcaggaggctgaggcaggagaatcacttgaactcaggaggcggaggttgcagtgagcagagattgtgccggtgtactccagcctgggcaacaagagtgagactgtctcaaaaaaaaaaaaaatgtgacttaagaaaaatcttctgctttgtttagattttatcttccaggcaaggacatttggaccgatcttttacatgttccacaagaagtgcagcttataatccaagctattactcaggtatgacacattacttggagtcaagggactttataccttttggatttcttgatagcatatcgtttatgtttatcatctccaaaagtaaaaacattgtcaaaaacaagatggtattttcttcactaaaacatcatttgaatggcttttcctgtgtatgtggttgctatgatactttactgattttgtctcatccaaatactggttttctagtgggaaagtgttttgagaatctaactgtccattatgccattgtaaaaagcaatacaactttgtttttgacctttttttgggaatatgtgtatgtgatgtgtgtaaagggtgtttgttttgcgttaatttaaatcacagagcaagtttatttctgttctgcttgaaaccatgaaacctgaaaatttatttcttcctgagcttgtccttctttcagggcaggaaatgttaactacatgtttctgtctagcacctgccacagccatatgcttgcatattcaagggcttttctatttaacttgtgatccatgacagaagtcagcattctctaggctgttcttatcctgtgacctgcctgacttatctatcatctgccctcttactagggtttggacttccaagggtcttctgcccctgccttgagaaactaagagttttgttggttagcctcttggctgtaggactcagaaagattacagtagtcttcccaggtctttttactcctcatgcttcagtctccttgccttaccacaatatgggaataccagttataccattgaarctgcctcaacaggaatttttttttttttttttttttttgacacagagtctccctgtgttgcccaggctgaagtgcagtggtgtgatctcagctcactgcaacctctgcctcctaggttcaagcaattctcctgccttaacctccctagtagctgggattgcagacacccaccaccacgcccggctaaattttgtaattttagtagagacggggtttcaccatgttggccaggctggtccgaactcttaacctcaagtgatccgcctggctccccctcccaaagtgctgggattacaggtgtaagccgctgcacctggctggatttttataaggataaattgggatgataaatatggaatgcagataataattattcttgttatttggcttccttaggattctttgtcagcaagatgagatctcctccctaaaaagacgttagtaggatgctcttttagattcatactatatttaaatgtgatttaggtgggtgatactttatctgccctgggcactggacttccatagtatgtgcataatttgtatagaaaaatcaatcaattttctcaaaacgtaactctactaccattattattgagaaggctttttgatgaacagagtctgaaatctggtttgataggtcaatattaatggtggaggaacagttgaatggttaatgaaattagatcatcagtatttccatttgaactcaggctatgtttgcttataatttcatatgccaatttaccattggatagaatctctgctttaagttaaaaacaattacttaataataaagttatatagaaaattctactcaaagttcccttctcataacccaattctaatgttttatttctaatttatttttaattattattattattattttttgagatggagtctcgctctgtcacccaggctagagtgtaatggcgcgatcttgactcactgcaacctcygcctcctgggttcaagcaattcmcctgcctcagcctcccgagtagctaggattacagctgcctgccaccatgcccggctaatttttgtacttttagtagagatggggtttcgccatgttggccaggttgttctcgaactcctgaccttaggtgattcacctgcctcggcctcccagagtgctgggattacaggcatgagccactgtgcctggcctatttttaatttttttttgagacagagtttcactctgtcacccaggttggagtgtggtgacatgttcatggctcactgcaaccttgacctcctaggctcatgcgattctcctgcttcagtctcccgagtagttgggactacaggtacatgccaccatgcctggctaatgttttgaaaaattatttatagaggtgagggtcttgctgtattgcacagactggtctcaaactcctgggctcaagtgattcttctgcctaggcctcccaaggtgctgagattacaggtgtgagccactgcaccccatctcattcaactcttatttaactcaagtctctgtgatctcttccgattatctgtgtgtacatacctcatacacattgcatgatttgacacatgtaatcttttttaactcagtatttttattttaattttttttgagacagggtctcactctgttgcccaggctggagtgcagtggcacaatgacagctcactgcaacctgcacctcctggctgtgatcctcccacctcagccccctgagtagctgggactaccagtgcatgccagcatgcctagctaatttttgcattttttggtagagacggagtttcgccatgttgtccaggctaatagttatagtttttcatgtgtcaacatgttcttttttttttttttttatcattttctgctcatttctaattcatggaattgatacgcacatccacagtcccttatgtgcaattccaaaatccaaaaacctctgaaaaccaaaattttttttcacatctcatttggcttcaaaacctgacctgaggctgggtgcgatggctcaggcctgtaatctcaacactttgggaggccaaggcgggtggatcaccggaggtcaggcattcgagaccagcctggccaacatggtaaaaccctgtctctactaaaaacacaaaaattagcagggtgtgttggaggacacctgtaatcccagctacttgggaagctgaggcagaagaatcgcttgaacccaggaggtggaggttgcagtgagcggagatcgcgccactgcactccatcctgggcgacacagtgagactccatttccaaaaaaaaaaaaaaaaaaaacctcacctgaattcattccttggcaaaacctacktgaactgacatgaagctgtttatattttttcttttttaaaatctctgtaaaaatgagtattttcacattttgctgtagataacatgtttgattacagagtgctcttacagattatacttgaaagtgttacctaatatgtcaggttatctttctaaaattccaaaaatttaaaatttggatatagaactggactcaagcatttgatttgggataatgggtgtgtgccttcatttgcttcattattttccctatggtttaggtgcacatttacccttaccattttcagctattgttaataacatgacttaaaagcattggtatatagagctttttttctcctaagttttagtaaacccttgatattcacaaagaatatatctaagattatcttaagtcctaatgtaatatttggccagattccttggctttctactcagttacgtaattgttgagaattacatttttcttatgtttatcctcataccacaagttgattcccatatcaacagtcttacactaaaagcttcatctctcacttgagtaccttttttttggagaagaaaataattataacagttactatatatatggtgatgattagagaataacaatagtaaataataaagtcatactgaaatgggatgctaaattacagcttgaagcagaggactcaaatttgtgcctttaacaaatctcatctagtccctgatcaaacaagcttatggcatgtcacagacatcaaaggtccctttctaaaaatcaggaatttaaatctgtgaacgtcagtggtctatatatatttttttcttataatgaagtctttaattaaaacctactttttactatggactttaaaaaaacttcttcctctttccacactcattccaattatgctctctcctttggatatattcttttctgataatccccacatcgattgcagtggtcatcactttgtgccttacctcttgattgggctagacacggaccctcagtttacctgcctttatctgctgatcctgactttattggtatttgtcttctctctcaccctgctgtcccctccttcaccaggatgaaaatgagcagsaaggcccaaactttaggatctaggatctggaacttctcctttattactttattggattgacttctctagatcaagctttttaaaaatctgcctctcaatccacttaagattagagtatttaaaacattgatttttttaaaaaataaaattttaaaaacttttttacagtttactttgttacagcaaaactttacacgcctgtaatcctagcactttgggaggccaaggcgggagtgtcacctgagcccaagagtttgagaccagcccaggcaacgtactgagaccctgtctctacaaaaaataaaaataaattacctggacatggtaacgtgtacatgtagtcccagctactgaggaagctgaggtgggagcatctcttgagcctgggaggtcaaggctgcagtgagccatgatggtgccactgtactccagcatggggacagagggagaccctgtctcaagaaaaaaaaatgtttaaccctaaacagagaaaagtgggatgaaaagaagtgattttgcttgtgcttagaatcattatcaatgtcttctctttggaaaatatgttacattaggttaccagaatgatacttggtaggtaatattatttaaacatcctgctattattttaactaaagttaacaggaacaactggtagtacttactttcatagtaagtagttagctgacacattcttttttttttttttggagacagaatctcgctctgtcgcccaggctggagtgcagtggcacgatcttggctcacagcaacctctgcctcccgggttcaagtgattcttatgcctcagcctccctagtaactgggacgacagacgtgtgccaccacgcctggctaattttttgtatttttagtagagacgggtttcaccatactggctaggctggtgttgaactcctggcctgaggtgatccacctgcctccgcctcccaaagtgttgggattacaggcgtgagctaccacacccagtcttgacacattcttttttaatatgaagtttattatattcataaaagtattgcttgtccctgcagaaaatttgtgtagaaaagtagaaaaatacccatcactctatcattagaacataaccacaattaaatttttggtgtattttctcctagttttgtgtgtatgtatgtacacataataggtaatcttttttgtggtgttcgtaactctgatttctcacagaaatcagtggtgacagactatcatgttaaactctcactatatgtggccaggcacagtggctcacttgtattatctcagtactttgccgttgggagacccaggtggaagtatcacctaaggccaggagttcgattccagcctgggcaacacagtgaaaccctccctctccaaaacaatagaaaaattaggcatgtatgatggtatgcacctgtgatcccagctacttgggagactgaggcaaggagattgcttgagcttaggagttcgaggctgcagtgagctatcattgtgccactacactccagcctgggcaacagagtgagaccctgcctcaaaaacaaacaaacaaaaacagtatctgtagtttcctcttggtctgtctctagctttgtttgatcccatcagcaatagaacaccattcagcaatttcattgggattggaaccacctttttctgtttaaacagactgcctgatcttctgcttttccccttgcattttaaagctgcagtctctgtcacatgccgttgagaatgctactctgacttatccttggtctcaaatttcacacctgttagggtaatttgcatttttgacagaccgatgcctcagatagatatctgtatttagatcatgccctaatcaaattttagccaaaatgtgtgagagacaaatatttctactgttacaactttaaacttaagtataataattttctagttctttactaagactcattttcattagcatcatgtttctrtcctcaaaattatagtaatagatgctaagcatagatactgattacaaaggaacaaagttacaattcattttgaaagtaaattagcttattttaattatcagactaaggtcaccaactgttgaattaacaagtgctaataccagccatgacttcttcttttttcctatttaccctaaatcctgacatcttgattagcttacagaagcacaaaattatattttggaaggctgcctatttggatagagcatgaaaagatacattaaatacttttaatagcataaatttacaatattgcgaaaagttctatagtaatatgttttaaaagaatatcttcaaaataatgtcagcattagaaaaaaattccagaaatagagaattattattcttgtgttttcactggagctccttagagttccataacttaatgtctgaagttattttgagggagctgttttaaattgtccarttctgcagatagggmgaggaggktatagaaattattctaccactcctagctgaaacttcaggaggtttttgatatgccagattgtaatccacaagttagaaaattcaaataataagtaattctcagttaatctgattgtagtagcaaacattggagtaataatatgtttgattatggcattagatgactgaagattattataccagaaccagatatatatgatgggtcattccttgccataagccaaccagaataagcagcaattaggttatctctgctctttgagagagtacctgagtcttgaacatggtaactaaaacgaagaaagtgacactagctgcttagtaatcaataactgttgttcatttgaattacaattctcactggccccccacctgctttcttactggtctggcctaccttctttcaggcccaggcctgggagtgcttgcaagatatagttggggtaaaatgttgacttttggtggacaccacggagtcacattgatgcagataaggcacatggctgtggcaggattcagctccttcatcaattttcaggttagtatggctgaatcaattatagtttgtagaagttcccctactgcagactttactggcagttgagactgggatctttcttccatgagagaaatggtgacatgccacattactttggaatacaatggttggtcatggttgcagtcataaggagaaccacctgtagaatttgtttaatttattcaaacttttatttttttagataatccttcctcagacagttttcttggctcaggcgatttaagaacctttggccagagtgcaaatggccaatggagaaattctaccccatcgtcaagctcatctttacaaaaatcaagaaacagccgaagtctttacctcgaaacccgaaagacctcaaggttcgtattttgtcatcttagttctcaagcccttcctcagacataagagaaagtgactaaaaggtagatagttattacattgggattttaaaagagtaacaccatttttggactttaaaccttaaggatatgaacaaatccattttacattttcaacttctcatttacttagtgctgaattttgatgatagccagatcttactagaagagagaattttaagtaaatcttggtggatatgagaatattgggagccttcaagatcaatatggctcttgcaaatcttaaagtgaaaatcagtcaatctccacaatttgagcaggaaagaaacatattttacagctatcaagtgagcagagacctgacttaaactaaagcagttctctacctcatggcattagtcaagtagaccaagctacttctatatattagaaaataaagagtcacagaccgggcacggtgactcgtgcctgtaatcttagcaatttgggaggctgaagcaggtggatcacctgaggtcaggagttccagactagcctggccaacatggtgaaaccctgtctccactaaaaatacaaaaaaattagccaggcatggtggtgtgtgcctgtagtcccagctacttgagaggctgaggcaggagaatcacttgaacctgggaggcagaggttgcagtgagctgagatcatgctgctatagctccagcctgggtgacagagtgacctcgtctcagaaaaaaaaaaaaagatagtcacagagaactttatgctagttattccaactttataagctctatctaacaaaacttacatggattattaaaggcagatgaaatctggcttagaaacttttccctcagatattttgttatattagtatttattatattagtaaacatttcttttttaaaatagtatttatgactacttaaattctgccctggtatattttaggaatgtgggattatttagtgtactgtttagtcaagtttgagctttrtggtgttgatagaagccaacaagatggcttttattattttatgcacatggactccaggaatgtgtcaatactccctgggatcatgttcctcacttaacttttaaaaaattatacagtaattcactcatacactcacattgtagaaatcaacacattaccagcaaagctgaagatcccttgaccactacccacaatcccaatcccttttccttggtgtgtttccttccaaaccttttcctatacctatttctctcttactctttcttactcatatatagtatgatatatatgttgtgtatactattaaatgtatgatattattttgtcttcattaaagattttctatatgcatcatttagcaggtggcttttttaatgcaataaagccatgctgttattttaaaaaaatgttattayagaagtagtacaaatactttgggaaagtttagaaaatatagttaagaaaaataaaaaataaaaacatcacattgccaccagcctgagatcaactctgtaatatcttagtacatatccttctacatacttttctctactttttttccaaaatgagtttatagtatacatattcttttgtaaattttgttttataccctaagtcatatttaaattttctcagttgacccaaaagtatcttttatagttagtttagttttgcatctggaagttattggctttgtcacttataactagaacagcctttttttgttttgttttgttttgttttgttttgtttttttgttttgttgagacggagccttgctctgtcggccaggctggaatgcagtggtgtgatctcggctcactgcaacctccgcctcccaggttcaagcaattctcctgcctcagccttccgagtagctgggactacaggtgcccgccaccatgtcctgctaatttttgtatttttagtagagacggcatttcgccatattagcaaggctagtctcgaactccagaccttgtgatctgccttccttggcctcccgatcccttcctgggattataggcatgagccaccatgcccagcctcagcctcctttttttaaatgacatgacttttctgtataatgttctactttttggatttggcaggttgcttcctcgtggtatcattattttgtcaaaaaatcacctgtattttttataagctaggttttagatgtgactaaaaggtgtgctgcatttatcacatttgaaaaacaaacagtatcttgttttggttctcctattattcatgatgctagactgacctctggattgaggaactgacagtctggtggttaattgtacagttaggttttttcccgtgtgacttgaatgtaatctaaataatgttactttggcgttatatgaatgatgaatttcacatcagccatcacctaataattaatatcatttgctaatacctgataatagttttattagagttaatgaaataatatttttctaattttatcacttttacacttcttaattggcattctgattgcatttttccttagctggggctattagagtccctgaaatgtgtttcctatgggaaaggcctgatacatgattagatttttctttttcattaccagttttcaaagcaaggtttttgtaaaatagacacttcatatgtttcaaatgaatttgtctgttccttttttagtgtcattatggattcagtattttgtaatccactataattgttatacttttaatgctcacattctcagaaatttggctagtsgaagccctttaagcttgcttctgtctgtttgaccttaactcatgaattttgggtaacacccttgctttctgtcattgcaggatgcccttgtactgtttctttagaagagtaatcttttatgttaaaaaaaacatgcataggcgcacgcatactctgggaaacacaaatacagaagacattgtggagaatccatcatgtctttaccaaacaattgcactgcccttgccatcttttcctagctgcatccactcatcctaagaaaataagcctgttcctaaaattctaagtccttgctcatttccccattctttttttttttttttttttttttttgagagaagcaagaatatgactgtaatttaacatcaacaatgacactgtgtaacagcacagggaagaggtagtggagagagatggtcaggcttcctgttccttaaccagccttgattttaacagcagagccccagcaacctagaagcgcctcacctagcctcttaatggagtgggaaggggcagggacttggaaattagaggctcaaaatgtaaagaaggctgatggcaagcctggggagaggcctgaraatgagggaagggctgagggctgtgaggagtcctcacacaaagaccctagcacaggtcttcggcagtgaacatgcccctggccctccgcagggtggagtccttggcgtcctcatatgggtgctccttggaggggatctccaggacagtagggatagagtgctggtgggtgtccagggcatgctgcaccatctctgcgatgtactggttgatgaggatgatgccagtgtcatcccggtttagaaattgcyggaaagtgtcttcgatctcattgatggtcgtatccttctccaccaccaggaaattggggtggcagttcttgttaagctcccctatgctgcccagcaggaaaccagtcaccgtgtccttgtctctgatcactgcgatgagcttccttctccccgccatccctgcagccaggcagagctcaccccagagcaccagaagccactctcatttccccattcttaacacacgtacaaacccaagaagacttaaagagaattatgcactgtttgattttctttagatcttgtctgatttggattcagaccacatgtaatgattttaaagagttgatttcattgartttagaatattcagctgtgtttctctagtctgagtcttgaagaaaaaagaaaatgtattatgctaagaataagtacctcaaactttccaggtaatgataaatgagaaagagcacatagaaaaaactcaaaattggctgggtgctgtggctcacatgtgtaatcccagcactttgggaagctgaggccggcggattacctgaggtcaggagttcaagatcagcctagctaacatggtgaaaccctgtctctacaaaaatacaaaaatcacctgggtgtggcggcgggtgcctgtaatcccagctattcggsaggctgaggcgggagaatcacttgaacctgggaggtggaggttgctgtgagccaaggtcgtgccactgcctccagtctgagtgacagagcaagattccatctcaaaaaaaaaaaaaaaaaaactcaaaattagtaagccttagatataagacagggtttttgagttcacaatattcttcttgccaatttgccaatttttcccattagatagtataaagagacaaaaaattcttcagaggaagtaaataggccagaaggagaatttaatgacgcagcctaatagttgtttttaatgaaggatgggagccctctgttggtctttaaggaaatttaaaaattcagtttaaaagcttagttgagaggcttcagcctttatgcatttttacatatttaatcttaatttcctccaacaggctgggtacaaggggtacagggaataatagaaaatgtatgtgttgttagcatacctggaacccaggttttttgaagacatctaatctgttatgctttgtcataccacaaaactatatggtttctgaccaaaataaattctagattgtggatctaaaaatgcagttttaagtgtttgataattttgacaatgtaagatcttttaagtggcagaacctgatgcagcatccttatatatcatttattcatttattgtatctttccctcaaatgggaaacctattattttacctgttttgtttggttggttttrtattttgaaagtgaaaataatctctaggttggatttattttacttattatctrttcttatctttcttacaaactctttttttagtggattatcaaacagttttgcgggaaagtcaaaccatcactgccatgtatctgcatatgaaaaatcttttcctattaaacctgttccaagtccatcttggagtggttcatgtcgtcgaagtctyttgagccccaagaaaactcagaggcgacatgttagtacagcagaagaggtaaggaaaacgtgtgacaaaagctactaaaagttaggatctttccctacattgagccatttgctccctattaataattagttgtttaaraaccattctattttatccttcctgtgctttttctgtctgaattactctttttgagtgttatcatctattctaaagagattaaagagrtgttttagcaggacttcattatttgtcttactattatatcttctatgcctgctggacagctgactttacttaatctttaatgttgcctgaatggtttctcatacatcaaastatctctctttgatctttgctagacccttcctaaaccgttgtctcctatggaaaaattgttactcttcctccgtagtttttgataaaattttatttcagtccacgtgacgtggctcatgcctatgatcccagcacagtgggaggccaagacaggtggatcacttgagcccaggagttcgagacgagcctgggcaacatggagaaaccctgtctctacaaaaaatataaaaattagacgggcttggtggctcatatctgtactcctagctactggcgaggctgaggtgggaggattgcttgagcccaggaggtcgaggctgcactcgacttgctttgtgtcactgcactgcagcctgggcatcagagtgagacccatctcaaaaaaaaattgtttttttaatttgatgaaatacctattcttcttaccaggaacaatttttcttcaatataagagaaaaatcaaaaagctagttaaacaatatacatcctttcattatgagtaagaccttttttgaagttacagactcctgaaaagaaagatgttctgttgacacttgggttgttatattaattcagtaaacctaaaagaaaaagccaattttgtgaatgtaatgtagcatataatttgcatgataggatgtgtgcacatatctgttagattacatatttaatgtacgtctaatgctgtggttgcttggagatacaaatgaataataattaccttgcatttaaatagcattagagcttccagtgtactttccacgtgtattattgtttttaatccttttaactcagcaaaataggtagagatgaggtaatagtcatgttttacagattaggaaaataagggtcataggtcacatgactagtaaatggcaggcctagaacccagaacttctgaagaggtttggtcaagtatgctttctgttatacaacacagcaatatggttcctgcccaatgaagcttactgagcatggagtcaagaatacagcattacctgctaaataattacataatttggtaatcagtgatctcttaggtggcaaaacttgattatttgtgatatggttactaaaaatgctgtgcatatttttggtttaaagtttgtattgaggccgggcatggtggctcatgcctgtaatcccagcactttgggaggctgagacgggcggatcacgaggtcaggagatgaagaccatcctggctaatacagtgaaaccctgtctctactaaaaatacaaaaaattagccrggcgtggtggcgggcgcctgtaagtcctagctactcgggaggctgaggcaggagaatggcgtgaacccaggaggcagagcttgcagtgagccgaaatcgcgccactgcactccagcctgggtgacagagtgagaagccgtctcaacaacaacaacaaaaaaagtttgtattgaatctaaaacatttggctgggcatggtggctcatgtacaatcccagcactttgggaagcaaaagcaggaggattgcttgaggccaggagtttgagaccagcctaggcaacatagtgagatcctgtctctacaaaaaaaaattagctgggtgtggtggcaggtggctgtagttccacctactcaggaggctgaagcaggaagatcgtttgagcccaggatttcaaggctacggtcagctgtgattgtgccactgcactgcagcctgggtgacagagcaagacactgtctcaaaaaaaaaaaamaaaaacgaaaaaacaccaacattcaagtggagggtggcagaactagtaagtcatttagcagggcaagggatagacaagaaactggcaacatttgcctttgatgacaaagctggacaacaatgatgaaaaggagattttttttaacaaaaaaattttttttgacattacacaaattttcatgtcatcgttgtacaggggccatgctaatcttctctatatagttccagtcttagtatatgtgctcctaaagtgagcccaagatttatttttcattataccttttatgctattgaattttatattatatttacattattttatgcataaataattactggagttgtggggtttatgattatgctggattctagacagcctaaggggtgcagagagactttgtggaggagacaacagcagcatgacagctgggtacagggctcctaaccctcgcctgccccatgtttctgttgctcaggctcaccaggatcctttaattctgtgttcattgtaagtttgccattcacccaccagctctgtggaccactcagccttccttcttttgcctcctctgccagcctgaggactgggggttgcttgggcaattttacccttccaaacagccctccaggccacaggttgggtcagtggagaacatgaaggtggagttctccttcctcctgtagtgcaaagaagatgctaagaatctattctatgaaatgagcgatgcgggaaattttgcctgtttttagttctatattctcctaatatgaaagtcaagctacctgtactactatatggcttacagaataagccatataacatgaataatacaaaatattgggccaaactttattatcagactttcaacaaatttatttagatgtttatttttggatattacaaataattcggatataatactttttaaccctgggactaaatttactgatgggaacttacaaactggatgaaaagtcactttccgtgaaacgttgggatcctcagcagaggtacatttggttatgttaaaggaagatgtattaaccttaatgccggatttgtccatcaacttcaggaatatgaagtcttctacaaaattaacaattaagatgatgtcaccactgcactgctcagtcttacaacagaggtttgaagagaacacatgaagaagaatttagaaatatgcaagtagtggctgtgcagaatggctgatgctcaagaggcaacatcaaaaagctgtgctattcagtagggtaacggctagccacaagcactgtttaaattaattcaaattcaaattgaaaatttagttactcagtgacactagccacattttaagtattcattagccacatgtggctagtggctaccatattggacagggcaaatatagaacatttctattactacagaaatttctgttagataatgctgttatagaggatataaagttctgtttggaaaagagaaaatacttgtgacaataaaaatgtaaaatggcaaaaacacaggtagtttcttttcagttacatgttgcttctagacacgcttctttgcaaattattgagcaacattttaagatactggacttttgtaataggtgacagtgatggttttatacttttcttagaactgctttacagtgttgtcataagtcaagcatttgggactcagaaaattattgaaatttgcactttgcatattttatatggtataaagttattacttyaaacaaaatgaaaattaggagtattatttataaagttattggtggtaatttataaaaaaacagtttactagtgtcctaaaaattattttgtgctctctattaaagttttataattttatagttcttttatgatggagccttttatagaaacatcacctaactacaggactctgtcccttttaaaaaatataattcagcaccttaattaattatttttatacttcaaaacactcgtcttagggttttttcaggttttaaaaygtaacattagctagcttctttaactttatcatgctatgcaattattgcttcctttactcttaagatcctaattttctttttttatttgagacggagtcttgttctcttgccccagctggagtgcagtggcgcgatctcggctcactgcaacctccgtctcccgggttcaagcaattctcctgcctcagcctcctgagtagctgggactacaggygggcagcaccgtgccgggctaattttttgtattttcagtagagacggagtttcaccatgttagccaggatggtctcgatctactgacttcatgatccacctgcctcggcctcccaaagtgctggtattacaggcttgagccaccgtgcccagcccctaattttcttattcagtaaagaacagttagggctttctttaattttaattttttttttaattttatgaaatagagtctcagtgtgtcacccaggctggaatgcagtggcgcaatcacagctcactgccgcctcaacttcctggctcaagtgatactccctcttttgccttctgagtagctgcaactacaggcacatgctaatatgcagctaatttttaaacattttttgtgtagagacagggtctcactttgttgcccaggctggtctcaaactcctaggctcaagtgatcctctgccttggcttcccaaagagttggaattataggagtgagccactgtgtttaacaacaacaacaacaaaaacagtttaacaagtaatttacagagaaagatgttttcttttactgatagtaccagatggtccaaaaaagaattttgtttaaagttttatttaggtaactttcattttggcaaagccaaaaaagttacatgtgttcttttgggaaaggaagaaataagattgtcagttagctgggcgtggtggcgggtgcctgtaatcccagctactcaggaggctgaggcaggagaattgcttgaacccgggaggcggaggttgcagtgagccaagatcgcgccactgcactccagtctgggcgacagagcaagactctgtctcaaaaaaaaaagaaataagattgtcacttttactgacaacatgatcttatatatagaaaaccctacagactccaccaaagaactgttcaaactattaaatgaatacagtgtatgtgtatgtgtgaatatatatgtgtatatatgtgtgtgtatatgtataagtatatatgtgtatgtgtgtgtgtgtatatatatatgtgtgtgtatatatatatatatataaaatcctacagactccaccaaaaaactattaaatgaatacagtatagttgtaggatacaaaatcaacacacagaaattagtagtatttctatgcactgttaacaatgaactatgcaaaaaagaagccaagagaacaatcccatttacaatagctacaaaaaaccaatcaaatttaaccaaggaagtaaaagacctacatactgaaaaacatacaatgttgaaagaaattgaagatacaattaaatggaaagctattctgtgctcatggattggaagaattaatattgtttaaatggccatactactcaaagcaatctccagattcagtgcaatccctatcaaaattccaatgttatttttcatagaaaaaaatactaaaattcatatgaccacataaatccctgaatagccaaggcaattatgagcagaaagaacaaaaaagaagctaccacactagcttatttcaaactatactaccaagctatagtaattaaaacagcatggtattggaaatagacatcagccaatgaaacggaatagagaacttagaaatgaacccgttatgcctgtcgtggggtggggggagtggggaggaatagcattaggagatatacctaatgtaaatgatgagttaatgggtgcagcataccaacgtggcacatgtatacatatgtaacaaacctgcatgttgtgtacatgtaccctagaacttaaagtatgacgaaaaaaaaagtgaacccgttatatagctagttgactgatttttgacaaaggtgctaggactacagaaagggaaaggacagtctcttcactaaatggtgttgggaaaattmtatttccatatgtagaagaatgaaattaggtccttatctcataccatatgcaaaaatcaactaaaaatggaataaagactttaagactagaaactctaaaactgctagaagaaaacaggaaaaactacacgacagtggtcttggcactgatttttttggatttgcacgcaaagtcataggcaacaaaagcagaagtaggcacatgggagtacatcaaactaaaaagcaaaggaaacaattaacagtgtgcagagacaacctacagattgggagaaaatatttgcatccattctataaggggttgatattcaaaatatataaggagctcaactcaataccaagaaaacaaaactgttaaaacataggcaagacattatcctaggcaaactgatgcagaaacaaaaccaaatgctgcatgttctcacttataagtgggagctaaacattgggtacaaatggacataaagatgggaatagtggacactggggactacaagatgggagggtggaaggagaccaagtgttaaactacaaattggtggctgggcgccgtggctcacgcctttaatcccagcactttgggaggccgaggcaggcagatcacgaggtcaggagatcgagaccattgtggccaacatggtgaaaccccgtctctactaaaaataataaaaaaaaatggctgggcgtggtggcgcacacctgtagttccagctactagggaggctgaagcaggagaattgcttgaaccagggaggtggaagttgcagtgagtagagatcgtgccactgcgctccagcctggtgacagagtgagactccgtctcaaaaaagaaaaaaaaaaagcaaaaactacatattgggtgctgtggctcatgcctgtaatcccagcactttgggaggccaaggtgggcgcatcacttgaggttaggagttcgagaccagcctggccaacatggtgaaaccctgtctgtactaaaaattaaaaaaaaaaaaattagctctgtgtggtggcgtgcacctgtagtcccagctagtccagaggctgaggcaggagaatcacttgaacctaggaggtggaggttgcagtgagccgatatggcgcacctgcactccagcctgggctggtcaggagatcgagactatcctggctaacatggtgaaaccccatctctactaaaaacacaaaaaattagctgggcgtggtggcgggcgcctgtagtcccagcacatatcgaaatatcacagtacgagatggtgctaacactgacataatgtttaaaattatgttttgaggattggtggttgtattaaactgtatataagattaaaaataaattgccagggcatattactaagtgctagtgaacatagcccattgagtcaggggacctgtatagaactgatgctttaccagagttgtaagtccttatgtaatctggttctgtgtcaggtgatctcatttcttcctactcttctgattcacatggaccttactatttttggaacgcattaagcaccttcctctctcagggctttgcatgtgttgttcctctatttggaatattcttttatatatttctaggactgacttcttcccttggctttaggtttctgctgaaatatcacttttttttagagaaatcttacctgttcctgctgctctccttccatcactttccattctcttaccctttaattttctgcatactacctgactggttttttgtttgattcctttcactgcaatataatctccacaagggcaggaactttattttatttgatgcattcattatctttagtgactggagcatagtaggtgttcatgtcaatgaatgaatgttaggaagtatatggttttcactaaatgtagtattgggtcttacaggaaaaataaatacatgttggagatgaatattgtctctggaaagtacctgcacttaaataaaataggaaactgttggcaagatactccactctgattttgactagtctggttacttccttgtgatttttctaacaggtttcaggagtcaagggatttgttggaatcctaatttagaggccctttttttctgggactcttttttgactcagaagtgattacctgctggctttctggttttatagcctatagttcctctgcactattatttaaatatatgttccataatttttcaaagtatattatctggtatttactcaacctgtcttttacacacttgataatttttgttttgttttgttttgttttgttttgttttgttttttgagacagagtcttgctctgcccccaggctggagtgtagtggcaccatcttggctcactgcaaccttcgccttccaggttcaagtgattatcctgcctcagtctccccagtagctgggaccacaggcatgtgccactacagccagttggtttttttttttaagttttcttttgtagagttggggtctcactatgttgactgggctggttttgaacttctagcctcaaatgatcctccccgcttgtcctcccaaagtgctggaattacaggcatgagccactgtgttaggcccataattcttaattatcttaaggattctgcctgagctttggcagagctaggattcygtttacatgctagtttgagaaatacttgccttattggatgtgtttaaactgttttttttttttgttttcttatagacagttcaagaagaagaaagagagatttacagacagctgctacagatggtcacagggaaacagtttactatagccaaacccaccacacattttcctttacacctgtgagtcacagaagcatatttcagatgaatttaattctacaatttattacttgatattgaaacaatattcttctcttgctaggtctcgatgtcttagttccagtaaaaatactttgaaagactcactgtttaaaaatggaaactcttgtgcatctcagatcattggctctgatacttcatcatctggatctgccagcattttaactaaccaggaacagctgtcccacagtgtatattccctatcttcttataccccagatgttrcatttggatccaaagattctggtactcttcatcatccccatcatcaccaytctgttccacatcagccagataacttagcagcttcaaatacacaatctgaaggtaaacatggtatcatataactacatttttagtcctaatagccaattaactgttcattagctcattacaggcaacattgtaatatacatataaataaatgagcataccgaatctgaaaatatgaagtccraaatgttccaaaatctgaaactttttgaataccaacatgatactcaggaaatgctcagtggagcatttgggattttggatgtttggatttgggatgctcaaattgtataatgcaaatattcaaaagtccaaaaaatccaaaatttgaaactcctggtcccaaccattttggataagggatactgaacttgtaagacatgtacttacatactttaaatacatatgattcagttaaccatgctgtgagtaaactaaayccacaaataggatattctttttttcttacctcaagatgcaaatgatttgatacattttatttaaacaacttcctaagtacaggctagagtcaaagtatatatactcagcccaattgcttcagcactttctctgtttctatgactttacagtggtaagtaagaattctgaagttgtaggagttttgaaacatcagataaatactgaagcttaagtacttaggtttgtgcgttttagaatgattgtcagcattggaagcaaaaagttttctacgtaactttcaactaactgaaatattcactctctttgcattccagttaattaaggttttgtcgtgataggtttgtttccttaatttcccccttctttaggtatgtattatgtatcaatttatggtatgtacttaggtatgcaacttaaaacaagttataggttaaatggttaaacatcagggattttttgatagatggagcactagtctttcccctcctttctcaggttgtttgaggttttttttttaatctatttgtactttgtgaaaattctcactcaggattaaactttttggtagcatcattgtatagctacacatatccatgaagactcttgttatattttgtgaggtgatgtactgagaactgtaaaggaaaaaaaaaagccaaaaaacccaaactcctttaacctcagaaacatacattgtgttgcagatacttagatacaactaagttgaaacaaatatactacattgcactgtttaattactttccttgtaccatgtaataaatactctgaggttctaatgacagcactttagaagaacatgattcctgcctttgagtagtattcaacagagaaaatacataatagaatgataaaatttgtactttttagacacctcctggggtgctatttccttccctgtcccccttccctccttcttccagtttctttccctcttccattcccccaccccttctttcacctaattcagtcgcattgtagatcatgaactacagtagttcccccttatctgtggggggaggatatgttccaagacccgccccccaccagtggatgcttgaaaccatggagagtatactatatataccataccctatatacatcatgttttttcctatacatacatactaatgattataaattaggtgcagtaagagatcaacaataataactaataacaaaaattataacaatatactgtaatgaagatgttacttttttcttattaaatcaaaaactttaaccttttcacttaaaggaagtagtgttttttgtttttgtttttgtttttgtttgtttttgagactgagtgtcactctgttgctcaggctggagtacagtgggaccatcttggttcactgcaacctcgcatgtcctgggttcaagcgattctgctgcctcagcctcctgagtagctgggattacaggtgtgagccattatgcccagctaatttttgtattcttagcagagacaggtttcaccatgttggccaggctggggaagcactttttacggcttctctttggcatacctgaattgccaacatcattacttttgccttttggggacattattaagtaagggttactgaacacaagcactgctatactgagacagtcaattggatgactgaggtgactactaaatgacaggtggtgcatacaacatggatatgctggacaaagggatgatttcatgcctgaaatagagctggatagagatttttatcacattacttggaatggcatgcaatttaaaatttactaattatttctggaattttccatttaatatatttggaccgcagttaactatgcgtaactgaaaccatagaaaccaaaattgcagatagaggactaccatgaagacttttaaggaatcctgccatgttcttgttctcctgaaacagacaggaagcacagggagcaagtgcagcctaggaggaaattctgaagggcaaatatgtttgttatttcccagggattttcttatttgtgaagcaaattcttcactaagacctatttctgttctcagtgacaatggacttgcctctctctctctcccatctaacctttgttcttatgttatttttgtggaaataaaatatagcaaagtatgggaacttaaactaagatatctagaaagtataactttgtggagttttattactaatgaaatgctcttgtgtttctttaggatcagactctgtgattttactgaaagtgaaagattcccagactccaactcccaggtaaactttggaaaaagcttgttctttattaattaattaatatatctttttgagacggagtctcgctctgttgcccaggctggagtgtagtggcgcgatcttggttcactgcaacctccacctccctggttcaagcaattcttctgcctcagcctcccgagtagctaggattacaggcgcccgccaccacgcccagctaatttttgtatttttagtagagatggggttttgctgtgttggccaggctggtctcgaactcctgacctcaagtgatccacctgcctcggcctcccaaagtgctgggattacaggcgtgagccaccatgcctggcctaaaagtttcttcttaacatattgttttccctttctttaatcacagctttttcactaaaagttacataatgtaaaactacctcaattcagacctttctcacgtattacttgaattattttagtggctttataattgttcttccttcagcctctattttgttcttcattccgtcttccaccataccatgttcttgaaacaatttttctgccttgctcttttttcatttgtttttgtttttgtttttgttttgagacagggtcttgctctgtcacccaggcaagagtgcagtggcacaatcatggctcactggagctttgaactcctgggctcaagtgatcctcttgcctcagctgggaccacatatgcatgccaccatacttggctaacttttaaatttttcttttgtagagacgggatcttgctatgttgaccaggctggttttgtactcctagcctcaagcgatcctcctaacttggccttccaaagtgctgggatcgtaggtgtgagccactgcacccggcctgctgtgttctttagtccatcttccatgctgcaatcagagtgatctttcagaattcatgtctgatcattcattaaaggggtttaatgattatttgttaacctccttcaagggtggtttatcagacattgaattaagctcaggctccttactatggtatacaaagcacttctttcacaagcctcactttctcacttttaacaaatatttactgagagcctactgtgtgccaggtactagtataaatattgaggataatagggaacaatgtgaagtccctattctcaaggagcttgcattctacttgaggggaaggatgaaggacaatgtgaagtccctatgctcaaggagcttgcattctacttgaggggaaggataaacaaatgtatatgccttgtgataagtgctatgaagaaaattgaagcagggtaatatatagagtaggattgggaggatactatttgtatagggtggtcatggaaagtctctgataaagtgacttgagcagagacatgatggaggtaagagggagccatatggaaatatgggactctttcatgtgtttttataagctggactattttcagtttgcaaatacaataagcatttcttaccttcacattcagtgttctttttgcctggaatgtcctccgtacctcaactttgtctgtcagtagtgttttatcttttaggtctcaactcacatgtgaacttctgcatgaaactttacttatctggaggtatcaaatacttcttcctctgtaatacagtaatagtaatccatagtaaccattactatgattgctatgcctttgccatatatggctttgggaattcaattgctaggatgagaataatatcagttttccgttgagaagattaagagtaatgaaatattctttctcatctcagttcccctacttctttgcagctccccatatgttctaagctttaaatatttcttaaaattctctatttgttaagtcttttggggagacttcatagtttggattctttatttcttacatcttttttggagtcagatctgccttctgatcttgggttggaaaaggcttcatgtagctttggacaagttactcttatgaacctcagtttccttatcaataaaatgccagtattgataccttacacttaattgtgaagattaacttacagataaaacacttatttttataagtgcttcacatgaaatgccacaagatgcatgcaactttcttgggaagaagttgatctctcaggtaaagagttgatctcagttccttaatggttctttactaagactgcctttcctttacggaggatttcccctagtgatgactaaagaatgagatggcaggagaaatggtctgttgggtaaggctgtttgagcaatgctctttgtcaaagttggtgcctactctgctgaggcttggtttattggctctctactcttaattctccactactgcctctcagttaagttccagtaatgaagatctgcttttatttcccagaatatgctatgctgtgtcatacctctttgcctttatacattctgatccttctgtctggatgtccctttctctctctgtctacttggtaagctcttattttgcttccttttctttctttcttttttttttttttttttttttttttgtgacagagtcttgctctatcatccaggctggagtgcagtggcacaatctctgctcactgcaacctccgcctcccgggttcaagtgattctcgtgccttaccctccagggtagctgggattacaggcatatgccaccacacccagctaatttttgtatttttagtggagattgggtttcaccatgttggccaagctggtctcgaactcctgacctccggtgttccacccacctcagcctcccaaagtgctgggattacaggcatgagccactgtgcctggccttaattttgcttttcaaaatctcatccaggtgttattttttttttctcagaagatttctttgactttgccagataatgttagtttttccctccatccttctaccttgtttgttactaatacttttgtatctgtcacccattgctggtcatagtgcttggcatatgatgggtgctcagtaaataaatctttgttaaacaaatgaatttcctagatagcctgaagtgctctcttgagtagcccaagtacttattcctcccccgcttttttttaatgctttcatctattgaaaggcacagtcgaaagaacacagtctttggaattggacagataagatttctaatcctagcctttcaagagaaattatctttttgaacctcctttttcatttctgtacagtatgagtaataattcttttttatatattatgttgaggtttaaatagtatagggattttcattaggcttaactaatacataaaacatctagagcagagttttacatgtagagcactaagtatgtgctcaaaaacatttgcagttattattactatatgcctcaattatatgagaaataatgcatctctttggaaaagcagattttccctgcattttgttttccggagccagtggataccttgatccattgaagaaaactgcttgtccctacattacttgtttattcaagaaatactatatggctgggcatggtggctcatgcctgtaatcctagcactttgggaaggccaaggtggatggatcaccggaggtcatgagttcgagaccagcctggccaacatggtgaaacctcgtctctactaaaataaaaataaaaaaaagaaaaaattagccaggtgtggtggcgggtgcctgtaatcccagctactcaggaggctgaggcaggagaatctcttgaacccgagaggtggaggttgcagtgagccgagattgtgccactgtactccagcctgggcaacagagtgagagtcaaaaaacaaacaaacaacactaaatgcctactctgtgccaagcactattctagttgcagatcatttttttttttttaagagacagaatctcactatgttgcccaggctggtcttgaactcttggctcaagcgattctcccacctcagcgtcctaaagcactgggattacaggaatgagccaccatgcctggcctctgatccaggtctcttaactcccaatttgatgctctgtttacttgttctctatatttaatagttttctttggaaaagtgttcactcttcttctttgtgtttctgtgatagatcctgcctagttaggagtttggagataaggaagtttgagaaaaacaagaggctctaggacaattaatcatgtctgtggctctgctcagcatatcacttgggttgtcagcagagccacatggacctagaattggcctgtcatctttggaaggaagttgtgttgctgattctctgctttggctcattggcttgttagccatttgatgtagattattttgtgtgtggggatttttaataaatctttcaatctgagtcatttgggaagagcaatgttctagcttaatgtattattttgagaagtgatgtcctctttcacgtaatgttggtctcatgcaagtagggagctatgccaaatgtagtatctctgctgaactttgggtcacctttttaactaatatgtatccatatgattttaactaatatgtatgcataaggattgtgtctccttaattcctagttacaattattttatgtcatttagattccttttacttattccatacttgtaaagcactcatataaacaatttaaatgattgtttttattgatgaaaatattttaattttctcataagcctcctgctcatttgtcaaatttttcttttcctacccatagttctactttcttccaggcagagctgtggatcaaagaattgtaagttatttttggtatcatttttccttctcaatcagttcatttttagttagaagaaatcaaacaattagctaatcatcctgcttattttttgccaataagaagtacctgtttaggctgggcgcggtggctcacgcctgtaattccagcattttgggaggctgaggcaggtggatcatctgaggtcaggagttcaagaccagcctggccttcatggtgaaacctcatctctactaaaaatacaaaaattggctgggcatggtggcacgcgcctgtaatcctagctacttggaaggctgaggcgggaggattgcttgaacctgggaggtggaggttgcagtgagccgagatcacgccactgcactccagcctgggcaacagagtaagactccatctcaaaaaaaaaaaaaaagaagtgcctgtttatacttttaagttgttgggttttcaaaatattgttggagttggaacatttctatacttatgtttattaaatctataacaattgttgaagctaaattaaattggaaaaatagagttagctattatataatagggaaaataaatgatcctattttggcatttgtaaaactaatttattgaataattcatatttctggactttgcaaaatcactgaaagcatttagtctcacttaaggaacttaagttatccaaacccctcggtctcggtaattttttaaaaatctatcaaaaatgaagtatttgaattaaacttcagtgatatcttgtattcgtttctcctttagggttcaatcccatttttggatttccagactgaagtttcgctttcactataatcttaaaagcatgttaagaaaagaactgtgtgtttacaaatgttaacaagtcatctgttcacatttagcagcacactaatatttttagtaatttcagtaaaaataggtcgggtgcaatggctcacatctgtaatcctagcactttgagaggccaaggtaggggggtcgcttgagcccaggagtttgagactagcccgggcactgtagtgagaccctatctctataaaaaataataagtaaaaatggtagagtaatttcagtaacattatgtggtttcactctatgtcttaaaataaggatgataagttagtgtaaggattttagactttctttgtgagggtcctgtatttaatattcagtgtacatcaacaatatgtttcataatgagagtggtctacatttsgtcacgttccttttcattttctagaactagtgtttatgattctcgagcacgagaaagattgcgccagattgaagaacagaaggcattggccttacagcttcaaaaccaggtaaaaaagaaaattggaataatattacaaataaatagtacatcaaagtagaaactattttggaaagttacccagatttgggtaattgctgttgtaattccaagatcgtatggtagcatagcatgttatgatatgtcgtaaatgttcttggtctgtccagtcagtgctactcattgtacataagacaaatatagatagtcccctacttgtgatggttcgactaatgattttttgactttacaaaaaagcgaaagcaatgggcatttaagcacgctctttgacttatgacaggtttattgggacataaccctatcataaatcaaggaacatccacagatttctttatcccacttactctgaagytttatctttcagagattgcaggagcgggaacattcagtacatgattcagtagaactacatcttcgtgtacctcttgaaaaggagattcctgttactgttgtccaagaaacacaaaaaaaaggtcataaattaactgatagtgaagatgaatttcctgaaattacagaggtaagttacatacacttaatttctacactactaagtatcatgtttagaaagaatccctcggatgagtttcaaacataaaagcaatagtggtcaggcacggtggctcacgcctgtaatcccatcactttgggagactgaagcgggtggatcacttgaggttaggagttcgagaccagcctggccaacatggtaaaaccccatctctaccaaaaatacaaaaattagctgggtgtggtggcatgcacctgtaatcccagctacacaggaggctgaggcaggagaattgcttgaacccgggaggcagaggttgcagtgagccgagatcatgccaccgtacttcagcctgggtgacagagcaagactccatctcacatacacacacacacaaaaagccatagaacacgtgttatttaaattttcttgtatatttcagctttcgcttattttatataccaatctgggctttatttttaaaatattgaaaatttatgaaagaactatgggtggcttttaacagtttcagtgaagaagcatttaatacatttgtctttcatgtcatgtgcatttttacttaatgcacacatacaatagtttgacctcaaattgtaagctgagatttgctctttttttaagtaataaaacccattatagaaaatttggaaaatacatggaggtctgtgtacatttttagataatccgtttctttatccatacttctctttgaaacactaccatgtagctggtgagcataacacacttattatagttgtactgaattccatactttacatttaaaaaaaaagatctctaagaaagtaatttctaaaagatactgcctttactctcttactaccttttatgaaaaattctgtttctcaggaagtcatttggaccagagatataaaatacagttaatttttctcatgtgcttagaaaatttgatagcggaaggttgttccagactttaggaattaatatggaaacaaggatctgaatgttgtgctgaaaaagagaagggaggactagatgaagtggaaagaagtaatcgggrattactgggaaggaatagaaaccaaaatgttagaagtaaactgattaacagtaaatttataaacaatcgaatggtgataaatatagtctgaggattatatggggtttggtgagaaatacggtttttctgaagccacgcgtgtttgatgtcttgacaccttttgttttcttaggaaatggagaaagaaataaagaatgtatttcgtaatgggaatcaggatgaagttctcagtgaagcatttcgcctgaccattacacgcaaagatattcaaactctaaaccatctgaattggctcaatgatgaggtaatgttgcatctatttttacatacaaatagtaaacattaagtggcagttaaattaaggcattatctcactttttctcaaaatgtggtccatggatgacctgcattrgaatcatctctcataggcctcttcattcttgtaactatgagggagkgtggtggagacaggcatttttaacaaacatctcaggtgtattttaaagtctgagaaccactgaatttaccttttcttgttgaagatttgaacattgaagaagacattcactcattggtattctcactctttaaggctcctattctgcagttcatctcttctgaacaaataagtattagcygaccatgttgcagcatgagggaatactgtgggatttctttataggaatccagttttacttccctttctacctaagttctactcattttagatcacttatattacgaatgacaagctttccaaaatcgcctccatttatgtatgatattttttaaatggacattgaaaaagttatattattattaaatatttgaggtattgggggagaagttacrgtcttcacctcctaactccaatttattttaagtatattaattacactacagtttttaaactgatctgttcctaagcctaaacctgtaggtacctgttttattttagaaggttatttttacarcaaaagaaaactgggttgggtatcttttcctaagtaccttctttgcataagcatccctggctaatctgggtatactcaagcttcacagctgtggaggatttttagtttctcagtgtagtaatcattaaatattttagatatccatatcctgtttttgtatgatcaagaccttccaaataatatttgccaataactattgatcatttacctcattagtacgattcatgttttatgtgttttattcttgtaatagtcatcatatctttggaagtagatatgatagttcaccattctgcagataaagaaacaaggcatagaaagatttaaaaacttgcaaggttatacagctagtaaacagcagagccaagattaagacccaagcattgggtcttatctactatatcttaactacctcagaatcttaaattggatactggtcttaggatcagatatatagaacttaggagccatatatcatgtccaggatgctttttttctctggggccagccccattctttttgccactggttggtttataagataaaaatttcagaagctcatcactccctgaataatatctgtgaccaagaataataaggaaggcatggtttgttactgtctttctttagaagaaaccctctttgcctcttttggctcagatattagaacattggttcaaataatggaaaaaaagagctcaccaaatcaaaggaggaaattaaatcaaggatagttataagtatccactgataagttatttttgatctgtggtcctttgccatttatttcctgccattgctggtggtgcgaggtcagttactctaaagggatagtaggctttagtttgttgtaaatcatggaaaacctcctagagggcagcaatcagtaggatatgagctgagttcttgctatttactgtggcatttacctcagtgagattccttacagagacagcattcatcaggacatattttccattccctgggcccatcagaggctggatttttagcaagctaagttaatggaaattacattattttagaggagatgagaagaaggaaagattctttgtctactttatccctaccacccctagccataacttttgtagaaggagtgcatttcttctcagttcagaatgatgttatccttgaaaatgagtgccagttcacatgtccataataatgatgggagctatcttaaaaagcaccattttcaaagtaccatacttcgtaggctttcaaagttactgccyttgagaagctaacatcctgatggagtattattaggtatccttaagtattgatactcattgaagaatacttaattttggccagacacagtgggtcatgcctataatcccagtgccttggatggctaaggtgagaggatcacctgaggccaggagttcaagagcagcctgggcaacatagcaagacccgatctctacaaaaaaattaaaaattagccagccatggtggcatatgcctgtagtcccagctgttcaggaggctgaagcaggaggattgcttgagtttaggagtttgagtttatagtgagctatgactgagccactgtactctagactgggtgacagagcaagactctgtgtcttcaaaagaatacaaaacttaattctgtttctcagttgtgaactatcagtcttttgcaaatgatttgtcctctgttcaatcctcttcttccctcaagtagatattttcattaataataatttctcttctttttctgtttcctgctttataagatgtattaaaactttctccaaaataggtgactgatacattgttcttatcattttataaacaaagtaccatactttgtaggctttcagagttaaaaagtaatataagagcaaggaagtaaaaggaatcagattcagtttataaggaaaataaaatccagaaatcctatgtttgggatatgtatggaaagccattaggataccctgttcctaaaagaagagtgaccacagtacctattcatacagtaggttttaagatttttttcataaatggatttctctataggtcagtttggttaaattctgtacaacttcaaaggactaatgattgacaggattaatataataaaacgtctcaaaaatggaatgtgggaactggctgccatataaagaatacaaaaggaggcaagaagactgttacaatcaagacaccgtagatggggatttctatactgggtcaggagattagttactaatagaaatatctaattaagggaagggaggatagagttaaagagaggagaaattacactgggagcagtggctcatgcctgtaatccgaacactgagaggctgaggtgtaaggattgcttgagcccaggttgtcaaggctgcagtgagttatgattgtgcaactgcactctactacagggtgagtgacagaacaagactctgagatcctgtctgttttttagaaaaagggagagaggaaaaattagttgcaaaagtagaagtagattgaagcagtcaagaaacagaaggaaatattttcaaatgggtgtcattattagaaactatgtattaattcctggagattgaattggatgacttctggaatcccttccaactttaagattctaggtgtattatcctgagtactgctttaggctttgtgtttctctttatggccaaatggttctcctttgagggactaaggattgttttaaaaggcatcagataaatttagaaatacatggatataatttaggtatacaagtaaataaaacttacttttgcttctggtcatgataaaggaaacaagatttaccctttcaacttaactagaaaattagacaaaagatgaaacaacaattttcagacattggataacaggtagtaccaggcagtgatccctgaggaagggaaataaaaggtatgtatgctataatatccccagytttctagggtggggtgtgtgtgttgtgaaggagggactggtagagtctgtgcagaggggcttccctccagtctttggctgagtaccaatttgtgcatgtatgaaaagaagctaccagaggctggggaaagaaccaccagaaagaaggaatcagcagtcttagagccagcacaggtgtcaatagtttatgttccaaccagttaagagtagaaaaacctcctaagtcacagggcattgaatagaatcttcagaggggtattgcctcagaaatagggcaaaactgaccctagaataaaggctgctctggacccaccatcacaaagcctaaaaacaaacctcaaaagcctgaaactgatccaaataacctatatcccagagaaaagccaacaatgtttaaaggaatacaacgaattccatcaacaacaaggcccagcataaaatttgcaatatccagcatccaactagaaatgaccagacatacatgaggcgggaaagtacaatttatgatgagggagaaaagaaacactcagaaatgaccaaaataatagaattagcagacaaggatttttaaaaagttactataaatatcttccacatattcaagaagatagaagaaaatggacatcatgaggagagaaatggaagatattttttaaacaagaccgaccttgaacttctagaaatgaaaaatatatctgaaataaaaatatataaggtagtattaatagattagacacttcataagaaaaaattcgtaaacttgaatagcaatagaaacttgaatatgagacacacaaaaaaagccaaagaaagatatcaagagcatcagtgagctgtgggattataccagacaggttaagcatataattggagtcccagaaggaaaggtgggggcataggtggtgttagaaaaagtatttgaagaaataatgatggaagattttccaaatttgaaaactgaactgacaagtttgagaagttatccataccccaagtagaagaaacaccatgctaaaatgtatagtaatcaagttgttgaaaactggtgataaaaatattaagtgcaacgagaaggaaaaaggcacattaagtacagaagaacaaagataggaataactgtcggaaacgatgcaggccagaagacaatgtagctacatctttgaagtactgcagaagaaacaaatttgtcagtagaaattctatacccagcaaatatatctttcaaaaagtaaggctgtacttttccagacaaacaaatgcatcaccaacagacctgtaccagaagaaatattacgtgttcttcaggcggaagaagaatatcaaatggaaatgtcagtctacacaaaggaatgaagagtggaattgctctcattttttcmtacctctagaagacaggtgactaaggcagaactaaaacaacatactgtgggatttataacatacagaagtaaaatataatcacagcacaaagaaggagacaaaatggacaaatatactgttggaagatccttctactctacataaagtggtaaaatgttatatgaaggaagactgtacgttaaagccatagtaaatcatagagtaaccacaaaaaataaaaattaaaagcaagatatatttactaagccaataatggaggcaaaatggagctttaaaaatacaaaagagttggaaagaagaaaaaagataaaaagaacaaatagaacaaataggaagaaagagcaagatggtagatttaaactcaaccacattgatattaaatgtaaattatctacgtcaacattgtccaatagaaatataatgtgagccacatattttaaattgtctaatagttacttttaaaaaagtaaaatgggccgagtgcagtggctcatgcctgtaatcccagcattttgggaggccgaggcgggtggatcacttgggktcaggagtttgagaccagcctggccaacatggtgaaaccccgtctctacaaaaaatacaaaaattagccaggcatggtggtgcatgcctgtaatctcagctacctggaaggctgaggcaggagaatcgcttgaacctgggaggtggaggttacagtgactgagatcacgccactgcactccagcctgggcaatggagcgagactttatctcaaaaaaaaaaaaaaaaaaaaaaagaggaaataaaatgaaacaggtgaaattaattttaacatatttaaggctaggcacagtggctcacgtctataatcccagcactttgcgaggccaaggtgggtgcatcacttgaggtcaggagttcaagaccagcctggccaacatggcaaaactctgtctactaaaaataaaaaaaattagcccgtcatcgtgtgtgcctgtaattgggaggctgaggcaggagattcacttgaatccaggaagcagaggttgcagtgagctgagatcgcgccactgtactccagcctggatgacagagcaagactgtttcaattaaaaaatatatacatatataaaatatataaaataatatataggtaatatatgttatatataaataatatatttttacataaaaatatatataatacaggtcgggcgcagtggctcacacctgtaatcccagcactttgggaggcagaggcaggtggatcacctgaggtcaggaacttgagaccggcctgaccaacatgctgaaaccctgtctctactaaaaatacaaaaattagccaggtgtggtggcaggcgcctgtaatcccagctacccaggaggctgaggcacgagaatcgcttgaacttgggaggtggaggttgcagtgagccaagatcacaccactgcactccaacctgggtgacagagtgagactttgtctcaaaaaaatatatatataatgtattttttatatataataaataatatatatgtaatgtgtaatatattaaataatatatttatatatgtaatatataatatattaaataatatatttatatatgtaatatataatatattaaataatatatttatatatgtaatatataatatattaaataatatatttatatatgtaatatataatatattaaataatatatttatatatgtaatatgtaatatattaaataatatatttatatatgtaatatgtaatatattaaataatatattatatatgtaatatgtaatatattaaataatatattatatatgtaatatgtaatatattaaataatatattatatatgtaatatgtaatatattaaaaatatatatgtaatatgtaatatgttaaatatatttatatatgtaatatgtaatatattacataatatatttatatatgtaatatgtaatatattaaataatatatttatatatgtaatatgtaatatattaaataatatatttatatatgtaatatgtaatatattaaataatatatttatatatgtaatatattaaataatatatttatatatgtaatatattaaataatatatttatatatgtaatatattaaataatatatttatatatgtaatatgtaatatattaaataatatatttatatatgtaatatgtaatatattaaataattatatatgtaatatgtactatattaaataattatatatgtaatatgtactatattaaatatatatgtaatatattaaataatatattatatrtaatatattaaataatatttatatatgtgatatgtaatatattaaataatattttatatatgtaatatataatacattaagtaatatataaaatatatattatatgtaaaatatatactacattttaaatatatattaaataatatatactatatattaaataatatatataaaataatatatactatatattaaataatatatataaaataatatatactatattttaaatatatattaaataatatatactgtatggtaaatatataatatatactgtatattaagtatacagtatatatttatactatattaagtatattaagttatatattaaaatatatattaaataatatatatcatgtattaaattatatattgatatattacatatattattaatatatgttatatatagtaatgtataatatataaatatattaatatttttatatattgcataatatgtaatatattaatatattataccttatacattaatatatataaatatataaaatatatattaatatgatatattttatttatatattaaataatatatattatatattcaataacgttatttaacaaaatatgtcattttagcatgtagtcaaaatactattgagatattttaccttctctttgaaatgtgctgtggattttacacttatagcacatctccggttggattagtcacatttcaagtgctcaatggtcacatttggctagtggctgccttactaaacagtatagggtaaacatccaattaaaaggcagatattggctatccttggggaggccagcaaatttccggataagggaagctggtgggcaggaaaaaggcatgcaatggccctcatgagccagaagaatagctgctgactgatgcctgggggaccaagcccataattgtggagctggagccgcactgtgtcccttgcttcagtctgatctttgggragcctgcacagttctgacctcagttaagagctaagggaagagatttgggaatgtttggccctgtgtaacagcaaaaggattcattggtgagggtgtctggcaggtatccgtaaagataataagatgaagggaacatcgccgtttggaaagtgtcgtgatatgatacacaagttgtgctgcctctgtggctctaaggcataccaccttcagaagtcaacctgtggcaaatgtggctcccctgccaagcgcaagagaaagtgtaactggactgccacggctaaaagaaaataccacggcgactggttgaatgaagcacctaaacattgtatactgcagatttaggcatggattctttgcaggaacaacacctacacccaagagggcagcagttgtgtcatccagttcatcttaagaatttcaatgattagtcacacaataaatattccggtttttaaaaatgtatatattttaaacatatatatgtttatatgtatatgttatatctgtattacatatatgtgaaaagaggcagagattgtcagattggattaaaaagctgtctgtaagaaactatttattatttatttttgagacggagttttggtcttgttgcccaggctggagtacaatggcatgatcttggctcactgcaacctcagcctcccaggttcaagcgattctcctgccccagccccccgagtagctgggattacaagcacctgccaccacacccagctaatttgtctatttttagtagagatggggtttcaccatgttggccagcctggtcttgaactcctgacctcaggtgacccacctgccttggcctcccaaagtgctgggattacagatgtgagccactgcgcctggccaaggaaccattttaaatgtaaagacataggtttacaaaagttaagggacagaaaaaatataccctgcaaacatgactcaaaaaagtgacttattaacattatacaaattagatttcagaacaaggaatattatcagtaatagagacatttcttaatgataaaggggtcagttcatcaagaaggcttagcaacctaaatatgtacacacctaataacagaacttcgaaatacgtgaagcataatctgatagaactgaaaggagaaatagacaaatctattactgttggaggtttcactgcctctgagtaatggatagaataagtagaaaatcagtaaggatatagaagactggaacaggtagatcgatcctatgcacccaaatgtttgtacaccaggaacacttcctctactcagccctctatgccctatcctacgtgaagcaggataactggagcatttcctgtctctctattattttccccccaagaccctattctccctctcattccttgctgtcaatttacgtggatgaattggaaaaatagcaagctgacatgtctcttttttgggggatgggttctactctataaacccatattagttattaccagttgtttccaattggaaaagcattggactgttggaatacagtatttctaacttcaccagctagtgaaaggccaatgaggaacaaactcataggaaatatgggggacaggacgatggtgaaagaggaatttagaatctacatagcagactgtaattacactgaaactacagctaaccaggcagactaattacctacttggtaagcttcatctctgaaaagaaagagatatctctcagctattcagcatcacaatagcctggtgtgtagagagcatattcttacttgattggtggcataaaataagaagcaaaactttatggggaagtactaaagtcacccgatttttattgcagagtcagaatctggaaccagagcacttgcattttgatgaacattcttttttttttttttttttttcctgagacagggtctcactctgtaatccaggctagagtgcagtggtgtgatcatagctcactgcagcctcaaactcccgagctaaagtgatcctcctgcctcagcctcccaaggagctgggaccacaggaatgtgccaccatgcctggcttttttgttggtttttagtttttagagagaaagtctcactatattgcccagcctggtctcgaattcctggcctcaagtgatcctaccaccttagcctcctaaagtgctaggattacaggcaggagcccacacccagctttgtctagcattctaactttcagaatatatatttttgatgggaacggggggaattggtagtggtcatagtttgataatttttccaaggagtagttaaatctgagtgatgctcagtaaagagaggaaacaacctgcaaaacattaagttcaaccagacaaacctagccttaggaataggttttccttagagaataaaagctgattgcataagaaggaaaaaaactaggcaaaatgaaataaattagttaagtgactatgatgaatccaccattgctgtacacttacgtgtagaataaaacgatcagaactaaagttttctaacgtgactctttggcttccacattattatggtttatctctttgaagtgtttctaaatagaactagccctgattaaccagggatttatgcaaggtcacatggagaatagtagttattctccataaatgactccataaacatgttgcttgcctgtctttctctaaaagtttagctttaattctgataatttgttccttgaattggcatgtaagaaaaattctgtgtgcatgtttgcagtgagggaaacctgccttcctggtttctataatattactaggttagctcctgtgagtgaatgacctgaaccatactattcaaatgctgctgttagtctcttggactttgtggttgakaagggtaaatttaatttgaaaatcagaatggggaggtcaaggtgaaaatctagagaggtaaaattggaaaaatggcttttgtccccccaaaagttgtcttgatctctgctcagaagtattgtcatgcccaggccttttagaacattttttctcaagctaattagaagagttcaaactataagcatgagaatggctaaaaatcaagactttactggtagtgaaatgttttatttctaaaaacatgagaaaacaatagtttggctggtttactggggaagaaggaagatacaaatagcattggtcgtttatgtcattgtggtaatgtacaggaaaaagattgaatccttagtttgaaaacattgtaggcttttctctgaaagaaaagcttttttcagcttcagcctggcagctcttcaaataaaatctcaaaggaacaaggcactataaacaacccacccatccctaaacatgactgcatagacaagtagatgcttatggccaaggctgcaaaggcagcaggaagggtagctccttaagcaccaagagccacagtgagcaaatagaggcaagtgtgggtcccagaaaaggtgacaggtggactaatgttgacagttagtcctcagattgtggtatattggtgagacaaatagcaagcacaggactcatctacttttagctcatttcaaagggaatttaggatctgctggtgctaagagagtcttgtttgaggaaagggctgttgccaacttggcgtcggggacagttgtcttcacaaaagtcaagcaaatgctgtgaccatcactgctcctctttcatcttgaacactgtgatcccttctctcatttctttttccttcatcttcagccctcctctgtgagatgacatgtaggacttttttgttctctcttagctcatttttttggtttaattgtgtcttggctgaactatggcaattttcctcatttggatggtgtaatagctaaaaaaattgaggagaaagacttgaatccagattctgccttggatgtcagatttacattctcagctaatgtggggagcattgaggtcaccaaactcccttctactgggatctaggggaaatgaaaaagaacccagatcattccttagagctaattaactagttgactttggaggccattttcctctcagttgagaaactttggttgggtgcagcaatggaagaggaattctcaaagggaacagataccatggtgtctgatgactggggttctctgttcttgttcagctgtgttggtctttagctttctagtgaaccctctgaaggtgaaaaaacaagcaaaactcaggctgtgtaagtccagctaagcttccttggtttctggaactctttcctcttgaaaaatagaatagtgatgtatagcatgacactcatttatgtcattcttttttttttttttcacttcaracttacrattccagaggtaatctctgataggcacctaggggagatgtatttccatggctgtcatgtgcttcaccgtccttatctctctgcctgattcctttcacctcctgcttcagtccttatttcttgttggaatatataagctgtctgcccctatggaaggtttcgcttacagtaactggcagatcatctgcttatgtcttggattgaagggtttaccctataacatggccaacattataagatgggtagaaggccagaggaatcagtgaattccttcttgccaatttttcctcattagagaacatagtttacagcctagaaatctgtacttgctgggaagatcctactgcatttatggctgccttcggaaacctagaggcagtctttagcaccattatcctgaggggcagagttagactgaaaacttatagttaagaaatacctgattctaattgtgtcttgattaattattatctgtaacaactgatctccagttatctattgggcatcacactaggcagagaataagccacaacctgagtcctttgggctgactgggcctgttgctcagtcatcagctgcagagaaaacagtgtctttcttcagtcctagccttcccctacctcagagctctgcctcatggcgagtgtggttttcccgcagctgcctaggcatcctcatctataggccctttctctggtctagaccgtgctccggtgtgttcctggcagtgttcccctgctgcctacccagtatgtcgttgcttactgttgggcagtagctcactgttctggcatcctggtgtgtaaatatttgtcaaagaacaggggcattttcccattccccaaaaagcattctgaaaaatgtgcctgttttcttagtcatatttccaagccgtggatcagttagcccattcattccttgcagttgacagacactggcctgacctcagctggccacataaagtaagtatgcagtaacttccggcacgataactttcaagttttagtaccaaagagtcctggacctaatggaaccatacacaacatagtcactattagagaagatgtcgtttcattaacaaagaatcacacatctccccactcagccattgtaatttctttccacacttaatattgaaggcataaatggaatcaacaaagatgagaaagctaaccatatagattctggggtagaacgttattcttcatgtttgtgacttgactttaggtctcatataaggtaggtttttatacttccatgtgtgcctttatataaaggtgacattgctgagctactatcagtttacaggtgtttttccagtataattaatggcttctcctgtcacttagttctacttgagaccaaaagagtttgcctctgcaggatgggttattaagttgaaaaggcagtctttaaccatggagcagagttttccatctttgtgtaaaaccatgtggctgtcatataaaatttgagttcttgattttaacttgactaacactaggcgctaactgagctcagtatctacttaaattgctcacacagttccagtagataaaggtaactgctaatgtgcattattaaactgcttgcatgccttcctctccttttctgtaagcctcaccttaacacccctgtcttcctgcagtcttttgacctaaccttcagtcttctacaagcctggccagcgtctgcccatttgtactcccaaccccataatatatatgtcagctttttctcttttcaccatttatagcacttcagccttcccccttctagtcagaatttgatttagagaaatgaatctgttggatgttgaagacttaattcagtttattaggaaacaattacatatgctattcaacacagcaactgcaactattttgaaaggctaggcctgagtgtctattctaataggtgtaatttcttcccacagatcatcaatttctacatgaatatgctgatggagcgaagtaaagaraagggcttgccaagtgtgcatgcatttaatacctttttcttcactaaattaaaaacggctggttatcaggcagtgaaacgttggacaaagaaagtagatgtattttctgttgacattcttttggtgcccattcacctgggagtacactggtgtctagctgtgagtacccctttcatttttgataaaatgtaaaagctatgtacttatagaacacacagagggtagtgagtagtagttctacatgttcccttgattattgagagaaagagtgtttagtagtaggttgactaaaatcagatagatctatgaacttcctatcaagattgggatgtagattttgaagaaagctgtggaatttccctttctagaaatatttaaaagagagttatagggtgtctaagcagccttaaaggaaggcatgggggaaaaaaagtgacttattaatgatgctgccactcagattctgtgactgttattttcagcctaatcataacttaccttgcatacttggtaatttaatatttttatgactctgtgagcattagcttaatgtgttaataaaactatttcacagtctgttttggattacatttcaaaagcataaagccaaaaggaacttctcaatataaagaaataaaacccagaatctgctcaccatctttctgaaactttgtggaagtgattttgagatactcaccttatattccctgaaaatcatgtagtttcttcactgttgcccactttgcagagggagagaatgaacattagaaaaaggcttcacagcaataatggggccacctgttgatgagtgccatcatagttttatgtaaataacccttcattttttttctctacagattaagcataatataatgcaaaatatcagtcaaacttgtcatgattttgtaggaagtctggcaaaaggttccaaagggcagggaagggaaaaactgataaaccgattttcttcatctcataaacacagagactttttttcttattctcaggttgtggactttagaaagaagaatattacctattaygactccatgggtgggataaacaatgaagcctgcagaatactcttgtaagtagggagttgaggacagaagagtttgatatygggtataggtggtgtttttccagtaattgaactcagttgtttgataccttcaatgsagtgattgataaaatcttcatattaagtaaaaatgcatattttgtatctaagtaagtttagtttaaaaacaataccaaagtatgccctaatgggagcaattactatcctaatgcactaaaatgtagactagatataaagatatagatgctacttagaaatcatttaatccaacctcctaatttttcagatgaagagaccaaggcccacagaggtgcctttgatttgcccaggtcctattagttagtggctcaggtggaccagaatgcaaatctctttatgctccacctgtttcattttccaaaatacctattcctcactgtaccactctgatggccaggaggaagtacattccacaatggtgaacagtttgcacttaaaagagagctctattgaaggtatgcactcaatacattgttgatttggatttaatttttagataggagagccaagcctaacagtagtaaataaatacctcaatagtaccagaaaaacacttttcttccattagattgagttctaaaggaccatataaaccaaggaaaagaataaaaagaattgttcctcagaaggaatggtaggtagaaggagcttaactgttagaggcagaggtcatgttccttttgagttgacagagtggacattagaagagacaagctagaagaggcatgctcagctctggagaaaacttaacaatccagggattccctgcccagtattatatactcttttcctcagaagagcagatgaaacaaatttgttcctaggtattgtcagccccattcttagtgtggcagctgtcatcgatgttccccactgcttatctcattctctcctgatacctttaggcaatacctaaagcaagaaagcattgacaagaaaaggaaagagtttgacaccaatggctggcagcttttcagcaagaaaagccaggtacctttcatcttgatgaaataaaagtcctaaaagtagggtatttggggaggaaagaattttactgcttaattcccagggaccacctgtgttcgtgtctagcctgacttcagcttggttggttggtttctgggggaggataaattaagctatccgtaggaaaagtgatagtgtgtttcttatgtagaactaggttttctaaatgcccagatattttactaagcttttcactcctaaggggaatgtttgctgattatttggcctctgggggagggagcagtttttatacccttaggtgccatgggagtcggagatattctcctgtttgattaatacagagtacacagacctgactggaatgttgtattttgtttctttgagcctctgttgtcctgactggggggccagagtcatctgtttgtaatttagagaaacctgtacaatttatatcttttggttcttatttttaatctaagaaggaaagaagcttggaaagatgtcattttttttgttgttggtcttccaggagattcctcagcagatgaatggaagtgaytgtgggatgtttgcctgcaaatatgctgactgtattaccaaagacagaccaatcaacttcacacaggtgagctgagccttccrtagggagctctaggattactttgtctccaagctgccctgtagatgtttttctctccagttgttctctttaggggcctctaccctaacctttagcatgcttcagcccatgattcataacactgatggttactacctgaatcacatcacaaaagaaagaaaattagtgataagccacgtcctgggttaccacacctcagttattgtagtaaaggtttcaagagcagaaccttctctgcctgtctcctctacctactgtaacttctagagagaactgggaccagagcaggtttctttagttcccttgcatttcgttagtagtcaggtttgggaataggccatacctcaatctcctagtgtaatttgttatgctgccccctcccctgacccctcacttgatgaatctggtcagtcttctcttagagagtgattggtcatttctgtccatgtggtctctcagaccaaagtggattgagattagagattatggtttattctgatgtgttctccacttttacttctgtttgaatcagtgactttaccagatttttctaccatagccctttgtctagaccagcctgagctgactcttcaagttcccttaattcttctaaaaggtgaattttttatttttaggcctaggctcatatcctcttaaaagttcaacatagaagacttattagacaccattctcaaaattcttagagacgtgggcatagcctggggattcctggaaatacccagtgtaacttctaaggctataatggtgaaaaataacaatagaaaaagcaatgaaaagaaaaaaactacatgtaaccaagaatgaataatttaaaagaccagaaatacaactgagactgtttgttgaaaaccttgcaaaagaaagaagtatggggaaaggcrtatcaggtctagacaaaagcattgaaaattaagggtgtctctgtgtccctacagcaacacatgccatacttccggaagcggatggtctgggagatcctccaccgaaaactcttgtgaagactgtctcacttagcagaccttgaccatgtgggggaccagctctttgttgtctacagccagagaccttggaaacagctgctcccagccctctgctgttgtaacacccttgatcctggaccaggccctggcgagatgcattcacaagcacatctgcctttccttttgtatctcagatactatttttgcaaagaaactttggtgctgtgaaaggggtgagggacatccctaagctgaagagagagactgcttttcacttcttcagttctgccatcttgttttcaaagggctccagcctcactcagtccctaattatgggactgagaaaagcttggaaagaatcttggtttcatataaattcttgttgttaggccttactaagaagtaggaaagggcatgggcaaaaggtagggataaaaaccaccagcatatacatggacatacacacacacccacacacacaaacacacacacacacacaattttcacgatgtatggtcaggaatgtgactgtaaactggactttggggcccaggcataagtcccttcctccaggacctttcctatttatatgtccctatacaaaatccatctgcttttatacgtagctgttttatcatctgtagcttcatcctatccggaggcacagcacatgagccctggacaggtcccaaagttccaagcagtcctttccgtgaaagcaggggtttgcatgtgctaccaacacatgatacggggaagacccacccagggagcggtttcagtggcgcaacaaagcaccacttttactgttgcctacttctgaccaagaagaaaaaggaccttagtatttagcataaaattccagcgctggatgaatgcagatctagtttggtctgtggctagtttaaatatgtttctaaccacagagaatttcatatatatatmcatatatatatacacatacatatatatatatatatatgtatgtataaaatttcacagggatatgcttttttttttaaagactgaatgtgttcaccatttagcctgtagatttatttccattttccaaattccagcacacagagatcccagcccctatgagtagggtgtttgtggactacctaatggaatatttttgaggcctggatgaactttgccatatgggtagaggttacagagggaggtgatattttcagctaaaaaaaaaaacgggtggagtttggactgatcaacttgagatttaaaaactgctattccttttgttctttctagcatctctccccaccctctgagagctcctcaggcttagatagtgaagtgatcaaatgccagtgtcattttgtacttaagttccaaagtaggaacattttatacttttttctgtattgtaataggtagttttgtatgaaatcttttctcctctcccgttgtaccgcattctttccagcattgtgctttttccctgggcttatttgaaaattttactgttttatacaagctcgtttagtacatttttctatgttttaccacaagttacaatttgaaaagaaaactattttttttaaatattccattgttaactgaatgttactgtttccactccagcaactacatgtcctcccttcaactgcctgccttttggggaaagaccaccttttgtgtgtttgttttttctctctctttctttccctttctctttctatctctctttatttttctttctttttctttgtttttgagttttctataggaaataaatagctttctatatatgagttgctggggaccttcacattctcttttagaaagctgtggcatgcagtctcattgcaggactcctggaatattgtctggttcttggtatttactgtatgtaagcaacaacttgaaaggtggcaatatggtgtcgatttggactatgaatcaaaagacctttttcaggttctttcactattgtctgggggactcagaacaagattgttctctgtatttattgtttgtccatttaggtaacatctgtcttaccttcctcacagactttgtacagaccaaagcaacaaatatttattgccatgtatagcagaaaatgaaacatgcaacaaaagcactttgaaaaatatataaggaattgttgagcctgtctgaatttgggccccctttctgactaatgcagttttgcacaaggtagaagttagtgaccctgagaccatcttaccaccctggacctggtccaaatacagacttacacagtggaccattctttcctgagctagccaacaagagcaggagtagtatctggaaactttcccctttgtttaggggtaggctttgatgaccaggaaaaaaaaaaaggtatttctgcattttatggcccaaaggcatgttattaatatcttatgtaatttactttaaactaaataagacttttttctcctgtgttcccctttctcctgtgtccactgctcatattcayctgccttccctaaaaaaggaatatttgagggatgataagcactagatgccagctatagagacctcaacagaaaccataatcccaagaatcactccgagaccctgaacagagaatatcagacagacctttcttacccatttgagaaacacatggtctgaggcacagaggctagttacatcccatttgtcacctgggacccaccattgctcccaggagtcctatttagggttgaatataagagtacttttccctcatccagtctggggaatttgtgtcaattgactcctctgtatgagatgcttcatacttctatgtggaattaatttctgtattctttagccactgtaatcatgctagcatcttctatccactgcccccagcaatgttagcaccaagatcctgaggtagaaacagagataacctggaaaagcacttccaccaaccccatctcatagcctgtccattactgcctggttttacatggcccttaagtggctctagtgggtaaagggggaagagttcacttgagagccccaatgtttttaatgtttcagtttctggtcctgtgccatccctccagcttttaaatatgtcttgctggagtaagagagaggactgacacctggggtttctttttgtttggtccacctggatggactagcatgaggtggaatatgatgctttcaccctgggagttcacatacccaagagagtcagaaaaagaggtgttaggctattaggccctattgttaaacaggccacgtgctgaactactgggaagggtaccttattttcccgcccaggagcaatgcatctacagcttggaattccatgggaagggacaaggctcatcccagcatcctttattataagtctagggccttgttttacctgtactgactcctaacatctgtctactaagaacacacactaccattcccagctttgaaggtggaaaaggaaacgtgggacagagggttatgctggtcacctgttaaaataaaggataccttacacatacttcctttgtgggagagaaaagagtggctaggaggctttgagctgggacctcgaggaaatgttattgtgagctgtctctttggcctgtcagggagatggtagggataattccaattatgtgaatggttggaccacgtgtccaggggtcttatcaaactctaagattctggaatggtattaagtgccacaatgttgctgggaagaggaagtcaaggcagagattcaaagttaaatttttaaggccactggcttagcactggcttggttttagagttaaggcgacaagaccttagctgcagaattttctccattccaatctaaggagtagccatcaattccttacttctggagattgccttatcctttgcagaacacaagtgctaggaaaggaaaaagtgtgggagagtggcacacaagaagtccagagtccagtccactggagacccctcattcaatttacttttattcttttcacaaatacctactgagtaatcgtacgcaaatcctatctctttgatgccttccctgatcacatgatcttaatatctctcatctggacatctgcagcccttataatcagaaaataatataagtccacatggtatttgtattgtaattcaccttttgcatcatgaatggactgagacatgtagccaccaagggcaggtaaatgatttggtgcttttttttcaaaccaggaataaaagctgtttctttctggcctgccagtgatgaggtagaggtaattattcaacatttatttagaaagacaacattgtgggccaggcatagtggctcacacctgtaatcccagcacattgggaggctgaggtgggaggatcccttgagcccaagagttcgagatcagcctgggcaacacaaaaatttaaaaaaaatatattgtgaagaaaggaggactgctcatggcagcctgcaacctcctttgtggtcccaaatcgttcatctctggcctcaaacctaacgctccactctacccttaacaaaaacaccttcctcagcatttagcatgctctttggggtgggtgggggttctcagtctctaccaggggccttgtggaagtattttctctacacagctttctgttaaatagtttcctccatcctttttatttccggtgatattgtgcatccctcatagactgagactctgaggaagcccctcaggctaggtgttttacaagcacgtgtttaagcactggccttagtcgccctgaagggtggagtgaaaagatggtttgactatggaaataaaagccaccttgttctcaggtttttatagcctgctgaccttgtcctcaggatcttagagtctgtattagagtctgtagaccttatagttaactaatttaggaagctaagcaaacaccaagcaatataccttatcaagaaggcagactcataggcatgtagttccatacagaactagaagtagaggatgaaggggcaaaggtggaggtaagtcagggataatgttgcctttatctgcctatctatatgattcttcctaatttttaaaaagttgacttatttaaaataaactgtggatcttgctttcttgctttgactggaaactccctggtaaaaaggacttgatggtgtttgtctctctgtccccctgtctctgtggctgtttgctctgtctctgtctgtgcctgtgtctcccgatccaagctggaccagtgattggatcctcggtgtggtctggatttctgagtccaccccttacccaggagtctgaatactgttcattcatttatttcatcccatatacctggaagtgaagcctggaacgcaaataacatgcaaatttgtggctctttggcactttaaaaaaccaaacctgtctgtggaggctgccaaagaactttcctgaggccaaacacaccagtcaggacttccaacccaccctgctaactgtggccttctgttcttgctcctctcctgcacccctttcttctcacaatataacttcgaagtgaagtgcttgccacttttctacctgtaaaactcacactcatgacagtaaaacataagaaagcaccaacttctcaaaaatctattattttgggggaacagttttctctatgttgggttagaagatcctcttcttgtccccaggatgttctcaaattctaaggttttcttttagtcatggttaagactttgaagccaattgaatatggagtgactagggaaatcttcaagccacgttcgctctcctgattcctgaatgtggttaaaaatagctgacgaatgcctgggtctgcaccaggtatcaccagtcaggcaatagactgtccctgcgaatggggacctggacctaaccatgggtcagagtcagcctttatcccaaaccactccctgggtatctggtctagtcttgggctctgcagaaagttacaaagggaagggggtggggtgcctgttccttgaaccccaggaaaaatattttacttccttaccttcctgtgcctcatttttccattgtcccatcaccagccaatcatctctgcctgtaagagtcaacccatcacttttccagtagcatcccccaccactctcccctgcccactctgcctcagccacaatggcctctttggtgtttgtctaagaagccaagcttgcttttacttcagggccattctactcaatgcttcctctgggctctggtggaatgttaccctataccccaattctcacaccccatagctttcttaccctcagtttttccccacagtacttaacagcatctaactatattacaagttgactcccccttatctgaaatgcttgggaccagaagtgtctcagattttggaatatttgcattatacttaccagttgagcattccaaatctgaaacccaaaatgctccaatgagcgtttcctttgagtgtcatgtcagcatacaaaaaaattcaattttggagcatttcagatttgggatgcccaacctgtattaaatgatttgttttatccatcactaaaatatctgtattccaggtgctagaattatgtattccaggtgcctagaatagttgaaggagagaatagttgaagggacgaatgaattcctgttatttagcatctttgacctgtgcttccatcatgaagcctccaccctattccaggttctcacatctttgtgtctagtttatacttcctacctcagagtctctggcttcaagttcattgtccatttggcagttagagttgttgtcttcaaatagtgttaatgataatataaacatttatcgagaccttggcctgagacttacatgtcaaatactttatatgtattacttcatttaatcttcacaaatctatgatgtaggtacattattatccccatttctcagatgagaaaatgaggaggatagggattaaataatttgcccagagtctctcagattttcagtgacagaaacagggagcatatgactccaagacccctaaaagtgctagaatctgctgcttccacgtggccacacgacttcatctcaacaggaaaaacgcctgacctagactccaaggggactcgaccaaagtgaaaccaaataagagaacctttgacaaagttctcaaagtcatcttctgcttttctctcgtgagcaacattgaggtccttatttgtcttttcatcatagtttggaagtcaaggggaatgaggaggtccctctgtcattggttcactttctcttggcttctccagacagggataacaaggaattctcctcacctctcccatgacaaccctttcctgtctgtcctttttctttttggctcctcctttcatcctctgctcttggctgtgcacattagcaaacctcttttccctcaaggtctctagtctgaatccagaaaggggaaggctagggattgaaggtggtgaggtagggagacatcaagtggattcagcctgtccccaccgacggcctcaggaatccagtgtgccaggcggtggccctctctggggatgacctggggacctatacttgtaggaatttggaaacatttctagtgctccattttatctttttgcctcggtctgtgtctcccgctctgtctcttcagcatggagtttcctcggccattcctactggtttgagaatgtcaggaatgcagagccttgtgccctccctctcctccacctcccacccccatacactgagcccctctgccctgtagaggcggaagttagttcagctacagactgagggggaggggtgccgccctgttactggagaaggaagacagcacacattctggctcaacccctcctcctgccctctctcctatttcatccccaaaatcagtctgccactttcatcttcctcttcaacagacagcctttcccaccctcacccctcactggaggcctctcttgatggtaattactcctaattgttttcccttggctcacgaagcctttccttgcctgccctgagccaacagctctcctgtgtctgctcagaaaatgggctcaactctcatggaaagagaggctagcctctttgggcttcaaaaccctggctttctagatctaagtcagaggggaggcacccacttgggctctctcaaggcaaattgcaacagagaatagtgaccaaaccctagcagcaaggtctcctgaggagctctgagcatttctctgaagatctcagcaccagagaaggtcctttgggtctggctaggaaagggaactacaggactcttgaatggagtctccaagccccacagctctggccctggtaw

SEQ ID NO: 95363 - DNA, 49596 bp, Homo sapiens
tcgtaaatggaatgggtacatcgtgaggttttgctgctgaggggttttatcagagagcaggtgatgggtagtttattttatcattatcattatcattattattattttgctgctggcattattgttatagaaggatgtggcacctgcccatctgtgtgtttctgccatgaacaaggttctggcctaagcggggcctcgcttacctcagggttgggagtgaagctgggagaggagggtagggagggaagggctttccctggtgggtggggcctcttggcaaggggaccctgctttccctctctcctgggtggagtttggctccacaggctttggcaccaaactctggggctgagagcgtctctccccacccatattcctcccccactttcacatcttagccactcagtcctggggactgcccccttctactcttcctttcccgacttcctccccaggcccctccaatcctgccaacctcattcctgagcctggctaatctgtttgccaccctctgcttccttgcctcgcccttgcacatgccattctccctacctggaatgtcaccccctcttctctccccactctgattcacatctctgggctctttcaaaacccagtttgaccgacacttgccagcttcatggaggccgtgttctgtcccgatgtgctccggtcttccctctttgcgacgcactcatttgcgcttggaataatagaatcagaaaactgctttagactcagaaaaataaatatagatgatctaaagcagccccctcatttgacagatgagaaaactgaggcccagggtggttgcgacttggccaagatcacacagtgagattttttaaatagttggctttgcaagaggctttcaagtattttatgtgtttgttttgtttcctcaacgctctgtgaccaatagaagggcaggtgctttgtttttgtttttgtttttaatgttcttatctccacactcttgttgtgttgtgtatccaggagctaaagtacgcaattgtaatatttgttatgccatcaggaaaataattctaaaactcacagtggtacaaatcttttcatgtattattcatctgatttcaggccagccctgtgaggtaagtagccaagatattgctatttacaaagcaggaaactgagacttagaaaggtgtgacccaggaagttaatggcagagctgggcctaaaactcaagttccctgactcccagcccaggctcctgatccccacaatgtctcctttctagctctctcctgatgctcctggctggggacctggcatagtcaagggggtgaccgttgccgtcttttcattcatggtaccttctttgtcttgggcttgaggagactgtctggcttcctgcccctccccatcctgtcccagtgctttctccttgtgtcccctgccacatagttggcacatagacacatacatgtatattcagaactgcaggtgtctagggcaacagaccacaggggaaaccacatcacctttgttgactctgtagggagatgggggtaaggggaagggaccagcttagttctctccacctgccccagtccccacagtcatctaccctcccaacctgagaccctggtacttatagccacactgtagcctcttcttgatctagccatccaattctggcccagaaggatttggcacctcttctctcagatcctgacatcctagataggggtctgcctgcctgtaccccaaagtcacacccccaaccctactcagaatacttatacggttcccctgattctgctggtgcagtgcaacagagaaaggtgggaaacagggatgagaccacatggctggggtcagaaacttggcatctggaatgagatgtacagggacctcaaggaagcaggctacactggaacaggagaccctggcaatgcgtccttcattattttgacctgctaggaaattgcacaggctctgaatcagacatacttgggattaagtaacttactggctctgtggccttgggcagatcattttgtctttctgagttttactttgctcatggaaacaatggggataataatgagatttaagtgaaagggctttgaacagcgtgcgatatgtagaacatgctcaataaatcctaaattatctttccttccttctttttcttccactccttccttccctctctccttccctctctccttccctccctccttcctttccttccttccttcctttttttccttttcttccttcctttcttctttccttcctttctcccttcttcctttttttccttttcttccttcctttcttctttccttcccgtacttcttatatctcttatgtctggtcccatgaaaccctttatttggagttggggacctaatctcccttactaatctgcaagtcccaaaccctgagaattggcatttgattccagatccagaaactgaaatgcaagatccaaactaacccaatacaatgagtgtccactgagatctcactgaactgaggccttggggaaggagcactttctggttggctttgtgcgaagtgtgtgaggataagtgcaggctggcggaggaattgtggctatggcccccacatctagaaggttgggaacggagggtatcagaaagtttggataattttctggggctttaaatcctggcacaaagtaggcacccaataatatttgttgaatgaatgaatggccctgtcacttactagttgtgcaactttgatcaggtttcttaaccataaaggccatgctttactcatgagcataacaaggattattgttaagaataaatgatctaatgtttgtccaggggatagcaaggactgctacgcagtaaatggtaaacagtagctaactaaggaaagaaggagaggaaaaggagaagagaaggtcaagtaggcccagagtcccaaagggaagcagattggggtgccctcaggctttgtgctggccggagactctagggaaggctcaggaagccaaggcacgtcttttggggccagtctcttctgctaggtgttcagctgagaaagctatgagaggcctggactcaagagctttttaaaaaaaggctccccacggtaaccaggctagaagagagagaggtagcttgcatttctctgtctcatgtctctaaggttcttggaggctttctaatttatcctggtaggggacatgtgacttagaaactggcttaggactctgccatgaggcggggtctggtaagtaaatctggcaggggaaggagagacacagtccagctttcccagatgcaggttgcacatgctgtctttttctctgactatatgttggaggcagtgagtcctggtgtgtagaaagccacatgttgggcactgtgtggacagacaggcagggagatagcctcttaattcagatcactcaaaactcagtgatgagtttaaaaagagaaagaagactcacaaataaatgtatgcacaatgcacatggtagaaatgagcataaaagggcctggctttactacagaaatagctacagaaaagctacggatatgtgtgtgttgggggttgggatcaattgtggagctagacaagggagatagcaggcatgtcgctgggggtctgcagtaaccaagcagtttttctggagtctgtggacaccaaagaggcatttggaaggaggatgatctggcttggaattgagggctggggatgacatacctaaggtggaacagcatgtgtcttggagagtcagcatgggtagttatggggtgaaagaatgtactgtaggtgtccagctggagaagggttcttgaaagtcatgaacatctgtcccaattcaacaaataactcacatcaagtttgaattctgtgcaagacactacaagaaatgcacccatgaccaaggcagtagctggactcagggatatccactcttgaatgctcttggaaggaagagagttgagacaagtagactaggtgggcgaaggtcaatgtataaagaccacacagttcagggaagaattcctcttggctatgggaatccgggaaagcctcccggagaaagtggtatgccactttctttttcttccagtccttccttccttccttccttccttccctccctccctccctcccactagatagggagtgggtcttgaggattggaaagatttcaacagaaggagaaaggggctgggaggacatttcttttggaggcagcatgatgagcgaaggcaagggagtgtggaagcgtgaggacaggatgggaagcagctagcagcccagtctggcagaaataatgatagtaataatagtgactaacactactgagccctaagtaccaggaggcactgggcagggatgtgtatggagtgtggtgccaggttgtaggaggacttgaatgccaggaaaggcttttgggagggtaagttaacaagcgcagaggggttggatctgcctgccgaaggagaactgggacaaggaaaggggctgaagtaagaagtcccacgctgaatatgccggtagcaacagatagtgagtcccgagctgtgcctgagggaagggaatagaatctatggtttgaagttcaccgccagcatggccaagccctcctaggccactgtgggctcttgcttccaatcagacatgactccacctctggggctgcctcaatttttccttctctggattcttggggtttcttaggattgcgggagatagaatggggtcaggggaagctgctccttggtttacaatggtggcgcctcacgctgcagagagcccagtgttcctgcgtggtggacctctccccttcctaggagcagctccagattgctggaggcagacacggctgaccggctagcccaggaagcacaatggcgaggtccttagcccctgacccctgaatctgaccttctctccagctaaaagcggagggagaggcagggagggccactgcctaaagccggccctgagctgagtttattagctgagggagggctggaggcggctgcattccgactcacagactggaacatttctgtgatccgctgtaatgcactgggggacactgggcacattgctgaagtttgactcatagggaccgggagggggaaagaggggggttgtggagggagaggaatgggaggaagagaggaagaggagaggagggaaggaagtcccttgagaaatttctttaaaaaaagaaaactttcaaaatctgcaccacccccacaccctttttcttttaataggaacaggctggacccttccgttcccctcagcaggcatggtgtgtgtgtgggggtgccagtgggggagggctgggcagtgattcaaatcagatcctggaactttcctgaggcaagtcgtgcttatgtgtgtgtgtgtgtggtggggggtgtccgtctgggattccttgtatgggacatgggacaccacgcgtgtcccactgtgcccgcgtgtggctgcgtgcttgtgggctgtacgggtatgtagtgtgtgcacgggggtccaccccgaagccccagtgtgtgctgtgtaaatgattctgccccttgtaaacatggatgcgtgctcgtgtacgttgtgtatgcgagggtgcgtgcgcccaggtagctgggtttccgggaattgtgcacggctcggagcgcctcgcggcggctggggctcggagccgcggccggcgttccgggttcggcgctgcctccccggcagtgcgccgcgccccgccgcgatctggccgcgcgcggtgtctgcggcccgcctgtgcgccgcgcggtgcagtgtctgccggggtggtgtgtcccagggccgcgagcgcctgccccctccctcccctcccccttggcccgctctcagactcagataaagcatttccttccattgtcatcctacccggccggccgggctgccagggccctccccctcccggccccctcccttcctctcgccgtctcacagtcgctctgcagcctccggcgactggggggatgtgaggccggcgccccagccccccgccccgccatgagccccccgctctgagggccccggcccctggatgcacagccccggcgctggtgagtactgggcggccgccccccgccccgccctgcgcgcggcacccagcgtcgcccgcccaggctcggcctccggccctggccccggctccggctccggctccggctcgggctcccgccagccccgcgggcccagcccggcttgcgccccccgaccgcgcctgtcccgcccggctccgcggggctctggcaggctccgggtcggagctggttccgggggccggagggctcgggcctcccgcggggcgcccacatccgcccgccccggggcagctacaggcccaagggagggagttggaggccccggccgccggtgtgcgggccccacgtcccatcacccctgttcccggggaggacgagccgagggaccggggagggagggacggccgcggtggcccggcgagggggcggtgctccggggcggaaggtttggaagcgcgagggcaaagggcaggacccactgagttggggctgggctttgtggggctggacatcagcgcccccatcccgtggagccgggcagggccctactcagatccttcggcggggaaagaggtcccttggaggggtctctggctgggaggtttctctgagcattgcccmccatccttgctcacccatcagggtgaagagacacctgtgccctggtgagctgtggaggtcaatgccggcagcggcgcgggaagcggggcgccgcaggctgtgtgaggggtgggggacaggatgtgcaccccccaggcctggggtctgttggtgttggggagtgtgagagcaggcggcaaatttggcggatgggctgggttcccacgaccagagtttctaggcctgtgggccaggagagagccctctggggcccgcaggccacccagtgccccacccccattgcttcccgctgtggctgcccgtttgggtctgacctccccagccacggctgctcctcactccttctccccgctggctgtcttgcgcacccaaaggcctccccctgcatctggacactggctgtctcgctgccaacgctccctgcccactcccctaggcaacatctgcctgaggcccagctctgcctgccgctttctagggtgagaatggggcatcggccctcagcggccctgctgggagctcaagatcaacttctcagcctgttccctggacttgcatctggacctgtgggaccttcctcaggacccctattcagctatagggctggcaggagactgtgactcaggtccctgccctccaatgagacgctttggcggccctttccccctcccaggactccataggctgctaggctgccgctacccatgggttattaagtcattttcttcttctctgcagtcatttctgagggaaactaaggcacagagtagtcccagtgagtggtacccagcccagtgaacctagactggaaccaggtcttggacctattgggactggtcctctgcctttagtcccctgatgtccctccttgcccagcagggccaggctcagaggcaagctcagagctgcctcctgatgttgcacctggaatggtcctggtgcagtgttctccagaggcctctgtgtcccttattcggcgggtgtctctgtggccaccgggtcttacagtgggttttggggcagggaagtttgcatgtctaagctgttcactccactttgacactgaagttcagtttccccatcagtaaaatggggagaaaattccaagcacacttctcagagcagagcagaagaggttgactatggagaggagaatgaaggtacwgtgctattatccaccccctccagtttgcttagggataatggacctcagctttagtccttggtggcctcttggcatggaagctggaactttctcaattctgatataaaacccttgagcaagagagaaactcatgtgtgatggggtagggagtggggaccctctggtagctgtgggcaagcatgcccaaggacttggaagacagaagcctgtggaaccccatctcctctttgccttctttctcctggcctttcattaagggctggtaattttgaagtcggcaggggcctgagagaaggtgagctaatgcaaggcccagggtcacacagccagggaatggcaggcggagggggccagaaccaggccttctcactctgccagtgcccattctgctggcccaccctccacagcttggctctccctggcctgccctcagttagacttcggactgaggcctccagtggggtgtggggtattgctggaagcagggcctgaataaagtctggggctagcgggagggcatctgtcctcccggaggctcccaggactgtgcatttgtgtgtgttggatttgttcactaratggggcacttcctttggggcaggaagctttgatttcctgtggtgatggtgaggaggggttggtaaggattaggagtggggggctcagctctgggccatcctcgatgttgttgtttggaaccacggaggggcagagtttctgcttmagactgcttctcccagctctggggaggcaggaaggagagccttggtgaggaggcccaggccaaggctggagaaggaggctgtgagagcagtgagctgggggtgggcaacacagcaggaagcccggtcagcaggtgaccctgccgggtattgtgtttccttgtaatattttccccctgtttctgtggtaaccttccctggaggccccaggccttagggctacaggaaggtgcccccagacagccctttccttagaggcctgagtattaggaggagtccccagatctagccacctccctaacccttttggctccctaggatcaggggcctgggaatctaggcgagtggcctgagtgagcatggactcgcgggctgggggaaggccctttggcgtcttctggggggaagggagagggaaagaggggagctggacgcccggaagggccctgagcaacttgagtcgctggcctagcctcttgtttcctcccaacccatccccactgccctcctccagtctccctcctcctacaagggagaggtgggtagcatgctgcctggggcaaggggcaggggtgggggtggcagaggtgggagggatgttttcatcagcagagcatagctcctttggtcctggaccagttcccagaggcaaaataaattcaggacagcgtctgtttagtgtgggtctgcatgagatgtgtgtgagcacacactgggtgcgtggtgggtatctgtgtgtgtacccctccccccagaccctgtgtatgctgatgtggtggttccgggcaatttgtgatctatgtggtggttctgtgttgggtgttttgggaatatgcacacataaaagacagatgtgcatcatctgtatggtgcacaccttttcaggttatggccctgtgtggggtaaacatgtccatatgtatggacatgttttttgggggtatatatctgggcaggagtggctttttaatagaagtccagatgctggcttgtaaaacaccatctcatttgggattctcaaatgcgggttcctggaccatttgcttcagagtcacctggggaatgtgttaaagataaagatcctgggccgggcgcggtgacttacgcctgtaatcccagcactttgggaggccgaggcaggtggatcacctgaggtcaggagttcaagaccagcctggccaatgcggcgaaaccctgtctctactaaaaatacaaaaaattagccaggtgtggcgtgcgcgcctgtaatcccagctactcgggaggctgaggcaggagaattgcttaaacccgggaggcagaggttgcggtgagccaagatcacgccattgcactccagcctgggtgacagcaagactctgtaaaaaaaaaaaaaaaaaaaaaatcctggctggacgcggtggctttgggaggctgaaacaggcagatcacttgaaggcaggagttcgagacgagcctggctaacagggcaaaaccccatctctactaaaaatacaaatttagccaggcatggtggcgcaggcctgtagtcccagctatttgggaggctgaggcagaagaattgcttgagcccaggaggtggaggttgcagtgagccgagattgcgccacctcactccagcctgggcaatagagtgagactgtctcaaaattaaaaacattcagatcatcaggcccattccagattgactagtcagaatctgaggggtggggcctgggaatccagattttaacaggtgcttcaggtgatcctggggcaaggctgtgtttgaggaccactgccctgggtcaacctcttcattttttcttttgaggaaatagacccacagaaggtatgtagtttctctaaggtgacagggccattaagaggaagaaccaagagaaaactcaaggcttctaagacctgtccaggactttgtgctcacccatgtaccccctgtgtgtgtgtgtgcatgtgtgctcataactacactttgtgatgacgtggacccgattgggctggtgctaattggggctgatctttcctctggggtcctggctttcttgttttctgaccttgttcttcttgctacattctgctgcctcctttttggagaaatcctggaactgttgagtgtcatccctaaaggtcaatgttggcaaccagggaaccatgttgctgagccagtcactcagcaattcatccattcactggatcctagctgagccttgcaatgttctaggcactgggtacagatatgcagtgaacacacaggcacaacatctgacctcagggaacttccactctcgtggagaagacaaacagaacaagtaggcaagtaaaggaatgagtatgtgtgactagttacacactgtgataagccctaagaaggaaatgaactgggcatggcaataaagaataacaaggtgggacttcctttgatagggtggccaggggaggactgcctaagaaggtgacattgatgccgtctcccacctccccaggttggaagtgagccatcagagcctctggagccgtgcttgtgaactccctggatgcaggtggaggccctgggctgaccaatggctaagggttggagctgaattgccagcctctcacttggcatggaagatggcagtctcctccccttaagcagccccaaaggttggcagaggggagagcagaagggggagctgcacaaggccaagatcaaggccactcccttgcttggggagcaccctttttcttccatggggctgagtccagggccctgtggccatactgaatgttgagaaggaggcagcatctccccaggagctctcctgtttcaccttcctcccacctccttcccttctccgccatctccccagttggggaactactgtgccaagtcccttccctctggtctagcctgctgcctctgtggccactttacttwacttggctcaggaatcaccaaagagagggggtcaaggcctagaggggacctgggccctggaagagaggacagaaccagaaaggaaggctggggttgggaccagagaggacagggctcaagggaggatggaggctgggacaggagaggcacacgggaaaaacctgagcccagatggccctttggctgggctctcyagagtctctcctgggcccttggaatctgctgcccaaactgggggagactctgagaccagagggccagatggggctgattcaagacacgggctctacatcagctgggaggaaatgcccctgtctggtccacctgcagctctacgcttcacccctctcaggaggttaactttcacatcagcaacttgggtgtcaggttccggctctaggccagcaggcctcagcccctctcacctccaacctcttctcccaggaaggtttttctggggacccagagcttcaggctgcaggaaggtgttgcctggcccttgccttagattattgagtgtcaaaggagccctgactccaggtccgcttttccccctgcacactgccaaggctgccttccaccctgggcctctctggaggctgctcagtgctcttcccgactcccaggccttcccgcccaagctccacagcccccacagcaggatggggaggggacttctcctcgtcaggaaggccctgggctaagctcaccatccccaccctgtctccgcaccacttcctttttcctccatcttgcctgcagggattgtaaaccctggtggtcagaagctttgggcctatagggtcagcctctcaccctggsgatccgtaggggaactccaatccccttcagttcagcttcctccctgcaggacccattccaaggagcctagctctggctcctgaggtgaccccagcccagaagtcccattcccctctaccccaacccccagaatggcaggaggagcagggcagtctgggagtgacaggttcggaaagagtctggggtgggggaattcggcgattgggctgtaaccgtcttgttttgcttgccccacaaacctgcacgtccgggacgtccgctgcgccctcccaggcgcgttcaggttatagaactgctctcagaatgacaggctggtggcacccggctggggcggggggtggggaggtgaaggggggagccccaggcaagggggagctggagggttaaaaatagcagcagccttgtttcggttagcaaatgtggaggcggggagctggaggcggggcgggcggcggacgatgtttgcccgcagcgcagggctgtgcttcccctgggtcccgggagtgagtcacggcggagacgctgaggaggtgctggcgcagcaccccacccccaccgggcgaggggctgagcgcaggcctcgccccccagattccagcgctgaaggaggtgtgactctcccttccaggcagccggggccgccttgagagtgagccaggggcatcgtgtgataatagggaagaaatgtgccattctgacgccagagatctgggtttgaatcttagtcgaaaggtgtgggatcttgagtaaggatgctgatggctctgagactcgatttcctagtttcaagtggggcttttctctgtgccccacttagtgcttaaagcactctacagatgttaattatcgccttagaccctactgtatatatggcaaagcctggcaggagagcttcctgtaaggacgcagagggaggaatgggatggccttggctgagtctcggtttctcctgcaagtgtgattatgggcacawtttgctctgtgcctccacttcttcatctgtaatgtgaaaataattacagtttcaactttatggagttgctatgaagattaaaggagataatgtaaataaagttagctctgtgcctggtatgaagtcagggctcactgaatattcatcatcattattaatgttattgttcatattttttgaaggtcagggatagggaatgttgcagacacgaagaacagaaactgggcctagccccagttcacagaaaaaaccrggccaaatccctgttccagattcctccacccatcgcggcctggaacagccagagagctgtagccagaagtcatagggtggacccctgcttctcttgttcactccctctcccagcctctcccagtgaggcagggcgaggagggaccccagggccttgaagccagctggccctggagaggggctgctgtgccagcttggggagggtctgggatggggctgcccctgatggccctgatgtggagtaccttgccagcatctgctggggtgaactttattttagcccttcccttgttgctcttatgaagaacagaggaggggtgggcaggtcagtgatgtcagcagtgagtattcccagcacagcggctctggaagaggcatgaggcatttctttcaggaaatgatcattattcagccagaaggcattcattaagtaagtcctgactttgtgcccagctctgtgttataggcccttggcgagactcaggaggggcagaggacgctaggttgtagataacacggaacctcagaggatatatggtccaagaagacccgggggcggtgaaaaccctgtggactaatgctcacgggagcccgaggtcacactttgactttgctaccatgggctgtgtctatgtacgtatatatgctgcgtaattattacagaggcagtccatgtgcattgtggatactcagacaggacagaccagcaaaaactaaaaaataaaaaacatcacagacgcatcagtcagagatcactgcacatctttccatttccgtatgtgtctttatgtgttgtaatttttatgaaaatgagattactctgcatatactgttttttcagtcagtgatttccaccttccattacagtaaattttcatcttaacggaattcccagttggccagaaattgtccttacagctggtttgtccaaatcagtacccaggaccatgccatctgtctgttgagtgacctgaaggcagtgtaagcaccctagctggatttgtgatctggaaaaaccccttcaaccaagtctcaagggcagcctggctgcaaaagggaatcaggtcacgtggagaatctgcccactagacttctgctgtcttccaaagtaataggcaaaaggagggggattctagggcaccactgggatgggacctctagggtatttactgtcattaatgttaatgtggcatccctgtgagtgtcaggattcacagcttgtggctattcacatccgagatgcctcagttcggtttgcctggttcttactgagtgcagaccagggtctccattgtggcttctgccttcctctgccccagatccagggatgctgatagccgtgcggctgtgttcctagtccccagaaagtggccctgaaggtaggtgctcccttttgcacttgtgggtgcttccagcgcttccacctgcccaaggcctgcccgtgagtgagagacagagatagagatagagagagagagagagagagagagagagagagagagagagagaccttttcctcccaagagaatttacccccgagtacccactctgagggtgacttgctctggttatgcaacccgcattttgtagagggcttgacagtttccagagagctcacgcagcgtttgatcctctgtggcrgccctgggaggtttgcttgtttagttataccctgctggaggcagctaacaggaaacactgtaaagtgtttaaatggtacactttaaaatggtaaaatgtacatttaaaaaggaagggaaatagaagatgaaaaaggaattgaggatggcaggggtggaacacagcacactttgtgggaacaggctggcattgggagcataccctagggcctcactgtgtcttgcatccccttgtccccttggtggtctcacctcagccactactaggaggcaggctgagtaagcagtccacgccagtgtaccgatgctaagcttaggttctggagtcccagcagctccacataccatctgtgtgacctcagcaagtttctgaacctctcttagccttagtttcctcatttgcaaaatgagaataataacagtatataggccgggcgcagtggttcacgcctgtaatcccagcactttgggaggccagggtgggtggattcagtgagttcaggagtttgagaccagcctggccaacatagtgaaacaccgtctctaccaaaatacaaaaattagctgggcatggtggcttgcacctgtaatcccagctacttgggaggctgaggcaggagaatcacttgaatccgggaggcagaggttgcagtcagctgagattgtgccactgcactccagtctgggtgacagagtgaaattctgtctcaaaaacaaaacaaaacaaacaaacaaaaaaacagtatctgccttacagagttgtgaggactacttgcaatagtacaattaaaatgtttagtgggggcctggtgtggtggctcaggcctgtaatcccagtactttgggaggcagaggtgggcggatcacttgaggctgggagttcgagaccagactaatcaacagggtgaaaccccgtctctactaaatatacaaaaattagccaggcatgttggcgcacgcctgtaatcccagctacttaggaggctgaggcaggagaatcacttgaacccgggaggcagaggttgaagtgagccaagatcgtgccactgtactccagcctgggtgacagagtgggactccatctcaaaataaataaataaataaaaatcgcttagtgggaggatgttgccctccccccgccaaaaatgcctaggataatagccagcacacagtaagcattaacacatgattgttgatcattattaatattattaattaattaaaataatataactattgttgatattgtaacttaaacatttccctggcagtcttgggaatgggctgcgtggccttgtgggtggcacaggtgagaagagtgaggaaggcacatctcgctcggcctgcagctgggagaggcagaaccagtgggcaaagcaggagtagggtacacagaggggcagggtctgcatgaggagggcccaggagctggggtgacaaggagagcaagggaatgagtgtgacacctcagaggggagaaggagccgcccctagaggcagcctggggcggtgactgtgcttcctgttggggcaaacactggcccttgagaaagactggctcacactggctgctaaaggagcaactggtctaagtggggcaccagaggggtaaaggcgaaggggagagatgaaggcagaaactggccgacttatccccatgttacagataggscctcaaatcttgcctgctcaggatgttttgcttatgataggaaagatggtagttagacatcatggtgaacttcctatctcagggactggagatactggagcagaggagtgaggatgaatgtggaacttatgtctttgagggctttttggaactgagaaatcttagggtagtgtggactaggggagcccactggctcaggaattccctaagtgggcagagcagtgcaggggcaggccaggctataagctgaaggccatgggtaataggaagtagatgcaggccctccaggcctgccaccgcaggaagtagctatgccctccccttcacaatggacttgcagggaaggctgagtggtggcccgagaggtcccgggagttggacagggctgggaggacccctgtttttctctgtcagaggacagcaagggtctccagagagtgccagacccagaaaccgacagccatacgcaactcagaatggcccagctccccggcctcaggttctgccaggtcttcatccttgaggagaggccacagggtggagctggggatctggggtgggggacaaagaaccagggaggatgctttcccacccccagggagctcaagccgctgctgccatggttacatctgcttcctgtttgattcatctcaaacagcagaagtggaggtggggtgggggggcgacactggctcccagctcaggccactgctgcgtggggctgtttacaacagccgyrtgtgggattcccagaaagagactccaaaccggacatcctgcggctgcaaaatacccaggtgtcaagagctaaaaatagctgcctcagggccccagctgccctgaggtggcggagaaagaggcatgctcactgttgccacccttacatccagcctcctgtttggtgtgcaggagcttctctgtcctcttgcctcggactgatggaggccttcgtctgggtaggcagacatcccggctggctcacctggcagctgagcctctgccctgatgggcagctggctcctctgcctatacagagaaatggtgcagcttgctttgggacgctaatgagagagtcctagagggacttgggagcttctagagaagggatatggcagggcactgagagcaggggagttggagctgagggtcctctaagaccccaacccattgccagccccctgtttccagcacacagtcccaaatcattgcttggtttctacaaagtcaacagttgctccaaatgattctttgagattgtcttcatgggcacccaaagatgacatagcttctgccctctcacctgcgcagggctggggattgctgctggcacgggtctctgtggggctgtgtgattttttttttccatctttctgcatgcccatctaggtcctgcatgtgtcctttgctggctggcctgtggcgaatgggaatgctggggaggaggggtggagtgtattggttgagagcrtggattctgaagcccaattgcctgggctcaagtcccagctcaacctctgccacttgtctgtgacctcagacaagttatctaatactgctgggcctcagcgtactcatttatctaatggggataaaacagtaaatacctcataggtttgtcatgtggactagataagttagcaaatgtagggtacttagaacaactcctggcacataataaggtgttcgcttacaaaagttcaggtggaagagaaagggaagagagcatagttgggagaggctggggataagagatagggcagggggctgggcacggtggctcacgcctgtaatcctaacactttgggaagccgaggcaggcaaatcacctgaggacaggggttcgagaccagcctggccaacatggcaaaacaccgtctctactaaaaatacaaaaattagctgggcttggtggcttatgcctgtagtcccagctacttgggaggctgagggatgagaatcacttgaatccaggaggcagagtttgcagttagctgagattgtgccactgcactccagcctgggtgacagagcgagactccatctcaaaaaaaaaaaagagagagagagagagatggggcaggggcatgcattcaggagaaaatggtctgtggtagaggagggaggagagttgggagcagacactgaaacgctaatgccaggaaggaggctgcagacaagtacaggaggcaaactaatactcgctaccacaagggagcacccaccatgtgctgggtgcatcacagacagcattgctaatctcaggtgacctctttgaagtaggtattctttttgtttgtttttgtttttgtttttgagacggagtcttgctctgtcgcccaggctggagtgcagtggtgcaatctcagctcactgcagcctccgcctcctgggttcaagcgattcttgtgcctcagcctcccaagtagctggactacatgctccccgccaccatgcctgactaatttttgtatttttgttagagatgggatttcaccatgtcggccaagctggtctcgaactcctgacctcaagtaatctgcccgccttggccagggcagaacttccccaaagttctgggattataggcgtgagccacctcgcccagcctgaagtaggtattcttatctcctgattacaggtggggcagcttaagcaggttaaattgtgtttctggcttgctttgccagtcaccgagggagtcggggcttaaacccaggcccatctgaccgcaaagccaatgtcctgtgtgctttagaccttcaattccctcacagtttgtggcctgccagacttcatgtggcaggggcttccagcccactctcagctccctgctgggttctggataaatctgagcaagaagcattcagtgccaatcaatgagcagtatagagaatttctggaagggagacacaagaagctgttagaaagggcggcttccagggaagttctagggagtctgggatgaatgagaaacttatcctaacaacttttgggctctctgaattttttttagtatctgcaagtattgtacttgttcaaatatgtktaaggctgcaggctgtattctaaactccttgaaagtgagaaccaggtttcactcatatttccatcttttcaacccctagatcagtgacttcccagggaagtagtacctgcatttggggttgacctttgggtttcccctgtactggtctggcctggcctggctggaccactggctggctgggtggctgtgacctagccccttctttctctttgctcctctgtcaaatgagagtgttggtctgaacgatctctaaagcctggaagaggagcagatcctctgtgctcagcccccactctgtgtcagggaggcctggcaaccacagtgttctttctcctgtttatttgttcttggatcttcctgaagccatttcaccaccagccttcatcttctctgccagccccatggagactcaagctttttccagcctatgtcagggaaggagaaccagagacagcaacctcgggtgtgaagggagtcagctctgaacccaggactatggccttctgccactgcctgctttcctcttgctgctggggcctaggtcttcttgctgctgcttccttttccgctaatcaagagtccagggaggtgggaacagcctcaacaaagactttgaagatgagcggggaggatcgcttgagcccaggagcccagcctgggcaacaggggaagacttcgtctctacaaaaaaaaacaaaacaaaacaaaacaaaaaaaatttagccaggcatcgtggtgcatactgtagtcccagctactctggaggctgaggcaggagaattgcctgagcccaggaggtcaacgctgcagtgagccatgttcacatcactgcactccagcctgggcatcagaacaagaccgtacctcaaaaaaaaaaaaaaattaagaaaagacactggaggcatcgggaggggggcgttctaggtggcagtgctcctggggaagccttttgtcccactgaagacatgaagctcctgggagagcaggtggtcrgcaaggctcaggttttcatccaccttttgcagatctaggaggcaaagtcatacctgctggggagggaggaccaagactggggcctgaggcaataaggtaggagcagtagggaggtcagtttgttccaggtgcttagaattgtgtttgtgtttactctggaggttgctgagggctggggtgcacctattggaacaggggctccataggtttctgggtaaaatcaggtgttctggtttaagaaggtgacttggtaggcccacatgccccagtgccaagtaaactgttcttaagtctgactgcagttgcctccaaagaagatagaaaaggggagtagccaggattccaaaaagaagagctctycaacctggcaaagagccctgtgctagacagtattcctggtaccttgggtccatttacttctcttttttttttttttttcaggctgaccccaaattagtagtaacagccctcggagagaggcagtgatgggaaaagaggtcccacactcaagccagaactgggaggcaggatgttcatgctctggcttcagttcagctactgacggggtgccagtagatacctttcctctctctaggacacaaagagagctgttcctgggtcttaatctctgtcgctctgcgctcttctgaacttgatggccctcagcacggggccagggagcgggggaaaagcagaactttttccaggaattgctattggaagcagccccgttgccaacacgcatgcacacatgcacacagcttttctggacagaccttatattatggattatcaccacaaaacatccctttggggcctggtagcccacaccacagaattcagggtcattaatttttctcctatccagagagtgcatggtgtccggaatctgtggttaccaggggagcaaggcacagagaacctggctctgctcccaagcatgaatgctgctgaccagcccctgggtagggactggggaggtgggacagaattcccaggaggcaggggactcagcctgacacagtctctgggagtgcaccctggagcccagtccagaaacctctgggaggaccaggtcctgcagaagaaagaagaggtactaagaaggcctgggattgggggttaccatgtcgtggggaggggagtttgcctctgaggcccaccaccttgagaaatatgcatgctgtgtctcaggcaggttgtcaggagagagtcattgtatttgatttgtcagctactaacagagcctgccacgtgccctgcgaggtgtttggtgcagatgggcatggcttccacagggcaccacagagatcatgatgaatgaagtgtcaaggtggtagacacagagcgagtgctgtggaaaaggaagaggggagaggtcagggagagcctcccaaggagatggacttgggctggacctcagaggatgggcagaatttaaataggtagagcagcattttcggaccgaactttgttacccaaagcatgggctggtttgaggggcagtcggtgggagtctccctgtgcccaggctgcccyctcccccagcagcgcctgcctgcaggaagttctcatttctcggctctgaagaggaactgtggctgcctctgagacacagacccaaaggagcaccccggcagtttctcaaaaaatatcccttctgccccaagtctggccagcagagcgcttctgtgtccacccagtaccccgtccaggcagcctctgggtctcctggcctcctgtccccttgaccctgaactggacagcaagagggaaaggtgtctgtcctggacaggtggcctcaggactcatctctgtcttctccaaccccagctggcctccatgtcccctgggggctttctgctgctgaccagcttgggccctactataggttttcttgctgggcttaggagcctgagagaggtagccatttccaaaagaaaagatttctatctcagattatctgggaaagaggctgagtaggtcccttctctgaggaaacaggcagcaggacataggatggggcagtgggaggaaaagggtctgcactatggggtccttgggctgtgcactcctgaccttatcacttcacagttcccaccagatctgacttgacctccgggccatgacccagtccctcccccactctggaaacctctgtgtcccctcctgctcctttcactcccacctgggaggctctgagcaggccagggtccctctctccaggcctgctcctccctttctcctcctgtccccccagccatccccccagccaggctctcccacctctggccccacctcacctcttggccttcttctttccctcgggcgatgggagcctggtttggctgcccagggaagattgtatctgaccacaggagggagggctgagggcactgctgggtsagctgaggcctccttaggttcttgctgtagtctgagttcaagtcatttagaatgagtgacttgaggaagagggagctgggagcccttttcaccakcagggggactggaggagtcgaatggggtggggtcttctcgttttgattagcttctggtggaggtcccaggctttggcgtgctcaagcttggagtggcagggagcaggcctggcttgaccttctttccttcctgctccctctcctcacscctccctgcagctctttcactccgtctctctctctacagatgggacccaggtgagcccgggtgcccactactgcagccccactggcgcaggtaagagtcaaacccgggggagtccatggtagggagtggaagatgaggggtggaaaggctgtaagaasgcgagaagctgaggggttagagaagcagggtcgctggctgatctgccagagagccaggaggtggcggctccagggaggggcgaggagccggggtaagagaggcagctctggatgctggctgggcacagtgctaggaaacacaacaggaaaaggaaacacaggatgcccgtcttgtccttgctgggagcagtgaaacaggaaggaaagtaagaagctaatatttatactgagacccctaccccatgtcaggcaccaggcaaggtgtgttcttgtgtgtggactcggtcctcacaccggctctgcaaggtgggcatggcagcccttgcaggactgctctgctggaggggaagtgttctctcactgtctgcgcctcctccctctgctggcccgagcctcctctgctgctaggctgccctggggaaggactggacttcctgctgctgctttggtttaggacatgcccatggggccaggtctggactagacgyggtctgcccttcctttagtgtagccartatcaaccaagggcctactgagtgcaagatatacagcctgatgcctaataattccatatagcagggagaaatggarcccaggtatcctccttgcttcagtcctggctgttgaaaagctaacaggcaggttagggaggaagcacacacaaatacaaagcgaaaaaaaatagaatgcaataatgtgaccagtgcccaatgagaggacactgattcatgagtttatccatttgttcaagaatcattaatgagttctgtctctgtgccagggtactttcctggacattttaggagagacactgatttattcattgattctatgtttgtggagtgcctgtcatgtgctaggtactattcyaggtgctaggaataatraacaaagcatgaaaccaactccctgccctatggagcttaactcagacatggtacctgcccacagagcactaatcctggtgtggaacagccatgtrattggagtccaaaagagggagggatgctaggcgctggctgggtccagggatgagggaggactccagctgagctttgagcaaagagtaggatttggaaaagtagaatgtagggatgaggacagcacaggcagggggacattgtgagcaaaaggtcagagaacagaagagatgtggatttgtgacaggtggaagctgatggccaaggtggagggttcatgttcaaatgcagaccaagttgagagaagccaagttaggaccagattgtggagcctcacaaatgctaaagcacctcgaaaagtatttccagggctccaggcagagcccatcctgtattcccttctgctgtggaggcagtggccatgcagagtgtgaggggaagggcccctgctgggggtctgctcacagtccgtatgtggctgaagccactggtcttgggtccaggtcgctggccttggttcccccaagcccctcttgcataatcaggggagtcaccccgggaagccaggacacagaacatggaargactgaaacctttcctggggcaggagtgttttggtattcgaaacccagactcaacccgaatgagaatccggatttcttgggaggcaatgtgaacaaggggtggggcatcaaagccatacattttctactgcgggcggcatctgggtgcacagccatcactgtccctccaggcctcttgatattcgggggacatggcgggcacctccttgctgggctcctgtcttgtgtccatgtcacagtcagggaatgttagagtgaatgccctttaatgacagcctactgcaaacccctctttgcttagtgagaaagccccttgaggggaggtgaattcctgaaagttggtgggaaactggagtacctgccttggtaggaccagaacccatgctagctctgcccctagcagggtgactttggacagggcccttcacctccgagcctcggtttccttatttaggataacaagatagtaatgactaccccccggggccagtggcttgatgtagctgctcatgcacaagtgctgtagatgtaaagattgtggttaggagtggccagcttgggcctggaggctatgatttctgactcctggactggtactttgccacaggcctttccagccctcctcagccccaatccctgaggacagtctgtggctgccccactgggagatgcccagcgttggaattgctgaaggaggcctctccaggaaggcttctccacttgtgtgccctcccatggggccggcctgctcctaccccacccacttccccttctccaggataagcccgctgcaacagctccgtctcccagtgtctcagcctctctggctgctcagcccagcctggtccagctggctatgctggcatggaccctagtctggtggccagttataaatagcccctgcacccacagccttggcagggtgctcctagtgtgggtgcagaggacacttgagaagaggcagcygtgcctgccatcctgaccatgccaggcccagagctgccatggaggcacccaggagcaggcccaaggacacatgggccctatgagctgaggaacctgccctgggcacagggttctgcaggcccaacgtggccrgtcrgggctggctgtaggcttgaggcatcaytttatctcatgactggggatagagcatgggagggtggcgacccagagggcctgtgaggcttggggctggaggcagaacaaagtgggcctgtttgcctgcctgattgcttcctttgagcccaactcattagagggcagctgggcaaatcctctgattccagggagggatgaagggagggagaaggcagggccaagaatgtcctaccataggatctgcagcccatcggagatcactgtagccctcagcccccggcccagggaggagcatgtttagtggaggagcactgtggtggagtcggaagactccgttcaaacaccaccagtgatacagtgttactgtgcacagttcatgtgacttttttctcacgagtaaaatggaattgataatacctaccttgcaggaccacgacaggattaagtgaggaaaaacccccatgagagtgttttgccattgtcaagtgagcctgagggaggctgaggggggatcaggctgtatcatgcccccgaggacaaactttccagtttaccctgctccctctctctgtccctaggctgccccaggccctgtgcagacacaccaggccctcagccgcagcccatggacctgcgggtgggccagcggcccccagtggagcccccaccagagcccacattgctggccctgcagcgtccccagcgcctgcaccaccacctcttcctagcaggcctgcagcagcagcgctcggtggagcccatgagggtaaagatggagctccctgcatgtggggccaccttgagcttggtccccagcctccccgccttcagcatccctagacaccagtctcagtcctcaactccttgtccctttctgggctgccggccctgcccacagctctccatggacacgccgatgcccgagttgcaggtgggaccccaggaacaagagctgcggcagcttctccacaaggacaagagcaagcgaagtaaggaggtggccaccccagcccagcccagccccaccagccaggtgcctgcggctgcctgtgtggcttgtgaggggtgaggtgggagggccgcagccagctgggcctgagccgaggctttccctctgcttgcctgggctctgcctgtgaatgtgtgggggatgtgggggtggggggtggtgtctggaggctctagggaggggtagggcctcgggcttggctcttgcctagggagtccctgggacgcctcctactgaggatggggacagggcagtggccaggtagtgccacgaggccgcctgtccacccacctccagccccctcctgactctgcccctacaggtgctgtagccagcagcgtggtcaagcagaagctagcggaggtgattctgaaaaaacagcaggcggccctagaaagaacagtccatcccaacagccccggcattccctacaggtaacaccctcctcacctgccctcctgtccccacatgcaccctccacccccgcccccgtgttagccatgagcacacacacttgcctccttcctccccagttgccacaaccagtccttacccttcctctaaacataatgcccccgagcccctctctcaactgatacctgccctcctctctttaaattctccccaccccacctgagcccttctyacacacacacacacacacacacacacacacacacacacaccctactggcttttttcttgcacatgagccccttctctctttatattttccctgagcgcaaaaatgtcctggttcccagagcaggttcctagtgcaggtgacagagcccccagtgggctcttcacccacgcaccaagcacctggyttctatgcctaggtcagagctctgcactatagctgctggagcggacaggcggcccactgctgccacctggagatggtccccattcctaccagccccacattgcccagccctgcccgctgcagcctccccctcaggtcccagggcccgtgctcagggcagtgcccgtgcagtgtccccacacctctgaagcagccttggcactcgttctgtagaaccctggagcccctggagacggaaggagccacccgctccatgctcagcagctttttgcctcctgttcccagcctgcccagtgaccccccagagcacttccctctgcgcaagacaggtgagctgaacaaacaggcggacctttcaggcaaaggaagggggaagggcctcggacatgggggaggagtgtgcaggggtgggcgggctgggctgggccaggagatcatcggtaggctaggatcttctttctagttctgccttctctttccttgaccgatagagatgactgggactgagggrttaaagggtggaaaaaagaagggtggtgggggcctgagtgacgctggtgctccctgcagtctctgagcccaacctgaagctgcgctataagcccaagaagtccctggagcggaggaagaatccactgctccgaaaggagagtgcgccccccagcctccggcggcggcccgcagagaccctcggaggtgagggccggctgagccagtgcggttgccatcctcaaacctggctggtcttgtccctttgggtcaggccccacctagacaggggtcccctccttaggactgccatgcgtggttgcatgggrgtgtcccacacacttgccgaagcgggggagttggggctgaaacccagtccctgctctgttagctaaggtgacatctcccagaaaagggggcacccttcaaaaaattatgcaaaggtgctgtaggccaaaggtggcctgtcttcttcctgctctgatgggaagaaagcaggaggccgggcgcggtggttcacgcctataatctcagcactttgggaggctgaggcaggtcaatcacctgaggttaggagtttgagaccagcctggacaatatggtgaaaccctgtctctactaaaaatacaaaaattagccaggcacggtggtgcatgcctgtagtcccagctacttgggaggctgagccaggagaatcgcttgaacccaggaggtggaggttgcagtgagccgggatcgtgccattgcactccagcctgggcaacagagcaagactctgtctcaaaaaaaaaaaaaaagaaagcaggaagcaaaggtgctcgttaaggaagggggtgctccygggtctcctgcaccaggcggcctggctgtaccctcctgcccaccctggcctctgactgcacttccctctctccccaaccctcagactcctccccaagtagtagcagcacgcccgcatcaggrtgcagctcccccaatgacagcgagcacggccccaatcccatcctgggctcggaggtaaggccttgccgagactgggctctcctggggcagttctgaggctcagccttcttccagcaggcggccctacctgggctggggctgcagggtctgggcagcccctgccagagcctcctgggtgttctggggaaggtgcgccggggtagaggtctgggaccggtgaccctcgccctgctccctatggcaggcgctcttgggccagcggctgcggctgcaggagacttctgtggccccgttcgccttgccgacagtgtccttgctgcccgcaatcactctggggctgcccgcccctgccagggtgagtggctggggtgcccacccccactccaagcccccccagcttctttcactcccttttcttgctgcctcaccccatcatcttcattgttctctgctggaatcttcttccccgtgacttctcccgcctctcccccaggctgacagtgaccgcaggacccatccgactctgggccctcgggggccaatcctggggagcccccacactcccctcttcctgccccatggcttggagcccgaggctgggggcaccttgccctctcgcctgcagcccattctcctcctggacccctcaggctctcatgccccgctgctgactggtgagtctgctgcttcttcagggaaggrgctgggtccctgcaccctgctaagagccaagcttgggatggacccatccttcctccccatctctgtccccctgtcctgcgcattgccctgctgcaccctggccccccaccctataccctcgcttccttccattgctccctgtggttccctccttattccaccccccgattctttccagtgcccgggcttgggcccttgcccttccactttgcccagtccttaatgaccaccgagcggctctctgggtcaggcctccactggccactgagccggactcgctcagagcccctgccccccagtgccaccgctcccccaccgccgggccccatgcagccccgcctggagcagctcaaaactcacgtccaggtgatcaaggtgagaggaattgggcagtggaggtattgagggagtgtttaactggggacttaggggccaaaagaagaggggtacttagaaagggcagggaactggagggcaaaagagggggatgtggcttcttggggcccagagctgcatggcagctggagtcctagcaagatgactggctgcctggcccagcccaccacctcccaccccatgcccctcgctccaccatggcttctcagccaggttctcccctccccagaggtcagccaagccgagtgagaagccccggctgcggcagataccctcggctgaagacctggagacagatggcgggggaccgggccaggtggtggacgatggcctggagcacagggagctgggccatgggcagcctgaggccagaggccccgctcctctccagcagcaccctcaggtatggcagtccccacctgcccctcagaaagtgtcctcagaagactctggggcctggcataagatggggaagggagggagatacgacatcagtgcaacaggcagctctaggacccatggttgccctataagatcctgggtgctggatccacactaaggtgtaggcacacacacacatgcacactcacacacccatacacacacatacacacaacagcttgccagtctcaggtgaagcatgtcccttttccaggaaggagtctgtcctttcctggagccacacatagtcctgccctggtatgtctcccctctatccagaaaggtggctagggccagaggtgggatggagccaggctccagcgtgtccagcagaatgctctcactgtgggaatcaagacccagtgcattagcttgccggagctgttgggatacaggctgggcgccttaaacagcaggcatttaccatctcacagttctggaggctggaagtcaaaatcgaggtgttggtggagttggttccttctgggggctgtgagtgtgagggcaggggctgttcccggtctctctccttggcttgtggatggtcatcttcttcctgtggcttcatgtggtttccctctgtgaatgcctgttcagatttcctcttcctataaggacaatagtcatactgggttaaggcccaccctaacgacctcattttaatttgattacttctgtttgtaaagaccctatctctgaataaggtcatgtttagaggtactgggggttgggacttcaacatataaatttgagggtggggaacataatttactccataacacatgatgacaggccacacacatgttcttgaacagttacatagtccaggacaggaggacatcctggtcagcacaagatccagcgcccctcccctggttcctggctttggagccccaagggcccggggagctggtggaatgggtggtcagtctggggtgcaaacctgtcagggggctgcaggggacagggggcttagagagtcaaaggccagagccccactggacagcaggtctaggtttatcctggaatctctctaggaaaggggcctgcttggcagttcccaagacctcaggcagaagtagagggagcaggaccctgaaacactggagaccaaggccccatctttcccctaggtgttgctctgggaacagcagcgactggctgggcggctcccccggggcagcaccggggacactgtgctgcttcctctggcccagggtgggcaccggcctctgtcccgggctcagtcttccccagccgcacctgcctcactgtcagccccagagcctgccagccaggcccgagtcctctccagctcagagacccctgccaggaccctgcccttcaccacaggtgagaccgggaggagggtggcgggtggagggaggggctcggctgcacgagtccatgtgggtgtcttggtgtcacttgggacatttttagaggccacagagtgcttagccttgttaggcccacgtagtacccatggagcacatggaacagctggttattgcatttggccgatgaggaccaaggctcacgaaatctaaggtgacaagcctgtggtcaaatagcaagtggtagtcaagccaggataagaattccagtctcctgccaatgcactcagcccttttaaaaaatgatatttattactgttgctctgcttgtaaaaagagctcagaagtattttagacattttgaagagtacagaaaaacctaagaagaaaagaaaaatcaccaaccagtatcccaccacccagaagtaamccctctgaaattctgctgtatttcagtccaggctttgttctggccatatgtacatgtacagatgccatgaacacatgaactacgttttgtatcctgctttacttagttaacatattatgaatccttcttggcataattagtctttaaaactgagagtctcatagtatttcattawtgtatttcatttttactgagggatcccttatcagttagacatttagattatagcttatttgaatttccttatgcataaatctttcctcatgcttgggattatttcccaaggttcactctaaagaagtagcattcctgggtcacatggtgtgagcattttgagagtcgttggtgtcctagacgcacagaaattgaccctcccacccgcaatgagcaggaccctcctctgaagacttcccacgggtcagactgaaatagtcacttctccaaagctggatttgtctatcacatggtccagtgtcatcgtgggcttcttagctcccggtttgggggtttcctaggaattcttttccctcctgctgccccttggtagcctctctgggttcatgacacgtgtgtgagatgctgtacgttaggcctcatgctttgctctgagcacttgagggcctggtgctgggccctcgagtcctgggccacccagcagtcgtgtccgcatgtgggaaggccgtggctctgtggcagccatgttggctggagctgtgttgatgtgttggctgctgccacctggggaagtgtctgggcgtgtgtggacaggtgtgaggggctggggctggggtaggggcaggatgaaatgcaggcctgtgtgggtgtgaggggtgtgtacccgcccggctccatgtgggtgcctgctgtggcggtgctggcgtgttctctgcagccaaggccatggggcgtgaggactccctgggtccccgctctgacccttgctcctgcagggctgatctatgactcggtcatgctgaagcaccagtgctcctgcggtgacaacagcaggcacccggagcacgccggccgcatccagagcatctggtcccggctgcaggagcgggggctccggagccagtgtgaggtgaggaggcgcgggtggggcccgaggaatgggtggagggaggagtcatgggaggggaggggtggggggccctggggcccatgagagatgaggggcacatggggtggtggtgatgggagggaaggggcgagcatgagctcagagctctgtggtccccttttcagtgtctccgaggccggaaggcctccctggaagagctgcagtcggtccactctgagcggcacgtgctcctctacggcaccaacccgctcagccgcctcaaactggacaacgggaagctggcaggtaatggcctagyggccctgtctccccatgccagcttacctcacccagctcccatgcactcctgtctcggctctgcccgcccagccagcctcctcctgcaccctggacgtccctactccagcttgctgccaagcccctcctcagcccacctccacctctcccttccatatttctctcccccaatactcacccggccctgctctctgggctccctgctccctgttgggccaaaggctgagagtattcacgctgacgtgggctgggcctctccccgcagggctcctggcacagcggatgtttgtgatgctgccctgtggtggggttggggtaagtgtgcccaggggtctcaggggggcgttgccagggctctcagctctcctccctgtggttctcccaggcccagcccctgcagaacctctgcttgttgtggttctgccagacagggtgagccagggacttcctgaggtgccccctgcagcaggaagctccttttggacaggcgtgtctcggacccacagtctcccccgaatgcggagtccagcctaagccttsccctagaaggtgtctggtagatgytgagtgaggtttcaggagcagggccaaggctggggcttaggatcatctctcccttcaaaracccccatgactgggcattggccgccaggctgctctgtctgctcttaagtggcaagttggggtacctcagcctggtccccagaccttgggctgcctggtgtgacatcacggtggtgcttccggtgtccttggcgatcccagcactccccactccgggacatagccccaaactccgctsgcgagctttgcttcctaagtcctcacccctttgtgaagggagcttcccgctccctccggctcagctctcctcgcctaacactatccctgcagtagtttctcaagcaaggtgtgtagaggcaggggatggaggcctcattccggagggaaagtgggagctgtagctggtgggggactttgggagccagtcagtgccctattcacaacttcccatttcttgccactttctggtttttccaactgttgttgcttctgttttctcctccctcctctccctctctgtctttctctctctctctctttctccagcctcttgcgactctctctgccttcctcgcctctcttggtctgcctcgccctccccatctccccatcatgccccccggcccctccctagccttgaggcccagggactgggtttggggggcctcccagcctgggctaggggccctgagtggaagacagtggtgcagacggcccctccagctccgaccgtcccgcagggcctgagcagagtcagctggggcttaaaaccccctcccggcccaaaccccaagtcccgcccaggtaacgccatgccccctcccctgaccggggaggcaggcgtgatgctgccagcagagtgctggccagataatgggctggtgctgggacttaagctgggaaaaagtcatgctgggattgggggacacaggaggccttgcctttgggcggtggggcactggggaggcagcactgtctgcccagctccctgcccctggggtcctggccgtggggtggggaccacccccttgggccctggctcctgtgtgaagccttggatgatgcgggccctgactctggctcccgcaggtggacactgacaccatctggaatgagcttcattcctccaatgcagcccgctgggccgctggcagtgtcactgacctcgccttcaaagtggcttctcgtgagctaaaggtaggaggtttgggttgaaggtggacacaccacaaaggaggaagcagagtggggtagtggggaatccaggcccagaaccccaggcatcgcattcctcttagagattgctacagggttttggaggggaaattgagggctctgggaaccaggttgagattggaactcttggggtacgttcatgcagctgtgggtcagagctgtctgttgattgacaagcattctttctttttccagaatggtttcgctgtggtgcggcccccaggacaccatgcagatcattcaacagccatgtaaggctaagggaagacctgggtgggatgaggtggggggcaagcccccaggaacttccttcagggacattctctcttcttccctgagctttctcaggctgggccaacccaggggcctggggaggtgagggcatgtggagagaatgggctggcaggacctgtctctccttccaggggcttctgcttcttcaactcagtggccatcgcctgccggcagctgcaacagcagagcaaggccagcaagatcctcattgtagactgggtaggtgcctgtccgtagcaccctccaattcgagagccctgggggaaaagccctgagcctgatgttagagatgcggcttcatgtcttagttctgcagtagcctctctgagcctcagtttccccttgtgtaaaatttgggtgaagataacacccacatcacagttgggaggcctagaggggatggcgtgtgggaacgcattcagccatcgcaaacccctgcaacgagtaggagctgtcatttgagtgttgtcttttgacctctattggcttcttttggcagatctagtaatttctgcatttcctgtacaggtagtgatgataagaataatagcagataacatcagtacaccactaatcacatccagacactgatggttttacacatgatggatttaatcctgactataacccactttacagatgaaagtgagcacagagagattaagtaactcacacacagtcattcgtaagtcatgagatggatttgaacccaggcgggttagctctagagtgcttgcgtttaactgctaagctatgtcccttctgcactgacagctgtgtaagagacatttctaagcagaagttgagagcggtggaggacctttgcacacttgagttcccgcatggtcctgtgagtcgagtgtagggcccagctctccctacgagggatggggctgggcctcgtgtacctgcccctctgtaaccgagcttggtttctgatctcctcataacttcatgactttatgcaagacagagtggttcctgatatgtgtaaccctgaacccttccctctccttgccackaaccccatgtccacacagttactctctcaggtgggctggcctgagattgggacacctcctctccttcaggatctcatattacagccagccctgtccagcacagagaggccgaggttcagagccgggcagtggattacgtggggccactcgaccatgtggctttaggaaccccaggttcctgatcccagtctagggtcctgacctcagaatggccactgaccttgaaacccttctaacctgtcctggcccccatctctctgccttccctaatcgctgcccgtctccctacacaggacgtgcaccatggcaacggcacccagcaaaccttctaccaagaccccagtgtgctctacatctccctgcatcgccatgacgacggcaacttcttcccggggagtggggctgtggatgaggtaaccgcatgtcagggccacatcttccagcctcattgacctcctcctgrcacttactctgcctctgtcatgacgagctgtgtgatcctgggcagactgctgagcctctctgatcctaaacttccccacctggaaatggggaggctggatgagctgggctggcagctctaacaaactggtgttccccttctgggactctgctgtcctcatgtctctcttgcctcctgttttccaggtaggggctggcagcggtgagggcttcaatgtcaatgtggcctgggctggaggtctggacccccccatgggggatcctgagtacctggctgctttcaggtacgtgctctgggggcccagaggggcaagtccaccctctcctgtcccttctcccaagagcaccaggggggaggtgatcagttggattgtcagcctgtccccaccagttcctagacattgyaggtgaacrccagtgagaataggacaaacagagagaagaatgcaaaagtcaaagggtgctttgcaaaggcatacattaccgagagccaatgtcaaactgattgctggcaggtgggtggtggagtgagcagagctggcacatttagtcagagaaggctgccactctatttgggaaaagagaattctggaaatggatcttcaaacacttttctggagttatctccatgacagctaattctacgagagccctgggctggagttcctggagtcttctcagagcccagggctatgaagaacacccaagcaggccccagagttggatcaggggtagaggaaggcagctgggggggggcctggaagagggagaggatgagagaatgtagccaggtggcgcagaacctcagaggacctagttgtcccctactcagctctcaagtagtgagtagctgggtgtggtcaactcagtccaaaggactgagcacttgtagtccctgaagctttgtgaccagagtccatctccgcaaggctgtgagattaccctttccctgtggctccggccactgcaccccacagatgcttgcatgcacacacacacatgcacacacacatggtcacacacactcctctttcattccctctggtgctccatccttggctcctttctgcctcttgctagttaagtcccctagggggctgagtccttaggctgtgtgtgccagggacatgggtggccagccaaggtcaaggaggtcagagaaatctgccagttgtgctggggcactgggagccttggagtcctaagaacagggtgccccaccgcaaagttggcaggaccgcccctggcaaccctgcacagtacgatgatcrccacttcttgtgacctcacaggatagtcgtgatgcccatcgcccgagagttctctccagacctagtcctggtgtctgctggatttgatgctgctgagggtcacccggccccactgggtggctaccatgtttctgccaaatgtaagggagcctcagctgagggggacgttagggacagagagccaggcggtgcggggagttgggaggcactcccaagtcagaaagggaaggtggcagtggccagcccagggctttcagcctgaggactggagtatggcagctggtcctgaaattccccgggatctcctagccgagcacagcccaagccctttctcaggaccaggccggttcaccacggagggcttgaccaggtcatacccatggggacttaagtccagtaggcaggaagctcagccgtgggactccccaccacagctgggttgattccaggtgggctggcagctcctccagaggaaggggagagagragcagcactctcagaatagagggtggccacagggcccagagtacagaaagaagaragggtgtagctcagtgaaaaagacacaggctagagtcaatgacccaagttcaggtcctaccttgctgccacttactagctgtggggcctttcccaaggcccttaacctccctgagccttgagtgaagcatactagtaggttttgtacgacattcaatgtgaaagcactttggaaatagtgattgatacatgtgagtcattctttattagggaggaagcaagcagggaagccacaggggtagagaacagggtcmcctctccactcccgcccctcccatttctcccctcccaacctctaggttttggatacatgacgcagcaactgatgaacctggcaggaggcgcagtggtgctggccttggagggtggccatgacctcacagccatctgtgacgcctctgaggcctgtgtggctgctcttctgggtaacagggtgagccgtctccctcccccatccatgcttctgtcaggcaggtaagcccggctctcmggactacccaaggarcaggcagatgggatgggacagggtgggagtggccaagcctgaaacaaggtaggcgaagcgraagcctctgttccaagttaggtccaggcagcatctcctggcctaggtagagtgtrcttgtggctagaaggctggggcccctggggtgggagtgagctgggcctgtgggtccctgagagactggtggctgatgtactgttttctataggtggatcccctttcagaagaaggctggaaacagaaacccaacctcaatgccatccgctctctggaggccgtgatccgggtgcacagtaagtgtggagatgggacactcgctgagctcagactgaaggatcttggtggtaccctgccccaccgtggccagatcctagggcttccggtgccagccaggtgacctgctgttggtctggartaasattcctgtgagtgacccaggcagcaatggtgagcaccccccagtgargggttatcctctgagcccccccgatggagccagcagggcctaccagacagtggcccctcaaggtagggactggcctccatctctagckacagccctagaccagggccaggtcaagagcaacactcaggccttgtttgccaaaaggcctggttcccatccctcccctcagtcctggccacaggcgtctcaggagctctgctggcttgggggctrcgtcttgggataacccccacatttgtaaagtactttaaattttcaacttcaactcaacatctattgagcatcttatgtcaagacccataatctatactagggataaaaatgagtaaaatagattcccatatcaagggctgggtaggggagccgtgatgtctttacataatggtaaagacatggctgattcctcttacggtgggtgccctcacactgagccagattccaggacatggttcctcacagcagcaggcaggaggagcattctcctggcctgggcacccatgcagagcggccgtggtgatggtcagttctcccrtgttgtgttcgtcccacctcccaggccctcctttcctgagtgctgggctgagcactggtgggggctgtgtttaagtgggaggcccgagcttggggctctgggaggtcactgtgacacagaccctgtctgcaggcaagcaggctctcctgatgctctcaggagccccgcacctgtggggaatgagtcaaaggtggccttgcagccacaggggatgagagaaaggctgggcacctgctaggactccctcacagccatgttgaacccactctgtgtaccctgtcaggctgtgcgggagtgggagcgaagtgaggagaggggcaggtgggagagccgacccyaagtggaggacaggcccgctcctccggggccctgggcctgagacaccaacctcaatatccggtctaggacgcagtgtggaggggcttgctttctccaaccctttctgacctggcatcttaccccaggtaaatactggggctgcatgcagcgcctggcctcctgtccagactcctgggtgcctagagtgccaggggctgacaaagaagaagtggaggcagtgaccgcactggcgtccctctctgtgggcatcctggctgaagataggtaatgccagacccctggccctgggcccacagcctctccaccgcttcattcctccctgcttgaagaccccgggtccgctatgcagccaccccaaccctcccaggcttcctgaccagggttgagaggaagcttagctaaggcccttgctgcagccctggtgctccagcatcccacccttgtccctccccacaggccctcggagcagctggtggaggaggaagaacctatgaatctctaaggctctggaaccatctgcccgcccaccatgcccttgggacctggttctcttctaacccctggcaatagcccccattcctgggtctttagagatcctgtgggcaagtagttggaaccagagaacagcctgcctgctttgacagttatcccagggagcgtgagaaaatccctgggtctagaatgggaactggagaggaccctgagaggagacgggctgggcggcgacccccacagggctctcgagaacagattctcccctccagtatgggccctggctgtggcccccattcctcaggactgcacagaggaggactggctccggctccgtcgggctcacccttaaccactattcctggctctgcaaaccccagactttgcacacagccycaggctccacacagaaatgtgaacttggcctcagacaggctggcccttcctaggctctaggggctagsggggagtggggagccaagaggtcccatattcctgagtgcaggggtagtccctctcacctgcttcctcagacgactctggaagcttccctctaccacygggcactgagacgaagctccctgacagccgagactggcagccctccatctggtccgtaccctcgccagaggcccccctacatcaacctcctggcgatgccctggtggagcagatgggtgctctgggagtcctgtgcttcctgatccaatggtgccaaacccttcatctccccmagaagcgcagcatacccctgggacccctcggccactgcccactcggggagccttctctgtttctggggcctcccccaccatagctctgattcccaccccacataggartagcctgactgagggggaaggggtgggagagaagatacagacatggaggaggggaggctgctctggcaaagtcttcaaggcttttgggggtccaggcctggggtcaagaaggaaaatgtgtgtgagcatgtgtgtgagtgaggcgtgtgtgtgagcgtgtgtgtgagtgaggcgtgtgtgtgtgtctttcctaggacccaccataccctgtgtatgtatgcatgtttttgtaaaaaggaagaaaatggaaaaaaatctgaacaataaatgttttatttgctttaaaagtgcctctgaaagggccccccagaagtgagcagtgcgccgtcaagcgggtgtgcagggcacacagctgcacggcacagtgtgggtctgagtcactgccggaggagggaccagggtggtctgggccgcagcccctttaacaatctgcccttcctgccctgcaggaagaacccattctgaacacaccctggctgtccctggctgccccactttggggtgacaaagaggaggcagccctgggctgagtccacagagaccagccctgatatggcaggagtgggggtggggtgggggagtgggaatacaggagctcagccccagctcaccacggcatccccgaagagttgtgactcagacacacctgggtttaagtcccagctgggagctcaggtaagtcaaatcgtyttctggggcctctgtttatcagtagaaggctccagaagtatacactgttgatggctccttcccgctctgatgcaccatgcctgattaagcatacactgagcctagaagagagaaggggtgaggcacaggcctggacaagctcacccagcctaagcagagaggaaggcgccaggctggcagcacctgcctttgtggttctgagtctgtccggtttttccagcaggaagaggagcacctcattaccttagacctggcccaagctcccggcagcctggcagagtgtgagggaagaggcgctaatccctttcccatctggcctggcctctcgggtgtggacaccaaatcccgcaggggttgctgtagctatgcccgtgggcatccttgccctggctggggtgtgctagagagaggaaagctggaggaggagagctgagctggtggttaccccatgccaggagggccaaggcaagagggcctgcagccccagagatactgaccctgtcccctgccctccagggcacaactgaactagcggaatggcttaatcagatagctcgagaactgccactaccactccctccctgcccactcctcccaaagtccacctgttcccgcaagagtcccacctcacaagcaaccaccagaggctgatacaaatggccgctgtatttttgctaaagtgacagtgacacagataaggcaaagagctgaggggcaggacacatcagatgggaagggggagaccgtgcaaaatggcagtctaacagaaaatcatccttgtaccaacagccccttccctcccaagttaggtgagcccttgggccagtgtatgggcagaaaagcagatttgtgtccttcagaagggaaatgtaaaaaggtgaaagctctagttgaagggcagtgagaggggctggagtgggagagaaggtctctcctggccggtggtctgggtgcagcaagggcactctgagaaggcagaatggaaacgcagggctggaggggcatgggtacaggtttgggggctctttccagcctctactatgttgcccccttccccaaagcccttacaggggcagaagcacattccccgtgaccctgagtctggcctcatttgggaagtcttctggggtgtatggatgcctgtgtgtgtgagtgagatgggtggggggccacggctatctggctctagcacactcatgggagaccagctctgggaacaacaggatggggtgctgggatgggggtttaagaggtctctgctagatatttctgaactgacctccccaggtgcccaacctggccttgggaagagagtgcctagggcagcggggatggaaacccttgcctgcagcataggtccaggcctcatggccctacaccttgacctcttgactttgttgccctggccttaagtacaaagattcctcactgcgtgctaagaaaacagatccaggccgggcacggtggctcacacctataatcccagcactttggaaggctgaggcgggtgaatcacctgagatcaggagttcgagaccagcctggccaacatggcaaaaccctgtctctactaaaaacacaaaaatttgccgggcatggtggcagatgcctgtaatcccagctacttgagaggccaaggcaggagaattgcttgaacctgggaggcggaggttgcagtgagctgagatcgcactactgcactccagcctgggtgacagagtaagactccatctcaaaaaaaaaaaaaaaagaaaaaaaaaagaaagaaaagaaaacagattcatttgaaaaggtctaaagctgccctctggccaggctgatgaggagcaacatggcaggatcccctctctaccacactcaggtttcctcgaaaggggacgggcaggacagcttcctgggagaccacactcgtcctgctgtgtattttctgccacagttctggggtcaccagggggtgggagtagcctctcccaacatctcagaggctgagtccaggtcctaaggcccccccagggtgcagagacctcaccccctgggtcagaaatcgctgaggatgctgatgtcagcaaagtcagcccggtagcggtgggcatagaggctgagcaggaaggcccacttgaaggaaatgaagctccagacgctggagaggtagtagctggtggggtctgtgaggcctgcagggagagaagtaccgacagtgactttggcaggccctgccctcggcctctgcaccggccacaaggccagggccaccctccccactcaacatccctgcaacgtcctggcagctgaaccaacccttcagaaagacactgtgatggaggttttagagccatggtccccaacctttttggcaccagggactggttttgtggaagacaatttttccacaaaaaccttgggatggtttggggatgaaactgttccacctcagatcgtcaaacattagatcatcaggggcacgcaaccctcgcatgcgcctcacaacagggtttgcgcttctaatgcccgccgctgacctgacaggaggcagagctcaggcggtaaggctcgcttgcccctcacctgctgtgtggcctggttcctaacaggccacggaccactactgttccacagcctggaacagtagaacggagctggggaccgttttagagtattccagggttttcaggcaggaggccgtggggattagggaagggcagggctggccaatcacaggtctgtatcatccactccgcttttgtgacaaataccctaggccacctccaacctgctttagttagcatcagactcccggaagaaggacctctggttatttccagccacagccaccagagggcgctcccatcccagagctgagcacagactaatgggtcccaatatcaggagtgcttgtatgggctatgcactgctcaagacttcacatcagtttcatagaatccacccaacttgcgaggtggggacttgttttctccacatgaaccataacaaaacccgtgtccggggaggttaagtaattcacccagtctctttggaggtaacctgtggaaccaggatgggaatgctgctaaaatccccgctgctgtccctcccatgccctctttccctgggacccgccctcactctgatgccgggtgatggccagcacgaggaaggtgcagaaggcagcgatggagacggccgagaagaggacgcccacgaagaagaagccgcgcagccccttgagccaggtcctccaataatcttgcatgtacatcacgtgcgtcaccaggacccacagtgccagcacccctgcaggagagacacatcagggcccatccccagggtgctccagagccctgcagatccactagaccaggcctatttgcataagaataccaagaatatggtcttgtctctcattccctcatagaatggagttttccttttcggaggctgtgatatcagaagcaggtaagagactgagctgcctgctagtaagcccaacattagagaaacctgcagaaatacaaaaccctaccattctctctgattttattttgttttggaaaacatgaatatctctcacaaaaatgttatgttaattcatgttatttttagtattactttaaaatgctaaaaaatgttctaacttctaatatagtatatatcaatagctaaaactcacatacataaaatttgcatggagtttcactacttttcaagaggataaaaggatcctgaaaaccagaaagtctgtgcctcagcagcccagcctgctttctggggacttgccactgtctaccctgagggccacagagcagggaagccatgctcctgccccatgctcctcctccacccagccctcagaggccacagtctcaaagtcacaaggcctgcagggctcttcccaaactgcctgagttggttttgcaggatgaggaggtccagccatgaagactccagggccacccaacccctgagtggccttattgttcttggccagacctcatgccactccctccattttgcggcaaagggcaggccatcaccacctgcaccgctccccacccccactgcccccagcttttcctgggcctggcctctgcgcctgggtggacacttcctctaggatgccagctgccacccagccaatacaatacaaaacaaccctctgtgccaggcagtgcctgctggtgcagcccaaagagtggaacaaatatcaactccattggcaagggtccgggcagggcggtggatcccggcaagggacaaatgaggaaggaggcagagccagctgcaggctctcagctggttgggttgcaaggtgtgggccactcaggccgctgcatcctaggagtcaggaggcctttccaaaaggcagctgcacacatgccactcagagtagttaccaaatgtgcacaggaaggataagcatctggttggggaaagtggttatctctggcaatggagacaaggaagggaagttgatggggcggtgggggtggggaagtgctttgaatctatgggaatctatgctattttgtttcttaggctgggtgggaaatctatgctattttatctacgctgttttctcaggctgggttataagggtgtttgttaaatcatctatccttttttgtgtgcctaaaatatttcataatttgtttaagggggaaaaaggcaggaggaagcttgtcactgtggagctatgctctggttaccagctcagaggctgtcccagtttggctgtccccagacagtccagtgaggaacaaaaacccatgagactccaagccaagaaaccaggagcctggcactgctgtgtcccaaagccttggtgtttccacatctaaaaatgggtgggcccaggggtcctgccagtttaggtaactgggcccagggttctaccctagtgagggtgaaggcctaccaagcctacagcttccctcagcccctgccaccgtttgaccccctgaacactctcccagctttgcccctgcccacctccactcttcctcagggggtgggggcctggaatgtgggtccccctcctactgagatcagggtgggccaggacaagcatctgttcctccccacctagtctggatgctggagtgggccagaggtggacaggacaatcatcctgcagcttcctcttacctcctacaagatctggatttttataccagccacctttcacagaagtccctcccactcctcacatgtgtcccatgttttcatttgagggagctgtttggtttataaagggccctgggaacaaggggtgttgtcactgagcacactcaaggagcagtctgatgggcacctgtctggaacaggtcccctcgccctctgtctcctcgtgccacagaggggttggggaagttgagctctaagatcctttcccactcaaagattctagaagccagcttgggagaaaaataaggtcagaacaattcctctgtgactcagcagtttctgggttaggaaatgctgaaataggggcctgtgaagatgccatctcttagtccactggccacgatccagtggttccccaaaactcccacccccatgtacatgcacataccaaagagggctgagggcaggagggagaggaagacagccatttgggggcgttttgggccctgttctttgttaacaacaggcatggtttacccacctctcaccttccctcaaccttgctccaggccctgcacagaggcctcccctccagataaacacacatcaagtgtggaggcaggcctgctgcccacgccctggctcccaccaccctcctgggaagggagctctccaccagccctacccaagggggtcactgaaggagatggagcccctcactggtcccctcccacacatcaggcaggaggcaatgtatctccctaatacccttccctggcacacttggggactctaggaagcctggtttataaaactcggggtggaatggacaggtccccaatcccacctggctgcaagcccacaccagaccacaccgttgctccatcctacctgtttcaaggagcagagcccctgcttagccatgtgagcttattggctcacagccgat

SEQ ID NO: 95364 - DNA, 21579 bp, Homo sapiens
gtgaactccacaagggctggggtgggggggtggaggggcggcaaggggaccacataaggtctagggagaatcctgtggaactcactacctaggtacacaagctaccagtccaacctgcaaagctgtctgttcaggcacaaggttggggaaggctgccccctagagccagggtcaaagaattatttatggacattcagcccttttcatatgtattgaatatttattgagttcctacctaggcacctggcgttatactagccactgggaatacagaagtgatcaaggcagacataaagtgaataactatcatagtttgccctatattgaggggttttctgggacgtggaactttttgtggtaaaactggaagagtccccaatgaatcaggacgagtcagttaccctgccttcctggagattatattccaatagggacagcaggagtaggggtggaaagtaaaaatacaattttttgtcatgataagtgctgtggaggaaataaaacagagcgaggaatcctctgaggaggtaacatttgagctgagacttgaatgatgagggatcaatcttataaacactcagagaagagctttccgggcacaaagcacaaaaaacctgggacaggaacaagtgtggcacgtttgagaaacagaaaggcgaatgtgtctgaagtaaaatgagcaagggtgagtaaggctggttggagctggcaagaccccaatcaatttactctaagagctatggaagctactggagtgattgaagcaggggagtaccatgttctggttgttatttttatttatttatttaaattttttttttcttgagacggagtctcactctgttgcccaggctggagttgagtggtgcgatcttggctcactgcaacctccacctcccaggttcaagtgattctcctgcctcagcctcccaagtagctggtattacaggcacgtgccaccacgcctggttaatttttgtatttttagtagagatgggttttgccatgttggccaggctggcctcgaactcctgacctcaagtgatccacccacctcagcctcccaaagtgctgggattacagccgtgaaccactgcacccggccatggctattatttttaaaagattgctccagctgcttggtggagagaggattagagggggaaagacgaacagaggaggaccagttaggaggctgctgcaggtaggtaggtggtgatgatggtggctggactagggtggcagagggaatggagagagaggacagggcaaatccaactgtattttgtaatgaatttgttgtaggagcagaggaaagggaggactcagagataacacctaggtttgggtctgagccacagtaaacaaagacatgccccagggacatcagaggtctctctgcatggggattaacaggagaggaggaagccctgacatgtccaataaactcaatcatctggaagatagctcagtaggtgtatccttgacccagcattgtgggagaagatatgtctggaatgtgtatatctgcggggagtgagaaaggaatgtcagcagtcaggatgtctgcagatggggaattagaaatctgtcttagtgttggtgggacccagttcaaaagagacttcagaaggattgatggtttagacgggtaatctatataggacctgtttagatgaacttcagtggaatgagggatgatgtattaggataataaggttagctgtaacaagcaactgagctgtaacaaagccactgacacttctcactcatattctatagtccagtgagggtctaggggacaggggtagctctgctccatccattcattcaagcctaggttctttccattatgtggtacatatggcctctaaaattgtcacagaatgggaagagggaatgcaggttgtatggaagatttttaaatgagcccagcctagaaatggcgcacattgcttctgccttcattccattgttcagaacctgatcccatggcatccgtttgactgcaaggaagctgggaagtgtagttcaaatttgggaggtactgtgcccagaaagagacacacaaatgttggtgtgtgttgtggagcactagtagtttctggcgcaggcagggagaatggctgtgcatcttgtaggggtcgtagtagtgtctgtcctgggctgggttgggagtgtactctctgagaataccttggaaggaagctgatatgagaagatgtgtatgagtggtgcacacccatgtgctttatggctcaacaatcattccattctttcccattctcaaggtctttcactggataagatcttaattctctcacaccttaccactgaaataaccttgtgaatgctttatcctctacaattttcccccatcaaatctaactggatattatagtctaactaatcttcctaagacttggcgtatgtcatgcaatccctgttcaataaaaacaataacaatttcaacagcagcagcaataatttgttgaattactgtgttgagcactttgagtgtattatctcaatatatctcgatctttgtaacaagcctgtgatgtttcatcatcattccctgtgtacagatggagggacaggagtcctgggtctagctgtgctaacacagtagccactagtcatgtgcagctacttaaattaattaaattaaatttaaattaatttaaattaaatacactaaacttaaatacattaaatttaaattaatttaaattaaatacaattaaaaattcagttcttcagtcacactagtcacatatcaagtattcaatagccacctgtgattagtggccaccattatggagggtgcagatatggaatattttcttccaggcagaaagtcaattggattggacatctgtgagttaggggcacttgcccagggtcacagcaaatggtgaagctaggcctctgaccccacctgagtctaatgctctgcaatagctcttcattgtttccacaatttaaaaaatgtttaagcctggccttagccttgtacaacctggtctagtactactgttacataattatttctctttcttttcttgcgcaatctcactttccagcacagcaagcttgctcactgctctcccatactcctaatatgtccactcataatatttttgctctcctccttctgtctgctcagctaatgaattctcccctgacctttaggttcagatagctgaaatagctcttgaagcagtttcgtctcttccattctctctgcttctgcctggaccagctctgaagcccctcatcctctcttgccatggcagccttctgctgctactaattctacttcctgacatttattgagtatctaccatgtgctaggcactcttccaggcactcctcatcacaacactttgaagtaggtgttactgcagtctccattttaaagacctggtaattaaagcactgtggggtgaaatttgtccaactcatctctctgcttctagtgtttcacaggcagttcgccttcactctattactctggccatagttctaaaacacagaattgtgagttttctcccccagccccaaggggagggggacagccttcttaacagagcatgcaaggccctttatgttcagaacctttctaatctccaaacccgctactctaccttcaaacttgacattccagccacaaacgacttacagtttcccaaagcggccgctttatttcttccctctgcgccatcacacgtgcggttcccactgcctggagtactgtccatcctggccagctctgaagccatccatggaaatgcactccgsaccacggggcttgctccctcctccacaggaccagcactcactctccaccggcagctcctaaaggagggctgctgctgagctcacagccttgacatcacttctcattaaaatacacactccaagattcaaaatttaataggcaggggtggggctgggtttatttttttatttttaaagaagctcccagattattctagagtgaggcaaatgtgcttaacactggtttacatcccttgtttggcagttaagcacaccctgtctagattccttgtgtataattgcttttgtttttattttattcttaccttcattcactcacactcacctattcaacaaacatttattaaggggtcattatatgccagacatgcttttagatgttgatgtgaacaaaactggcactgtccctgctcatgaagtttatgttccagagggggtgtggtgggtgggataataatggcccccaaagatgtccacgtcctcatcccagaacctatgaatatgtcaccttccacggcaaagggatttattttgctgatgtgataaaattaaggatcttgcgatggggagattatcctggactatcccctcaatcacaggggtccttagaagggaaaaggaggaagagggagttaaggcatgtgggtagcctcactctagaagctggaaaaggcggccgggcacggtgggctcacacctgtaatcccagcactttgggaggctgaggtgggcggatcacctgaggtcaggagttcgagaccagcctggccaacatggtgaaaccccatctttactaaaaatacaaaaattagctgggtgtggtggtggaagcgtgtaatcccaacttctcgggaggctgatgcaggagaatcacctgaacccaggaggcagagattgcagtgagctgagatcacgccactgcactctagcctgggtgacagagcaagactccgtctcaaaaaaaaaaaaaaagtcaaggaaactgattttcccctagagcctccagaaacaaggcaaccctgatgtccccttgattttagcccagtgagaccattatttggattcctgacctacagaactgtaaaataataataagtttgtgttattttaaatcagtaaatttgtggtaatttgttacggcagcacacacacaaaaaaaactaatgcaaggggtattggttatgttttgtgcaggtatatgatgggcctccccatgtggatccttagtgctgtggcagagcccttgttattgtgctgggattttccctccagctcccggccggaagctgggctcacgtgggagctcagtgccctcctgctacagatctgtctcttccttacaatggtatgatcccgagggtcagggtgaggggtttgggaggataaggcttgtgctgataaaaggaaaggtgaggtccgttgcagtggctcaagcctgtaattccagcgctttgggaggccgaggtgggaagacagcttgaggccaggagttggggaccagcctgggcaatatagcgagaccctatctctacaaaaaataaataacaaaaaatactagccaggcgtggtggcacacacctgtagtcctggctgcttggaaggctgaggtgagagcattgcttgaatccaggtgttggaggatgcggagctatgatggcgccactgtactcctgcccgggcaacagagtgagactctgtttaaaaaaaaaaaagtagggatttgtggggagctgtgcgtgaggatagaatgtatagaatgtttgcagtcagaaggtgatggtcgcaggggttcccagactttagtgtgtggagaaatcctctgcgatatggtgggagggaacctggttgatagaaggacgggcggaaggaattctattcacagcgtactctaatatttcttaagttttacctattaatttttaacaagaaattttaattttaattttaaacgaaaatacgcatcgtactcagaggtaaagatttttaatcctcgcggttcgctcgtataaaggcatatttccggtcccttccaaggtccaacaatccggacacggcgggtctggggatgggcccaggaatccgcctttttagcagcattcccccaaacgacacggcagcttcgcaaagcggcggtggcgtctgcggttccgggcgcgggcggcctccggccggggagggcgctgtgcgggcggcgctgggggcgggccgggggcggagcgcggggcgccggctgctctggcggctcccgcggctccggctggcggcttcgggccctgcacctgtgactctcggccgcgctcgccctcggcccgcccggcgccgcagccccatggccccgtccaggctgcagctcggcctccgcgccgcctactccggcatcagctccgtggccggcttctccatcttcctcgtctggacggtggtctaccgacagccggggaccgcggccatgggagggctcgcaggtaccccgggacgctgggcggcgcggggcgggtgcgcggctgcggggcgggcgccgtcagctgctccaggacgctccccgcgagcggcgcttccccgcggagcgggtggagtgtttactcgaaaacagcggttggcggcggcaggccccacgcgggcccgggctcctgggcattcctgggtgcctctgagacccgatgcccgcccgggcgccacctgggggtgccgacggcccgccactgccggctgcacagacctgccgcgccgcccgggttatctgtcacggcacactgcctgtcgccctccgcccagttgccccacgacagtgtcccctccgcgcgcccgcggcgctggtcgcctcctatccccaaacacacacacacacacacacgcacacacacacggttgttctgagggatcccctgccccccaggcgccccttccctgggtgctgggtgagggcagagagggaagaagtgggaaaggaagagggctaggggtggctggggaagcccatctccctccttccagagggctcccccgcagagccctctgctgagacccacagggaggacggcgttagggatctcatagaaactggacattctctttccacccatgttggtgcctttttgctacccgtctgctgtggctcctcagccaagctctgccaaatcctgcaggccagccgccctttctgtgcttctgggagggaaggggaagcatcggtgcgctgatgggggctctgggctgaccagtgctccttgttgtgcacatttgggctcgcagtttaacctctctgcgccatagaattggtatgaagatgaaaaatattatctctactttctaacattttaaaaaatgctttctatgtgtcaggcactatgttaagcaacctgcttcccttatttcatttaatccttacattagtctcatgaagtaggccttacgattatgtccattttacagataaggaaactgaggcctgaagttaaataaattgcttacccgggattacacagctacatgaaataatatgtgtgggaaaggactttgggaagaaaatacgtataatacttttacatatgatgattatattccattactaaaatcctcggccaaaagaaccctaaatggaataactaaaaataactaatttactcactgccacagggagtgctgagtgccatccctgggtagagtcgcagcatgaggtggggttaatgccttagaagaggggcatacagggccccaccctacacaatgccaacraagcactgggtcaccaagaaggggggatgggcaccctggctagggtgttctctgcctgcccagctgcctcaccacctgtgggatcctgaggacaactggcccatctctgcgcgttatctacagagccctagttcctttccccactgcaccccgccaccctccatgtttgtcaaggttcacttctccctgccacttttttgtttcctattggccctgttgctttcccctctggaaggcggcgtcagagccctatgattgcattgcgaagaccgaaggcaagagaaggatgagcagggagggccagcctgggatctcagctggttgtgttgagtctggcctggtacaagtggaggtgaaccctacctggccgtttgaccctatcmtgggccacagtttcctcatctattaggagtgggaggagatgtccccaaaagacatctgacttccctccagatctgaaatcttgcagtgctgcccactccctgagtctccagctgcctcctagagggctgtggaaaaggccttctttcttatactctagggagttgcctggggttttcttccgacccaactctgccctctctccctccccacaggcttcccttggcctatgaggcaggccagctgtggagctgccttcagagagaggcgctagggcagcagctcgctagggcagcagctcgctagggcagcagccagctggagtagggtcctggtatctccctgatggtctgatctttgacagtggctgtggaagagccaaaactgcttggtagtggtggtggtggatggtggcagggagaggggttgccaagcctgggcctccgaccttycccaccatgagtgagttctcagagggtctgtggccagtcaaccttcttcctcttttgggggtaaagtgtcagcagattaactaacktgtgagcaccctacttctgactcagcgttttatagctcagaatctgctgagtcacccaagggtagccccagcatgctccttctcctgtgttggaccaggcaaggactgattggrtgtgccagtttctggagcagagtcatggagcccctgggtctggtgggcagagtgttcacgggtggggataccctctcccatcctgatgggtaccttcgaagaagtggctttggagaaaggcagtggcagaagcaagactggctttcctggggaggcgggcaggtgtgggttggatctacctggtctggctttgctgtgggagtcctgggggaaaacacaaactcttgctctgggtttagtagaccaaggaaagagaaaaagaaaagttgctcctgaagtctaaacagctctatgtttttcccaggtgagctgtgagcaagagccctggggctccaggactgtcttcctcctaggaaggaatagaggggcctgacctaggcccagtgtccttcttgtctgcatttaccctgtgggatcccccgggtgtctcctgtctcctcacctccagcccagccactggggatgctttcaccgccctaccctatgccttccttacccttagcttatcggctgtgagccaataagctcacatggctaagcaggggctctgctccttgaaacaggtaggatggagcaacrgtgtggtctggtgtgggcttgcagccaggtgggattggggacctgtccattccaccccgagttttayaaaccaggcttcctagagtccccaagtgtgccagggaagggtattagggagatacattgcctcctgcctgatgtgtgggaggggaccagtgaggggctccatctccttcagtgacccccttgggtagggctggtggagagctcccttcccaggagggtggtgggagccagggcgtgggcagcaggcctgcctccacacttgatgtgtgtttatctggaggggaggcctctgtgcagggcctggagcaaggttgagggaaggtgagaggtgggtaaaccatgcctgttgttaacaaagaacagggcccaaaacgcccccaaatggctgtcttcctctccctcctgccctcagccctctttggtatgtgcatgtacatgggggtgggagttttggggaaccactggatcgtggccagtggactaagagatggcatcttcacaggcccctatttcagcatttcctaacccagaaactgctgagtcacagaggaattgttctgaccttatttttctcccaagctggcttctagaatctttgagtgggaaaggatcttagagctcaacttccccaacccctctgtggyacraggagacagagggcgaggggacctgttccagacaggtgcccatcagactgctccttgagtgtgctcagtgacaacaccccttgttcccagggccctttataaaccaaacagctccctcaaatgaaaacatgggacacatgtgaggagtgggagggacttctgtgaaaggtggctggtataaaaatccagatcttgtaggaggtaagaggaagctgcaggatgattgtcctgtccacctctggcccactccagcatccagactaggtggggaggaacagatgcttgtcctggcccaccctgatctcagtaggagggggacccacattccaggcccccaccccctgaggaagagtggaggtgggcaggggcaaagctgggagagtgttcagggggtcaaacggtggcaggggctgagggaagctgtaggcttggtaggccttcaccctcactagggtagaaccctgggcccagttacctaaactggcaggacccctgggcccacccatttttagatgtggaaacaccaaggctttgggacacagcagtgccaggctcctggtttcttggcttggagtctcatgggtttttgttcctcactggactgtctggggacagccaaactgggacagcctctgagctggtaaccagagcatagctccacagtgacaagcttcctcctgcctttttcccccttaaacaaattatgaaatattttaggcacacaaaaaaggatagatgatttaacaaacacccttataacccagcctgagaaaacagcgtagataaaatagcatagatttcccacccagcctaagaaacaaaatagcatagattcccatagattcaaagcacttccccacccccaccgccccatcaacttcccttccttgtctccattgccagagataaccactttccccaaccagatgcttatccttcctgtgcacatttggtaactactctgagtggcatgtgtgcagctgccttttggaaaggcctcctgactcctaggatgcagcggcctgagtggcccacaccttgcaacccaaccagctgagagcctgcagctggctctgcctccttcctcatttgtcccttgccgggatccaccgccctgcccggacccttgccaatggagttgatatttgttccactctttgggctgcaccagcaggcactgcctggcacagagggttgttttgtattgtattggctgggtggcagctggcmtcctagaggaagtgtccacccaggcgcagaggccaggcccaggaaaagctgggggcagtgggggtggggrgcggtgcaggtggtgatggcctgccctttgccgcaaaatggagggagtggcatgaggtctggccaagaacaataaggccactcaggggttgggtggccctggagtcttcatggctggacctcctcatcctgcaaaaccaactcaggcagtttgggaagagccctgcaggccttgtgactttgagactgtggcctctgagggctgggtggaggaggagcatggggcaggagcatggcttccctgctctgtggccctcagggtagacagtggcaagtccccagaaagcaggctgggctgctgaggcacagactttctggttttcaggatccttttatcctcttgaaaagtagtgaaactccatgcaaattttatgtatgtgagttttagctattgatatatactatattagaagttagaacattttttagcattttaaagtaatactaaaaataacatgaattaacataacatttttgtgagagatattcatgttttccaaaacaaaataaaatcagagagaatggtagggttttgtatttctgcaggtttctctaatgttgggcttactagcaggcagctcagtctcttacctgcttctgatatcacagcctccgaaaaggaaaactccattctatgagggaatgagagacaagaccatattcttggtattcttatgcaaataggcctggtctagtggatctgcagggctctggagcaccctggggatgggccctgatgtgtctctcctgcaggggtgctggcactgtgggtcctggtgacgcacgtgatgtacatgcaagattattggaggacctggctcaaggggctgcgcggcttcttcttcgtgggcgtcctcttctcggccgtctccatcgctgccttctgcaccttcctcgtgctggccatcacccggcatcagagtgagggcgggtcccagggaaagagggcatgggagggacagcagcggggattttagcagcattcccatcctggttccacaggttacctccaaagagactgggtgaattacttaacctccccggacacgggttttgttatggttcatgtggagaaaacaagtccccacctcgcaagttgggtggattctatgaaactgatgtgaagtcttgagcagtgcatagcccatacaagcactcctgatrttgggacccattagtctgtgctcagctctgggatgggagcgccctctggtggctgtggctggaaataaccagaggtccttcttccgggagtctgatgctaactaaagcaggttggaggtggcctagggtayttgtcacaaaagcggagtggatgatacagacctgtgattggccagccctgcccttccctaatccccacggcctcctgcctgaaaaccctggaatactctaaaacggtccccagctccgttctactgttccaggctgtggaacagtagtggtccgtggcctgttaggaaccaggccacacagcaggtgaggggcaagcgagccttaccgcctgagctctgcctcctgtcaggtcagcggcgggcattagaagcgcaaaccctgttgtgaggcgcatgcgagggttgcgtgcccctgatgatctaatgtttgacgatctgaggtggaacagtttcatccccaaaccatcccaaggtttttgtggaaaaattgtcttccacaaaaccagtccctggtgccaaaaaggttggggaccatggctctaaaacctccatcacagtgtctttctgaagggttggttcagctgccaggacgttgcagggatgttgagtggggagggtggccctggccttgtggccggtgcagaggccgagggcagggcctgccaaagtcactgtcggtacttctctccctgcaggcctcacagaccccaccagctactacctctccagcgtctggagcttcatttccttcaagtgggccttcctgctcagcctctatgcccaccgctaccgggctgactttgctgacatcagcatcctcagcgatttctgacccagggggtgaggtctctgcaccctgggggggccttaggacctggactcagcctctgagatgttgggagaggctactcccaccccctggtgaccccagaactgtggcagaaaatacacagcaggacgagtgtggtctcccaggaagctgtcctgcccgtcccctttcgaggaaacctgagtgtggtagagaggggatcctgccatgttgctcctcatcagcctggccagagggcagctttagaccttttcaaatgaatctgttttcttttctttcttttttttttcttttttttttttttttgagatggagtcttactctgtcacccaggctggagtgcagtagtgcgatctcagctcactgcaacctccgcctcccaggttcaagcaattctcctgcyttggcctctcaagtagctgggattacaggcatctgccaccatgcccggcaaatttttgtgtttttagtagagacagggttttgccatgttggccaggctggtctcgaactcctgatctcaggtgattcacccgcctcagccttccaaagtgctgggattataggtgtgagccaccgygcccggcctggatctgttttcttagcacgcagtgaggaatctttgtacttaaggccagggcaacaaagtcaagaggtcaaggtgtagggccatgaggcctggacctatgctgcaggcaagggtttccatccccgctgccctaggcactctcttcccaaggccaggttgggcacctggggaggtcagttcagaaatatctagcagagacctcttaaacccccatcccagcaccccatcctgttgttcccagagctggtctcccatgagtgtgctagagccagatagccgtggccccccacccatctcactcacacacacaggcatccatacaccccagaagacttcccaaatgaggccagactcagggtcacggggaatgtgcttctgcccctgtaagggctttggggaagggggcaacatagtagaggctggaaagagcccccaaacctgtrcccatgcccctccagccctgcgtttccattctgccttctcagagtgcccttgctgcacccagaccaccggccaggagagaccttctctcccactccagcccctctcactgcccttcaactagagctttcacctttttacatttcccttctgaaggacacaaatctgcttttytgcccatacactggcccaagggctcacctaacttgggagggaaggggctgttggtacaaggatgattttctgttagactgccattttgcacggtctcccccttcccatctgatgtgtcctgcccytcagctctttgccttatctgtgtcactgtcactttagcaaaaatacagcggccatttgtatcagcctctggtggttgcttgtgaggtgggactcttgcgggaacaggtggactttgggaggagtgggcagggagggagtggtagtggcagttctcgagctatctgattaagccattccgctagttcagttgtgccctggagggcaggggacagrgtcagtatctctggggctgcaggccctcttgccttggccctcctggcatggggtaaccaccagctcagctctcctcctccagctttcctctctctagcacaccccagccagggcaaggatgcccacgggcatagctacagcaacccctgcgggatttggtgtccacacccgagaggccaggccagaygggaaagggattagcgcctcttccctcacactctgccaggctgccrggagcttgggccaggtctaaggtaatgaggtgctcctcttcctgctggaaaaaccggacagactcagaaccacaaaggcaggtgctgccagcctggcgccttcctctctgcttaggctgggtgagcttgtccaggcctgtgcctcaccccttctctcttctaggctcagtgtatgcttaatcaggcatggtgcatcagagcgggaaggagccatcaacagtgtatacttctggagccttctactgataaacagaggccccagaaracgatttgacttacctgagctcccagctgggacttaaacccaggtgtgtctgagtcacaactcttcggggatgccgtggtgagctggggctgagctcctgtattcccactcccccaccccacccccactcctgccatatcagggctggtctctgtggactcagcccagggctgcctcctctttgtcaccccaaagtggggcagccagggacagccagggtgtgttcagaatgggttcttcctgcagggcaggaagggcagattgttaaaggggctgcggcccagaccaccctggtccctcctccggcagtgactcagacccacactgtgccgtgcagctgtgtgccctgcacacccgcttgacggcgcactgctcacttctggggggccctttcagaggcacttttaaagcaaataaaacatttattgttcagatttttttccattttcttcctttttacaaaaacatgcatacatacacagggtatggtgggtcctaggaaagacacacacacacgcctcactcacacacacgctcacacacacgcctcactcacacacatgctcacacacattttccttcttgaccccaggcctggacccccaaaagccttgaagactttgccagagcagcctcccctcctccatgtctgtatcttctctcccaccccttccccctcagtcaggctaytcctatgtggggtgggaatcagagctatggtgggggaggccccagaaacagagaaggctccccgagtgggcagtggccgaggggtcccaggggtatgctgcgcttcttggggagatgaagggtttggcaccattggatcaggaagcacaggactcccagagcacccatctgctccaccagggcatcgccaggaggttgatgtaggggggcctctggcgagggtacggaccagatggagggctgccagtctcggctgtcagggagcttcgtctcagtgcccagtggtagagggaagcttccagagtcgtctgaggaagcaggtgagagggactacccctgcactcaggaatatgggacctcttggctccccactccccsctagcccctagagcctaggaagggccagcctgtctgaggccaagttcacatttctgtgtggagcctgrggctgtgtgcaaagtctggggtttgcagagccaggaatagtggttaagggtgagcccgacggagccggagccagtcctcctctgtgcagtcctgaggaatgggggccacagccagggcccatactggaggggagaatctgttctcgagagccctgtgggggtcgccgcccagcccgtctcctctcagggtcctctccagttcccattctagacccagggattttctcacgctccctgggataactgtcaaagcaggcaggctgttctctggttccaactacttgcccacaggatctctaaagacccaggaatgggggctattgccaggggttagaagagaaccaggtcccaagggcatggtgggcgggcagatggttccagagccttagagattcataggttcttcctcctccaccagctgctccgagggcctgtggggagggacaagggtgggatgctggagcaccagggctgcagcaagggccttagctaagcttcctctcaaccctggtcaggaagcctgggagggttggggtggctgcatagcggacccggggtcttcaagcagggaggaatgaagcggtggagaggctgtgggcccagggccaggggtctggcattacctatcttcagccaggatgcccacagagagggacgccagtgcggtcactgcctccacttcttctttgtcagcccctggcactctaggcacccaggagtctggacaggaggccaggcgctgcatgcagccccagtatttacctggggtaagatgccaggtcagaaagggttggagaaagcaagcccctccacactgcgtcctagaccggatattgaggttggtgtctcaggcccagggccccggaggagcgggcctgtcctccacttagggtcggctctcccacctgcccctctcctcacttcgctcccactcccgcacagcctgacagggtacacagagtgggttcaacatggctgtgagggagtcctagcaggtgcccagcctttctctcatcccctgtggctgcaaggccacctttgactcattccccacaggtgcggggctcctgagagcatcaggagagcctgcttgcctgcagacagggtctgtgtcacagtgacctcccagagccccaagctcgggcctcccacttaaacacagcccccaccagtgctcagcccagcactcaggaaaggagggcctgggaggtgggacgaacacaacatgggagaactgaccatcaccacggccgctctgcatgggtgcccaggccaggagaatgctcctcctgcctgctgctgtgaggaaccatgtcctggaatctggctcagtgtgagggcacccaccgtaagaggaatcagccatgtctttaccattatgtaaagacatcacggctcccctacccagcccttgatatgggaatctattttactcatttttatccctagtatagattatgggtcttgacataagatgctcaatagatgttgagttgaagttgaaaatttaaagtactttacaaatgtgggggttatcccaagacgyagcccccaagccagcagagctcctgagacgcctgtggccaggactgaggggagggatgggaaccaggccttttggcaaacaaggcctgagtgttgctcttgacctggccctggtctagggctgtcgctagagatggaggccagtccctaccttgaggggccactgtctggtaggccctgctggctccatcgggggggctcagaggataacccctcactggggggtgctcaccattgctgcctgggtcactcacaggaatcttactccagaccaacagcaggtcacctggctggcaccggaagccctaggatctggccacggtggggcagggtaccaccaagatccttcagtctgagctcagcgagtgtcccatctccacacttactgtgcacccggatcacggcctccagagagcggatggcattgaggttgggtttctgtttccagccttcttctgaaaggggatccacctatagaaaacagtacatcagccaccagtctctcagggacccacaggcccagctcactcccaccccaggggccccagccttctagccacaagcacactctacctaggccaggagatgctgcctggacctaacttggaacagaggcttccgcttcgcctaccttgtttcaggcttggccactcccaccctgtcccatcccatctgcctgytccttgggtagtcckgagagccgggcttacctgcctgacagaagcatggatgggggagggagacggctcaccctgttacccagaagagcagccacacaggcctcagaggcgtcacagatggctgtgaggtcatggccaccctccaaggccagcaccactgcgcctcctgccaggttcatcagttgctgcgtcatgtatccaaaacctagaggttgggaggggagaaatgggaggggcgggagtggagaggtgaccctgttctctacccctgtggcttccctgcttgcttcctccctaataaagaatgactcacatgtatcaatcactatttccaaagtgctttcacattgaatgtcgtacaaaacctactagtatgcttcactcaaggctcagggaggttaagggccttgggaaaggccccacagctagtaagtggcagcaaggtaggacctgaacttgggtcattgactctagcctgtgtctttttcactgagctacaccctctcttctttctgtactctgggccctgtggccaccctctattctgagagtgctgctcctctctccccttcctctggaggagctgccagcccacctggaatcaacccagctgtggtggggagtcccacggctgagcttcctgcctactggacttaagtccccatgggtatgacctggtcaagccctccgtggtgaaccggcctggtcctgagaaagggcttgggctgtgctcggctaggagatcccggggaatttcaggaccagctgccatactccagtcctcaggctgaaagccctgggctggccactgccaccttccctttctgacttgggagtgcctcccaactccccgcaccgcctggctctctgtccctaacgtccccctcagctgaggctcccttacatttggcagaaacatggtagccacccagtggggccgggtgaccctcagcagcatcaaatccagcagacaccaggactaggtctggagagaactctcgggcgatgggcatcacgactatcctgtgaggtcacaagaagtggcgatcatcgtactgtgcagggttgccaggggcggtcctgccaactttgcggtggggcaccctgttcttaggactccaaggctcccagtgccccagcacaactggcagatttctctgacctccttgaccttggctggccacccatgtccctggcacacacagcctaaggactcagccccctaggggacttaactagcaagaggcagaaaggagccaaggatggagcaccagagggaatgaaagaggagtgtgtgtgaccatgtgtgtgtgcatgtgtgtgtgtgcatgcaagcatctgtggggtgcagtggccggagccacagggaaagggtaatctcacagccttgcggagatggactctggtcacaaagcttcagggactacaagtgctcagtcctttggactgagttgaccacacccagctactcactacttgagagctgagtaggggacaactaggtcctctgaggttctgcgccacctggctacattctctcatcctctccctcttccaggcccccccccagctgccttcctctacccctgatccaactctggggcctgcttgggtgttcttcatagccctgggctctgagaagactccaggaactccagcccagggctctcgtagaattagctgtcatggagataactccagaaaagtgtttgaagatccatttccagaattctcttttcccaaatagagtggcagccttctctgactaaatgtgccagctctgctcactccaccacccacctgccagcaatcagtttgacattggctctcggtaatgtatgcctttgcaaagcaccctttgacttttgcattcttctctctgtttgtcctattctcactggcgttcacctacaatgtctaggaactggtggggacaggctgacaatccaactgatcacctcccccctggtgctcttgggagaagggacaggagagggtggacttgcccctctgggcccccagagcacgtacctgaaagcagccaggtactcaggatcccccatgggggggtccagacctccagcccaggccacattgacattgaagccctcaccgctgccagcccctacctggaaaacaggaggcaagagagacatgaggacagcagagtcccagaaggggaacaccagtttgttagagctgccagcccagctcatccagcctccccatttccaggtggggaagtttaggatcagagaggctcagcagtctgcccaggatcacacagctcgtcatgacagaggcagagtaagtgtcaggaggaggtcaatgaggctggaagatgtggccctgacatgcggttacctcatccacagccccactccccgggaagaagttgccgtcgtcatggcgatgcagggagatgtagagcacactggggtcttggtagaaggtttgctgggtgccgttgccatggtgcacgtcctgtgtagggagacgggcagcgattagggaaggcagagagatgggggccaggacaggttagaagggtttcaaggtcagtggccattctgaggtcaggaccctagactgggatcaggaacctggggttcctaaagccacatggtcgagtggccccacgtaatccactgcccggctctgaacctcggcctctctgtgctggacagggctggctgtaatatgagatcctgaaggagaggaggtgtcccaatctcaggccagcccacctgagagagtaactgtgtggacatggggttagtggcaaggagagggaagggttcagggttacacatatcaggaaccactctgtcttgcataaagtcatgaagttatgaggagatcagaaaccaagctcggttacagaggggcaggtacacgaggcccagccccatccctcgtagggagagctgggccctacactcgactcacaggaccatgcgggaactcaagtgtgcaaaggtcctccaccgctctcaacttctgcttagaaatgtctcttacacagctgtcagtgcagaagggacatagcttagcagttaaacgcaagcac

SEQ ID NO: 95365 - DNA, 52772 bp, Homo sapiens
  misc_feature (1)...(52772): n = A,T,C or G
ccagcctgggtgacagagtgagaccctgtctcagaaaacaacaacaacaacaacaaagaaaaacacaaacaaaaaacaaaaatgctcccaaaagaaactttttaaatattttaactatagaaaaaattttaaatataaaaaaattgggggaaaaaattcaccattcagtaacacacactgttaacactggttcatttcctgttttaacacaaagaagtgctttaagaagtaatccacctgccaggtgtggtggctcacacctgtratcccagcactctgggaggctgaggtgggcggatcacttacttgaggccaggagtttgagaccagcctggctaacatggcaaaaccccatctctactaaaaatacaccaggcatagtggcacatgcctgtaatcctagctacttggaggctgaagcatgagaatcgcttgaacccaaggcagaggatggagtgagccaagataacaccactgcactccagcctaggcaagagagtgagaccctgtctctaataataataataatctgcctgaacatttttttaaaagcataattttattcatattgctcttaacaggtatcagctcaataactataatattatggcagaattttacttcagaaccatttttgatacctttgttactatagaagagctagaatagaagcaataaacgtaacagaattcaacgacttacactgctatcagcaatgagagaaaatggaaacaaatgaacagggaaggagaaggcagactaaggaaaaggaaaacacagaatagagagaaagctaatgtgaatgtaaaaggaacatatgggatgttataagacctaagtgtatagatttttcaacttattcctaaattagctactagtcctgaccttatattgatccccttaacagacataaagtactacaaatgaaatagtgaaaaatgtcctaaccacaattctcagtaacactagctaaatgaaatagaatatttacattaatcaaattatttatcatttagaagtagtataacatagtactaaggaacaagaactcttggctgggcgcagtggctcacccctgtaatctcagcactgtgggaggccaaggcaggcggatcacgtgaggtcaggagttcaagaccagcctggccaacatggcgaaaccccatctctaccgaaaatacaaaaattagccggacttggcggcgcacgcatgtttgtaatcccagctacctgggaggctgagacagggggattgcttgaacccaggaggcagaggttgcagtgagctgagatcataccactacactccagcctgggtgacagagcgagactccgtctcaaaagaaaaaagagaaaaaaaaaaaaagaacgagaactctagaaaactctagaaccagagtgcctaggtttaaatcctggctcagccagttatagtacatgactctaggcgagcttcttaacttctgtgtctcagtttccttgtgatataatagggataacaacagtaacctacttggtaggtactattaggtacccttgtaagatggttataaggattaaatgaaccaatatattttaaatacttagaacagggtctagtacacagtaaatgtttgctagggtatacttaactttttcaatacaatcaatgagataatactcctaaatgagcatataaacaatgttctaaccaaaagataattatgtgggctgggtgcggtggctcatgcctgtaatcccagcactttgagaggctgaggtgggccgatcacctgaggtcaggggtttgagaccagcctggccaacatggcgaaaccccgtctctactaaaaatacgaaaatcagccggacgtggtggcacatgcctgtaatcccagctacttgggaggctgaggcaggagaattgcttgaacccaggagacagaggttgcagtgagctgagattgtgctactgcactccagcctgggtgacagagcaagactacgtttcaaaaatagcaataataataattttgtttggtatatagtattacataattaggattaaaatttctcttaaaattattattaagcacaaagatacaaatactgaaaatgttaggaaaacccattctttcactacagcttaaccaatgaaagtagctaaaaggattcaacagctagttagtcttacccatttcaagtcttttcacatcactgactttagcaaagatacaaagtcctataaaagaagacacaaaacagaaaaattacatactgaaacacctacttcacttaattttagaaggtgcagccactagaagtgacatttgtttgtgttcttagtggagaaaaatctaaggtggtaaagagttgacttgatgggaaaagagtaaaaactaaaactagcttgaggtacttccaaacatttctgcaacctgtactacattaaacagcaattacagactacgcacagaatcacagaatattaaagcaagaagcaaattgggagcgccaacccttaagagactgagtggtttgcataaagtcataatgttagcaactacaccgaaattataacctagaaattcttcccaatccattgttctattacctcatgctaaatcacttcataaacaagtgacagactttgtgatggtcctattaagacttttcttccatgtcttactcagtagcctgatactctaatgacaatcaagaactactctggagtaatacaaagtacttcccccaacatcatcaatcaaactgctacaaaccaaagcccctttgcctatataaaaattactgtctcctctgatgtatccactttttccacaaaataaagatgttaaaaaccaaactgctggccgggtgcagtggctcacgcctgtaatcccaacactttgggaggccgaggagggcagatcacttggccaaggaggtcaagacttggaggccagcctggccaacatggtgaaaacccatctctactaaaaatacaacaattagccaggtgtggtgatacgtgcctgtaatcccagctattcaggaggctgagacagaagaattgcttgaacccaggaagcagaggttgcagtaagccgagatcatgccactgcactccagctgggcgacagagcaagactctgtctcaaaaaaaaaaaaaaaaaaaaaaaccaaacacaaaaacacaaccaaactgcttggaactaggttaataaacatatcctcggcacatatggtcttggtagatttccaagaggaggaggctactagggatggtaatagtcacacctatatatatttataatcttataaccatatttttaaaaaatattaagcacttcatcaaccacatagcaatactagggcttcaatgtattcatgaggctggatgatgataataggcattctttgtggtcacaataatgaaagtcacacaaaggaaggcagcttaaagttttcttggcgtacgagaccacgccactggccactgcactccagcctgggcgacagggcgagactccgtctcaaaaaaaaaaaaaaaaaaaagttttcttggcatagctatagactaagcagagtaattatctgattacctagtcttgccaggaaggatccctaaagaatttaagccttagatttatgcttcaaatatatttccaaatgctcaacttaaaaggcttctttactaaaaattcttcaggttattctttccccttctttcttctttaatagagtagactcccttgggttccagattaagggggaaaaaatcttatcaactaatatattagcaacacttttttgacattttaaagttgcttcataattgtcattactagcctttttaaaattattattaagaagaatgccaacttaaaagcttggtgcccaacagaataatcccatgtcaatttccttgcattttgttgggatagatgtgaagagaaaaggaagctagaaattcaaagaattttaccgattatatccagagaggttaagtgacttccctgaaatcacacagatggggcaaaaagaagacaagaatccatgtatcctgactccagggcaaatgcacatttcaaacattatacaacttcaaatcctttaacacaacctcaaagattaatacacactggcaatttaaaagtaatccctcactaaccctggggaatccacactgatttataattttaaataattaaaaccccacatttatattttactacaaatacatccagctacttcagtgtgcttatggtacattcttttagccacttgcagttacattgggagaaggaatattttaccccaagattctccatgaaaatgttggatctggaacctctgatgccaccaaattcaagcaactgtaaaaatgttttctttttaaaaaaatgattctaataattcatttcctagtatacactggtcatgtaatttactgaaagaacataagctgttacagacattcagatgaagtcaggttagtagtggaacacaagataatgggaaacctgaaagaacaaaaaagatcacagtcttgacaactgcggtgaaacacttataaccttacatatatgcaaaaaggggattatgaaagacaatgtctagggctgcaaggaagttactagaaaatatatattgaggctgggcacggtggctcacacctgtaatcccagaactttgggaggccgaggtgggcagatcacgaggtcagcagttcaagaccggcctggctaacatggtgaaaccctgtctctacgaaaaatacaaaaattagccaggtatggtggcaggcacccataatcccagctactcgggaggctgaggcaggagaatcgcttgaacccgggaggcggaggttgcagtgagacaagaccaagccattgcactccagcctgggtgacagagcgagactctgtctaaaaaaagaagaaaaaaatatatatagagagagagagagagagagagagagagagagacgcaatgttagctttatccaggaccaagatgtggttagaacaatttatgatataagaagggtgtgaaagcaaccatgtgaaatcacccttttccaagttctgaaaaacaattatgtgtacaatagtttgtactatatcgtcatgtgtttgaggttctttccttctatttttacatgtaatctctcccaatcactctaacaccttaaataccttaacactctaacgccgtaaaccctaagtgttcaaattctttcatacacattcatttactgtgcaccgactacgtgcattaagaaagggtccctgccactgagcagctcactgtccagtagggaaagccakatccataaacasgtaccgcaagacagtagagctggtacaactgatagaagatgtagaagttgggaagaaaaggacaagagttccaaagccgcaatgcaagtcaacaactgcattcccttagccagaagtagcagaacctgtttttgtacccatccactccctctagacaactcattagatgagtgacatgaagaccatctttgcagttgggataattaattgaagtcagttaaaaatgaataagccttcctaaaagggactagagaggaaaaataaagggtggtagagtgtaaactggaagtaggttaagggatcatgcttatagagatgcttaaagttgcgctttaactgtaatttcaaagtcagggtaatctgtatttcaacatgagtccttaacacaaattatttttatgaagaataaagatttaggagatgatgagatctaatacatccagaataaccaattataacaaagaccctcagtcaaatagttggtagtagataaaaggctttatatgaatattacaagaatcaccaccactccaaatataataagtgtaccaaatatgaagtaaaatgactttaacaaggctgacttgaaagtgataaagaagcaagttactgctaacaagatagtggaaatactgcacaggcaccgataaacagaaatcaycaagctcaaggaaagagaaacgaggcatakatccagagatcacgttagggtacaccaagaaagagacggttcaagggaattaccaggaggcgatgwgccaggtaagcaaattgtggcagttaaggggattttcataacctgagcaggagggtccagacgtttctttctgatggtggcactagcgatatcacatctcagggagataccacagagtaggagagttggagaaatgtttacgtgagacgcagaagtagtcaagaaatatcactcgggtctcaaggaaggcgggagatgaagccrgtaccacagaaagccgagcttcccggtgaaaacagctctccccagagaasacccagctctggcgggaaagccccggaatcgcaaccggcctttccccaagtacggctgggcgctgggatggggcctgctgtaacggcagggagacggtctctccgcggcccaggagagagagaccagaaggaacggcctcaggtagcctaacggccaccggcggccacagcgcggccaccggacagcaggggggaggggaggtggtcccagggggcggggcagaggaaaaggcgccggccccacagtgctccccgcttccgcccagtccagcccgggccggctgaccgggtccgacacagtctcctggaccaggctccctccatcctcacccctcccccagcttcccgccgccactcaccgaaccggaaccggctgccatgcgaaggggtttccggccgggcgcggaacgcaaaacccgggaaccgccgcgaaccggaaccgccttyacagcaccggaagagtcgctaggtggctgaagwggagggggctggggcaggaggtcaaagaacagagttaaggaccagtggggcgcctgcgcggtgtggcgaggcccgagaagcgaagggagcatttaagactagtcgtaatttctcagtacccttttcagtctgggctttttcgctttctcgtactcggaatactgttagtgagcccttcgtcctatgcttttctctgttccctctgctcccttacccgccgccttctggttccgcccggcgagttttgcttgcttgcgttccagtttccatggcagcttttcgcggtggccctaaatctgcggaaacctgtggcttcccccgacagatagggacctgagatctaaatcgatctcaggctatctcgtgttttattgagaatcacagaacgttagtgcttgtagargttattggagatactttagtcttaccaggttcagagaagtgaagtgatttcccaaaggttttaagtgcacggcccatctaggactaggaaacaagtttcttaacttgcaatcctgtactctgcaccacctcatacttgattgaccattcagcaagcaaacaaacaaacaaacaagcaacttgaggacggattaggctagactctggcaagatgtagaaccttccagaactctggaggaatttgaaacaggcagagctgtgaggaaagcttttgggagcccactagagatctgcttttctgggtagagatagagaaggacccaggaatcacctgtgacctttgaagggctttgttgttcctgggacacattgattaacctggaatctgccatactttctaagagaacataatgggaagaaatatgtttgttcattcaggctttttgtcaagcacctcagcttggcaggcctctggacccaggccctgtagaagtcttagagaaatgcccccttaataggtcctttacacccagatcacagccacaggcacagtctgagctcagacttaaagaagggcagtttctggaggcccccagcctttctgatactctcagcagcttgctgagttcagggtttcctcccctgtcaaatacatcaaagtagattatttgtattgcctcatgtgctgatacttttatattatattgtcaagtcctaaggccaagtagtcatgagtgtagctggtccatgtcagtcactgacatcttatttcacagctctgttcgtttggattaaactctgtctctatttctaggaggcagccatgcwtaaagacgagtttcatctgaaatttttcatgtgtgtgattcagtctcgccagttagtcaggactcctcagagaacaggtacccttgtctcctgatcatactccagtgacagagaatgggttctctcacaagaagtctaaatacaggatgtgaggctttctagtgtaaatacggattttaggggtcaactgaccttgtttatcacattctcactttgataaaatattgatcactgagtcgtgtattttccrggtaagattttgacctggtttgttgtgatagatgccaggcagataaggaggacttgagagttgaggggggaacaaaatttatcccatgagcttgtcattattgtgttgttatgtgaattacttcgaccagtctgggctcatctgtgggaatctttattgtcattataactgacactccaaaactatcagataaatcaagccctaaggaaaaatggccttctcatccaccccacctcaaagtatctagttatatgttctgctttcccccatgtatgtcaagggaatagaatctttttgaggtacatcgcgtctctaatttttcactggatttttggaaagaaagccctggacagctcagagtcatagggaaaatgaaagggagtaaggaacactcccttcccagaatcccaccttgagggtgacctaaagctattgtttctcagctggggaagcttctacttccagcatgctcataccaaagccaccaccaaagacagacatcttgaagagtctagatactatggatgatccagacaccgtgggaagcatacctgttttcaaaactggtgaggcatgtgggtcaacagtgagaaatgttcaaaggaatatgggaaagtgaaagttgtatgcatagtattataaatcagcgtagacctactaaagctgaaatataagacccaagggggaargtctgtgtgtgtgtgaaacagagagagagagaaagagagagagaaagagaaagagggatggggagggaaaggaagaagggagagaggtggggatggatcatctgggaaattgtagggaaacagacacatctctatgcagaataacttaatttggtcaatattaaatcaattggctcataactgtaaactactaatctggtttatcctattgtcagcatccttgatatataaatatgtgaaacttaagaaagttgactaaatgagttattattttacaaaatgattctaaatattgtaaaaaattttcatcttaggaaaccatttaataatagatttctcatgtatttttaaatgttcaattcacaggcaatttatatgaagcttcagaaacayatctatgtatttcgtcttaacttaaatacatctatattggagtcaattcactggaaacctttattgagttcccgctatttgcccaataatatactggaaatgatagattataaaacatatgtataaggcatatccttgccattgccccaatagcttacactttggaaatgccttagcgattatttaccccaactctcttatattttcagaaggaactcaggactaaaaggttttcctcagaaagttgataatttcattaaagtaacaactcctagcacttatgaaatatatatcagtatttagccatatttttgagcactcactatttgaaatcattgggctagactctgtaggaaatgagaaaatgaaatagacactttccctgttccctaggagcttatgattaaggacgggagataatatggaacaatgtgtaagttaagaacttaataattttggttcaaaatgttgaattggttcaaaataagatgccatagaaatgtagggttcaaaataactttggttcaaaataagatgccatagagatgtagggaagagaacagccagctgactgctcagagccagcttttcttttccttccttccttccttcctccctccctcccttccttctttcttccttcctttctttttcttttctttccttttttcttttcttccttttgcaactgtttgtggtctacatccctttaatcagacttcctttgcccctgcatagaaagcagcaagaaataaacccagctgatggttttttcctattgtttattgaatttgtacagattatttcytatttgccctcatctttcctgcttttttcattctccttttgctctggtgtacctaaaactcacctcagactccctttgctctgatgactcatttggacctgcttctgtggtttgaactcagcattgtctcatggacaaaattctgatgttcaacttctgcctttaaatcctggggtctgtgtggctcagttaagtggccactcttaaccctttcagctttcctactagagaaaggaaatctaatattttcccagcaccaataaggcctccattcctcctcttctgcctacctccctgcttccttcctcatcctttcctcttcccttcctccttccctcctactcttcctccttctttgacttccttccaagagaatgtgttgagcacatactatgtcaagtactgtacttggcactgggaataaagtagtaaacaaaacaggtacattgtctgctctcatgaagtttatagtcttgtgggactaagacagtaatcacacaatcacacacatggttatataactagaatggtgttagtgcaatgaaggaaaataactccatgtaatcagaggataaaacagggggtgtaatatggcctgagaagtcagaaaaacctttctcaggaagacctgagggatgagtatgcattagccaggcaaagagagaagagctttccagaaaaggggacaataggctgtgaaacgggaaagagcagaatgggccaatgtgacttgatgatgggaggaatagcgggagagtgaactgtacaggtggtgtaagagccagattgtgcagtgccttctaggtcttatggacacttttgagctctgggaaatcactgaagaatgataggatcatattgcgttttaaaacatctttctggctcctgggtggaggatggattggagaggtacgagggtagttatctgctctaatgagatggatgccactgccttgctccatttctcacctctaggcaatgcatcactatagggcaccagtgaaatggtgaggaactcatgtcgtcaaacaacagagatgagcacagagctactggtgcccaaacataaaaaacccctggcctgatgtctttctgcttctgccagccyaagaaattcacagggactccctccagggtgttctgctccttgttctaagtgcagttgtatatggagattctgtgctctagtccttaagaaaaatggaatatatttctttcttgtctcttacctggcagggaagcagctgctgttttttccaacatcttgcctatcagtataagcagctctgcctgtactataatgaggcaggctgtgtgtgtgtgtggcccatagaggatcagctcctggcataagaaagccacttgatcctacactggggcatagcaagggtgtgagtcatctaggctgtacactttacccctatgtcctgacccctaggcttttcaaagaaaggtggttagcatttcaagataggtaagagtgtgggacaactacttccaggaaaaaagctcaggggtagcaggcacctttgtggtccaggctctgatccagcagatccaactgcccactagacataaagcctctcctgtgtataaagacttcgatgatgggcaacctgcctaggtaactagtgactctcaagactacttctagtgacctgaaaatgtgggaagcattccaaaggagtgctgcttcacccayttgctccttgtgtcacagcttctccctggaagataagagctttctatcatatttttcacttcatctaggccatctatcaccagcattgcccatgccccctgctgcccttctgatcctctgtaccttcctttggaagtaaagcagccttgagaagagtttttattaaagaggcattaatgatggaggacctttgcgtagcgaggaaacctttctgcctatgtaacagyatggtggtgcaggatatggaaggcatatttagagtcagtataaatattgatgcgtagtccctttgcaagagtgagagctcaagttaagacaatgagttcagcttgctgagaggtagtggagcggggaagatcagtagcctcaatgatagatgtggaagatactatagcatagcctgcctttgctggtgagtggcgattaggcctggtggaactgccatcagtaaaccaagtgtgatcagggtgaggaacaggaaagaaggaaacatgggcaaatggagtgaatatcgggtggatcaaagagagacagtcatgggggtcaggtgtggtatccagaataatgtgggaggccggatggaagtctgggccaggaacaatggtaattgtgggatactcaacaaagagtgagtatagctgaaggagccagggagcagaaagtatatgcatcaggtgtaaggaagaaaatagattttagaagttatgagagctgtagagagtgagttgagcatagtttgtgattttgagggcctctaaaagtattagggcagcggcagccgctgcacagaggcatgatggctaggctaaaacagtaaggtcaagtcatttggataaaaaggctacagggcgcggtcctggcttatgtaagaactccgactgcacggccctgcactttggctgtgtgtaatgaaaagggttgggatgagttagggagagctagtgtgggggcagcttctagggctgtctttaaggaacagaaaggagcggcgaaaggatttaggatctgtggggtcagctaggtttgcttttgtgagtttatataatggtttagtcaggatggtaaaactaggtatccaaaggtggaagtacctaaccatgcctaggaaggaaaggagttgttgttttgtagaagggattggggtttaggagatttgccagacacgatcagcagaacacgtgtgttttcatgaagaattatgytgagataggtaatggataaggaagaaatttgggcytgactgaagtaatgggggctgtccgtgaagccttgtggcagtacagcccaggtaatttgctgagcctgatgggtgtcagggtcagtccaagtgaaagtgaagtgaggctgggatgaagggtgcaaaggaatagtaaagaaagcatgtttgagatccactacagaataatgggttatggaggggttgtggagggaggtattgaggttaggagagtatatgcctttggcaccacggggtggataagcaagacaatttggttgataaggcgcagatcctgaactaacctgtaaggcttgtctggtttttggataggtaaaatgggggaattgtaaggagagtttataggttttaaaaggccatgctgtaacaggtgagtgataacaggctttaatccttttaaagtgtgctgcgggatgggatattggcattgagtggggtaaaggtgattaggttttaatgggagggtaaggggtgcatgatcagtcgccaaggagggagtagaggcatcctatacctgtggtttaaggtgaggagatacaaggagaggatatgaaggagactttgaactgggaaaaaaggcagcaatgaggtgtggctgtagcccaggaacagtcagggaagcagataatttagttaaaatgccttgacctaacaagggaactggrcaggtggggataactaaaaaggagtgcttaaaagagtattgtccaagttgtcacgagagttggggagttttaaggggtctagaagcctggctgtcaatacccacaacagttatggagacaagggaagctggcctttgaaaagaaggtaatgtggagtgggtagcctccgtattgattaagaaggggacggacttaccctccactgtaagagttacctaaagcgtctgtgatggtccaggaggcttccgaggcgactgggcagcgtcagtcttcagccgctaagctgagaagatctgggaaggagtcagtcagagagccttgggccagagttccaggggatctgggagtggctgccaggtgagttggacagtccgatttccagtggggtcccgcacagatgggacatggcttaggaggaatcccgggctgcaggcattggttggcccaagtggccagatttccgacacttgaagcaagatcctgggggaggcggtcctggaggaacacctggccgctggggttcaggcattgtgaagttcttgtgtgctggagatgtggctggggtttctctcacagtggaggcaagtaattgcaactcagaaatacgttgcctctactctattattgtacaccttgaaggcaaggttaattgagtccttttgtggggtttgaggaccggaatctaatttttgaagatttttctaatgtcaggagctgactgggtggtaaaatgcttattaggaataaggtggccttctggccyctctgggtctagggtggtaaagcgtctaagggttgctgctaagccggccatgaactgggctgggttctttacctcgggtagtttctttaagtttgtcataattaacagctttgtaagctgcctttttaagcccttcaacttggcaggaaaccatgtagtctygcctagctatatctggggaatcggccggatagttccattggggatcgcctcagggaactgctctaatgccttcctggaggtgtggttcrtgaagccagcagttatcagcatgcgattgggctagagaaaaaactttcccattcatctggggagagggtagaagttaggatgacatttaggtcactccagattaaattgtaggacagagctcgatgtcggaattcctgtatatatttagtggggtctgatgagaaagagcctaaacgctggctgattcgggaaaggtctgatagagaaaaaggcacatgtaccctgactatgccttcagctccagccacctctctaagaggaaatttttgggcaggtgggggagagctagtcctaggacgaaactgtaaaccggaccgggtgtggggaggggaggtaatagaagggttatagggttggggagcaaaggctgaagaagagttggagcctgattcagcctggcggggagcgacctgaggaggagcagtctggggaggaggtgagaggtcagatggttcagtagaaaaggaagattcagaagactcagcaacgcttggggttgggactgaagggacaggccagagggaaagaaggaggatttgggacgagttgcattgggaacacagactagggagggaacaaagtgtgaaaaatgcctggatgtaaggcacctcagaccatttgcccattttttcaacaaaaattatctaggtctcgtaggatggagaaatcaaaagtgccgttttctggccatttagaaccattgtcgagtttgtattggtgcaaagcggtgttgcagaagaaaatgagatgcctagattttaggtcaggtgagagttgaagaggttttaagttcttgagaacacaggctaaggcagaagaaggaggaatggagggtggaaggttgcccatagtaaaggaggcaagtttaaagagaagagtagagtcatggagaagggggatggggagcagctctgggctgcaatgtgggtgagcagccaaagcaggcatccctgcaattgacttgccaccaagggaacacgggtgaatgatcaaggcaggcgtccctgtggagatcagacaccaatggaacatgggtgaataatcagagaggcatccccacgataattaaacaccaagggaaggctgctgacccgggtcttcggcaccaaatgtttcacgtgtccatgtgaagagatcaccaaacaggctttgtgtgagcaacgaggctgtttatttcacctaggtgcaggtgggctgagtccgaaaaaggagtctgcaaagggtggtggattatcattagttcttataggttttaggataggcggtggagttaagagcaatgttttgagggaagggggtggatctcacaaagtacgttctcaaggatggggagaattacaaagaaccttcttaaaggtgggggagattacaaagtacattgatcagttaaggtggggcagaaacaaatcacaatggtggaatgtcgtcagttaaggctattttcacttttgtagatcttcagttgcttcaggccatctggatgtatacgtgcaggtcactggggatatgatggcttagcttgggctcagaggcctgacagcctgaccatcttgggcacatgttctcaggatctcctgagggctgtatcacaggccattggtcactcatatttggctcagaataaatatcttcaaatattttacaaattttgacactttttgtcatatttatatgacacattttatttatccattctttagttgatggactttgggctctttccacattttgccaacattgtgaataatgttgctatgaacattggtatacagattttgtgtgtacatatgttttcatttttcgtaggtatatacctaggagtggaattgctaattaatatgatgactctatgtttaacatttgaggaactgccaaatttccactgcagctgcaccactttacattcctaccagcaatgcagaagggttccaatttgttcacatccgctgtaatacttttctttctttttcctttccccccttccctcccttccttccttccttcctctctctctccctcactccctgcctccttcctttcttcctctccctctctccttccctccttccttcttttctccttccttccttccttccctccccctctccctcctttctctctctccacccctccctacctccttccttccatcttccttcctttctttttttcttttttgataatagccatcctaatggatatgaagtagtattttcacttcaaatgaagtagttttgatttgcattgccctaatggctattgatgttgagcatcttttcttgtactttttagccattatatatcatttttagagaactgtctattcaagcctttgctcatttttaaattttttatgtttgagacaggatctcactctgtcgcccagggtggagtgtggtggcgcaatctcggctcactgcaagctctgcctcccaggctcaagtcattcttgtgcctcaacctcctgagtagctgggactacaggcatgtgccaccacacctggctaattttttgtatttttgtagagacggggtttcaccatgttgcccagtctggtcttaaattccggagctcaaacaatccacctgccttggcctcccaaagtgctgggattacaggtgtgagccattgtgcctggccagttttccctacttattaacatcttgcattagtgtggtacacttgtgataattgataacccaatatttatacattattattagctaagttccatagtttacattagggtttactctttggattgtatagttctatgaatttgacaaatgcataatgtcatgacaaatgtatgtcatgtatctgttatagcatcataccgaatcattttagtgcccctaaaatcccctgtgctccacctattaatctctccttctctatcccaagccccagtaacaactgatatttttattgtctccgtagttttaccttttccagactgtcatacagttggaatcatacagtatgcagccttttcacactggcccgtttcactatgtcttttcctggcttgataattttttattgatggaaaatattccattgtatagctgtatcacagtttgtttattcaccttttgagggacatcttggttgcctccagcttttggcaattatgaataaagcttttataaacattcatgtgcaggttttttgtgcagacataattttcagctcattcagctaaatacttaggagtgctattgctggatcatgtggtaagacaatatttagctttgtaaaaaactgtcaaactgtcttctacagtgactgtaccattgtgcattcccaccagcaattaatgagagttccagtggttccacattctcattagcatttggatttttgaattttaatcatttaatcattctaataggtgtgtagtggtgtctcactgttttaatttgcagttcgctaatgacatatgatgttgacatcttttcatgtttatttgccacctgtatatcttctttggtcaactcttttgcccatttttaaattgaggtattttctttttattgtcactgaaaagagtcaaactgtaaaacatttgaagagatttatcctgagccaaatacgagtgaccaatagctcccccatgacacagccctcaggagatcctgagaacatgtgttcaagatggtcgggccacaagttggttttataaattttagggagatataaggtatcaatgaatatatgtaagatgtacattcatttagtccagaaaggcgggataactggaagcagggaggggggagcggggcttccaggtcataggtagattcaaagattttctgattggaaattggtgaaaagagttaagttattgtccaaagacttaatagaaaagcaatctgtgaggaccaaggttttatcaggtggacaaagcttccaggtagcaggtttcagagaatagattgtaaatgtttcttatcagacttaaagagtctgttctatcagtaattccaaaagggaggagcatataatgaagtgtgtctggcttcccctttccatcaacgtctgaactagtttttcagattaactttggaatacccttgactgagaggaggggtctattcagatggttgaggggcttataattttatttttggtttacattcttaatgagttgcaaatgagttctttatttattctggatgccagccccttatcagatacatgatttgcaaatattttctcccattctgtgggttgtctttccactttcttgatggtataatttggagaacaaatgcttttattttgtgtagtcaaatggggttttatctcctagtcacttgcatttgtattgtttgtgccagaatgtgcagaggtagagatamaagtaagcaagaggaagagggcagtggtaaaagcaagaggagacccgactgtggagacaatgaagcaaagggaaggtgagacttgagtaatggatgcacctcttgctctgggagcatctgaccctttttccagagtggatcctgtttgctgtgaagcccaatttatatgtttgcttcactgccagaatcccgcccccatccctccccactgcaggcttgagaagtggcctcacagacacgcccttccctcttgacactttcattccaaatagctagcttttctgtactttctctgagaaaggtaatgtaaatgtaaaagaagtttttgaggctattctatagaagatgtcataattcaatgttcctcaaaggcagggactatatttatttttttaaacctctcggcacctaatgcaaaatctagcacacagactcccaagaaatgtttgcttaaagacggatagagggccacaggggcaggttttattagcagttgctgaagatgttggaatgcaaggtgtctcaggcagtctggactaggaaaaagttctgtgttgaaaacaagagaagcaacgaaataatttattattcccattaaataaagatgctgatggctctcgagatagatatgaggaccccaggactctggggagtgaaggaactaagccgctgccatatctgagctgagtacttagggggaggaggaagaggaggagaaaggcaagcaggaggagscggagmcttcttgtcagcatctgttagtggaggttgggaagcctctcctccttccccctccctckttgcctccacctggctcctccccatgttcgtccatcacccctcccccctttcccaaggacaatctgcaagaaagcagcggcggaggagagctaagactaaaaggcaagaggggccattgagtgaagagcaagggggagagctgggagtgaggtgggaaggtatgggccgggagcaggcggtagggagarctgaaaggagcagaaaggaaaagaagagatacggcatcctaagctggagccgagagggggatgggcagggcagtcgtgaaggatcctagccccttggccagtcccctccgcttgcaggctcagctgcattccccaggaatctgggatgggtgggtggggctcgggacgggttgcccttggctgcctgaccctaccctggcactcacccaattcaaatcagtgctcctatgatgctgcttttctgttcctccctgccgcgtgcttatatacgcacgtgattttagagatatgttttaatatctgtctgtttttgtctacgtgcgtgtcattgtgggtctgtaagggatgcttatacatgagtctgcatgaatttctgtgtcctgtgcctctataactgtcttagagatttcaggagaagaatatgagcggtttttacaggtcagcactcttaaactcctcttgttatggcgaattttctccctcactgacgcttccaggggtggaagagctctgtgtgggattctgcccccgtcatgagctccaagagtgaatgagaagaaaaaacgggaggaaagggatcagcatacccagatgtcttgttttttcctttccacctttttgccttcctatttgccctagtcacttaatctttctttttggaaaacagcagaaatttggacatgaacattccagttaaataagagcgtctctagtcacgcgtgtctctatgttcctttcactgtttgtcactatatgatttctcaagtccaagttaaaagtgtgttttaaagtagaatatggaggtatatctgtatctaagccgattttacatttttcatatatttgtatttcatgtagttcatcagttcattaacgttttcaacaagtatttattggggtcctgtaatgtgcatagactttgcaagtctttagtgagctgtgggagagtttttaaaaatgatcatgatccctgccctggaggagttctcagtctagttaggaaaaatgactttagcagccatccagtccagtggttggcaaacttcgtctgtaaaagaccagatagtaaatattttaaactgcaggcttatgagtctctgtcacaatatccattctgctgttgtagcacaaaaacatccatgataatacgtgaatgaacgaaggtagtgcacatactgaaatttgaacttaacatttttcacatgtcatgaagtactttttgcaaccactaaaaaatataaaaacctttcacagcttactgccatacaaaaatgtgagaagggctggatttggcctacaggctgttgtatgctgacccctgatctagtccaaccctcttatcagtgcgtacgaaactattaaaatgccacataaagcaggccgagcatggtggtttatgcctgttatcccagcactttgggaggcaaggtgggcggatcacctgaagtcaggagttcaagaccagcttgaccgacatggtgaaaacccgtctcaattaaaaatacaaaaattagccgggtgtggtggtgcatgtctgtaatcccagctactcgggaggctgaggcaggagaatcacttgaacctgggaggcagtgatccagtttagacaacatgtggttagaggaagtccaaaagaaggtttccttgacctgtggtaatcagtgaaggtttaataagggtacaactatcactggtcttaaatgatggaatgggatgtgaatctgtggaaagggccagggtagccacctggacaagggatgcagtgtgcccaggcacaaaagtgggaagagcaaagtaatgttcaggtgacaatggagcagagaatctataggaccaacagttgaagctatatgcaagggctaaattgtagaagcttcgaatgccaacccaacaagttgggaccttatttgttagtactgattatatgtagtacgttcattaatctctgtctgttaacacaatgcatgtttgtgaatgtatgtcttcatatatgtctcattgcattattttattatttgtgtggatttgggtgtttatgtgacttatgtctctataggcagctaccctgagttctccaaatgcagggtagaagcaagcacaagctgcccgtaaaacttgggttcctgtgaatgaatacacatctccactgaagcctagggacctatgaccttcctatgaaggtttattttgtgtgtctaatagagtgaagaaaggaacacaagcacagggaaaccagctattgtagtaagcagttcaggtggaaaatggcaatgaggatagaaaggaggggatggataaaggaagataataagaagggagaataataggatttagttactgttttgaatctgagaggaagggaggagataaatttaaaataacaggttttagcctgaaaaactgggagagtgataattctactggcattttatggatacaaaaatacgtcctcttgtgtgttcctttgagagaggtgatccctaaagaataaaatatgaaggtgttcccatgtcgtatgtacacatctgtgtatatacggcagtgactttgtgttaattttctcatttcatagcatgtagtaatgtgaggggcaagacccaaagaccaaggatcaagagatgctcaggaggctgacatcctgagagggaagagccatagaaagcccctgaccattcttgagactgacaccattaatttgcctaactctgatgtgcctttatagcctcagactccagtttcaactccatatcacctaaccccattccaatagcacaattccataacacccaaccctaatcttaattataatccaacctacccttgctcttctacttctactttgctgattgtcatcagtgccctaaacctcatctgattccagccctctgcaataacctatcccttcattgaaaagggagggatcgttgaggctaactcaactttttctcctccctttctcatttctattcagtcaacttctcttttccctgaccttagtttattccccaaataggttccaatyggggtgggagggatcagggaggaattaggaccttagtagtcttgggcttgattacatgacatttcagcttgtcagtctacaagggtgtggctttcctctggaagaagtccaaagctctcaggctgcaaagctcagacttggtatagtgggagagcctgactgaggtgkctctagccagtctaattgccgttcctttagctagtggcatcttgattcctgctgtgtcttaactgaccattgtcttaaattctagagtggatcatgacccatgaagagcaccatgcagccaaaaccctggggattggcaaagccattgctgtcttaacctctggtggagatgcccaaggtaaggaggaggggacaaaaaacatggctggtgggacttttggaatttactgactcccttagcctatacaatagaattattcttctgtaggttcacgggaattttgggctttgctaaaaatttctgtgaggcctaagtcctcaagtgcatttgaattttatttgccatgcgtttatttacccacatcttcataaaacttatttccaagtttctttgaagacagggggctcttttggtctttgggaacctaaaagagtggtgttttctcaagcagcattggaaagaaactaaagagataaagttattgagaaggcagtaagtggattaacttcatgtactttggtaatggtggggatgggaggagacccagaattagtatatggtgggtcccaactaggtcttcaggtattaactctgatgtctggagagttcctgcactgaccaaggtcagtcaggcactcggttttctctggcctttcctcctcttccctttcatcaccccttgaacaaataggaacagcagcagttaatcaatacagatccggtatgaggtggaggggcagaaaacagagccagcaaaaacccttttctaggttgaatttaagaaacctgggagtcacgaaaattaggtatataggaaacacggagtgggagtaagagggtattgatttttttaaaaaaaactttttctcctttgatcttctgatatattctgatacattgaaaagaggtagaatttctttgaaaaggatacatgacatggagacaattagaaagagagaaggaaagcgatttcagctaggctcccctcctctgcaccactgttcctaggcttttttagactttgcgctaaggacccactttgtatagagccctgtcttgtatgttttgaagaagttgaattcctttaggaatttatagtttaatgaggaaactagaattcttacataaggcacataaataaaaataagcaagtgtgcattaaccaagtggaatctacttacataatgaaatgatagcctctgattgaattaatcagtgaaaacttcatggagaaggtagatttcaagacactgaactctttatttaagtaaggtgcttagaacagtagcaggcacatcgtaaatactcaatacatgtgatcattaattaaaaatgaattagtgagtatctactgtgtcaatcaggatgatgatgaggttcaccagtgatacatcagtgaaaaagtctgacgcaatctttgttcttatgatacttattagtatattagtaaagctagactttttaaactaatatttattataattgtgatataggttatgaatcagaaagtgctagaatgaagaaactgaggaaggagggtacggaggtctgagtttaggaatagtgaccagattaggaatgcagagccctagttgagtttgcagaaaccacagayctggcttttattgcatctgtcttctctgctggcagagtaccatgccaatactgaattctttaacatgtacttgagcattgatcctgaaaccttggtagaatgatctgtggacccagattgtcagattaggggaagaaagaagaaagcctgctaaacaaaccaagtgagatgcacagagttataaaatgaagaagagctttttagagagggaaagagagaaagaaaggtcagactaggatttaacttgggtctcagagcagcagagcccttccaccttctgatcctgagcagtgagaccctcttattctagtgaagaccataactcactgctgtaagaaaaagaccctgttttatggaggcagggactatagataagctgatttctgaaggacccagctgataggcacagtgtagccagggaaatagcccacctgcaaatccccataacatcacagccacatgtcactagggattgagagtgatagaaactgaaattctatggaggcaaggmggcaaaacagaaaactcaaaatagagctgagaggtcctagctgaaggagaagctcaaattcagaagtcgcctgcccagagctgagtttgatggactctagttctcccggggagaaaacatagaaatgttttgttttgttttttttcccttagggcttgtgggccacatgggaaagtgagattgagctgtgtaaaatccatagaggtcacagctttgtcattctccaaattcagcaaagctaatcatctcttgaggtagaaaaatggccaggaatcagacatcctgagctcaaaaacaaagaactctgggatgctgggctgatgccgtaccaaatcctaattccctttccagcctaggaatggcttcagccgccaaaactatgctacctttagccttatgacatcggcatattctacccctggaaaggacctcagtcagtcatctgctctggccctctgtctccagatagccagccattacaaatgtatgtttatctttttgatttttttttttaagagatgggacgggatcggccaggtgcagtggctcacacctgtaatcccaggactttgggaggccgaggcgggcagatcacccgaggttgggagttcgagaccagcctgaccaacatggagaaaccccgtctctactaaaaatacaaaattagctgggcgtggtggtgcatgcctgtaatcccagccacttgggaggctgaggcaggagaatcgcttgaacccgggaggcagaggttgcggtgagtcgagatcacaccattgcactccagcctgggcaacaagagtgaaactctgtctcaaaaaaaaaaaaaaaaaaagatgggaagggatctttttatgttgcccaggctggtcttgaactcctggctcaagcaatcctcttgcctcagcctctcaagtagctgagaccacaggccatgtgccaccacacctggccttttctatttttaaaggttcgcacgaacagagatccttttacctctctggcttgctattctaaggtttataatttttacttatgatatccattaggaagtgcaattcatctctaacaaatgtttattcctcatatatttttaaaaatcttatgaaagttaaggcagaaataaattatttagtatcagctttaaagtcatgctcaagtcatttattagattttttttctgtctagtctcatagagacccattacccacagttcttctttctaaaacctcttcccaatatgccgtaattggagactccaaactacgtgcttatgatgttctccagaacccctcctgactacacccagaatacctactggatggtgcctgtaatcttatccttcgtcttgcttctaataagtcagacaactgccatggagggttatttagggcaacatggaacagccaaggagactctggccaggactggcttggggccagactaagctagtcaggttggctaggagagctcaaagaattaccggggctccttaatataaactatttgtataccccaaagtttgtgatttttagggaactaggggtttgaggcataggtaccaggtacatgaagagcatcctaaagtttggtttctaggaaaacactcagatattcaagttggagacaggatgaatgacttctggaagttggtagagttgaggtaagaagaaggcagagggagaagagaatttccttattgtgagattttttttgtatgcccaacagatttggatagtccctgcccaccatctgttgtttgcttttgtactgaaaacgttcggagtcacttgtctctcttaaccctgggtataccaacaggattgcattaagttagagtttttacaggaccatttactcagcttgggaacaggaaacaatgttccaacctatacatttcagaacaattttttcccttatttcctgaaattacaaattcatactccagaactccaggtatccagaagagaatcccataggccttgtgaaagactggaaaacaaactttagtttcatatctattctgatcttattgagctaactttattcatctttcctaaagcattgaaggctttgtgttgacttttgaccttgttcctttcacacacataggctattcctcaagctactgagaagcccctctcttcacagattttttggttttgatgccttcaacttaaggttgtgaacttaggcttctagacttcatggggctttgccttagtgatgtcataagtaagctttgacatcagtgctcaccaatggcttcttgttgacaagcccaaactttcaggccttaccttagatcagttatcagaagcatttggcactgttccaacttcttgaaactgtccacttttggcttctaagacattgctaartcctggttcttttgtatttcttgctgccccttattagtttttatcatggaaccccccttccccttcctgttccttcaatgttggttttcctcagggttgcattccttgcccctttcccttataattctgcatattctcttgagatagtctcttctgtgttcacatggatactccacaagaacttcaaacagcatatccaaatatgaatgtatcacccccactgccacctgcccaaaccaaaacctgcctctgctgagtcagtggaccacgcttttaccctttgtctaaatcaatcacgggacattttctccttctctgacccttgaaatgtaatcacattgccaactggatataagtcctgttgcttctgtttcctagatgtcttctgtccagtattttgttttgtcccaaatgctactcttccagttcaggccttccacatttcttttctaggatgccaggtagcctcctaaccctagaaatccctctctcaagctgtctttcacactgctgccagagttatctttctgagatacagatcgcatcatgtccctctgctctctaaattcttcagggattctttgttgtatgcaacttttctttttggaggggccacagacccctttaagaatcaaatgaaagctgtggaccttctcccgaaagaaatgtccatgcctgcagaacttttcatacagttttgtggggttcctggattccctgaaacccatcacccatggatccctgattaaaccctggcctgtagaagacaagtcaaacttctcatggcacataggtgcctgcccacctgtagagcttcatctctcaccatttcctagtttatattttattctttataatactaaattacttaaggttattttttgaccctcacctttatttgtgctattccctctgccaagaatactctccctcaaattatccacctgacagaaaaattttaaaggaaattgtcctttaggtcccatgacaaatgctgtcttttctgtataaccttctctgacttccttctggcaggcttagatactctttgtccctgtttcgactgtactttgtctctctctctctctctctctttttttcgagagatggggtctcactgtgttgcccagactacacttaactcctgggctcaagtgatcctcctgtctcagcctcccaagtagctgggactatagggatgcaccattgtacttggctcatgtcttttatagggaccaatagaccatattgtaattctccacatgtcttgaagaccattaccaagtcctttatcttggtattcccagactctgtggtggtcattgctgtacccccagtgcctagcatagtgcctgaaacatgataggtgttcagttagtatttgttcagtgaacaaatggaccttcaattcaatttggagctaatagccatgtaataccaacctgcaaaaaaaagaaacattttgattttttttattccattctattcctgatagccttggattattcaaaagtttgtgatggttttttagtttggtgctgcagatttttccgattactagctctcttagtgcttgttggtatattacatttctccaggcagggttaaggacaacatgaacagattttagattaaaacaaaaatatgtactagaatgtctaagagagactggctaaaatggtttacaagaagttgacccttcatggctcttaagattccctgtgcatcaccatgtgctccttgtcacattacatggtaggaaaggaatgtctcccatctctcaccaataaggccatgcttagcagaggatcagtgcattgttcctaatatgaaacacacatatgggacacctgctgtgtgttttatgttgggacgggttggctttttcacagtgctcctggaagagagttcttttcactgagcagctactaggagagggataatatcatctgtgaaaaagggaaaaggattgcctctctattttagtcctaagtttttgttctgttttgttttaattttctttctttttttttttttttttttttttttttttttttacagatggagtcttgctatgttgcccaggctggtctcaaactcctaggctcaagcagtcttcccagcttgacctcccaaagtactgagattacaggcatgagctaccgtgtccagccctagttctaagtttttcttccagtagaagcagagagagaatgatttacagtatactttttgagttccccataaacatcttatatacagggccacaggaagagactagcaaatatttgttgactaattgaggaaatgccaggagaacgcagtgagagaatagagtccccaccaattcttcctgcacacttggtcacagcctcttctggcagtgtgataactagtaaatcacaactgtgtggcacacattggaacatagaccaactcaagtgacacaaaaaaggggggtgtgtgtgtgtagactgagagaatcagctgtctggtaacagatatactgtgaacttgtgaataaactgtgacttgccaggttactgaaccatatagagtcatgtctttgtcctgaaatgccaactaaaagctgatgtctcgattcagtgcagaaagcaaggaaaaacctagtacagccattgacattagtaggacaagccatagaggctaataatgttaacttaggcatctgagaacttgaattctaatctgaactttctaaaagtactagctttgtgccccttgacctttttgagtttcagtttccaaatctttaaaatggagacaattccaggattgttaacagcattaaataagatgatgtttgacaagctcttggcagtgtctagcccacaatacacattcaagaaaatgtgttattcttgttgttattgtttcccagatggtcctatcaaggaaaggtcttgggaaaggcaggattttgggggggcttgaggagcaatgaatgcagattatctgaagctccagtaacattgactgcagtaattgggagtggggaggccagaagactttgatgagaggattattctagattcagagaaaagactaaataaagtactgattcgttatctttagccaaatgtaatatctctggattccagkgygccttttcttaggagcaacctctccgtgacttcttttgtccctcctttcaggtatgaatgctgctgtcagggctgtggttcgagttggtatcttcaccggtgcccgtgtcttctttgtccatgaggttggttctgtactttgttcttcatcattctttctctgtcttcttctaaatctgccttctatccccttcccacattctgtgtccttacmtcccagttagttacattgctgtgtttgattttccttgactccgtagcttcatgagtcactctttcctacttgactccaatagtgatggtgggacctgagcatctacaaactgggtcttcatgttgcctgttcaatttaaaggaaaaagtaactctcagtcctccttttatctccctcaaaacagagaaagaaatggaaatgggtagtatttacagcaaatttagtatatccagaggaagagccccaggagaaaagagacttgctgcatttctgtagtttgcataactttctgaggttctcaaatcttcttttgcacccttctcccagtaccctctcatgcttcacccactcttctttttataaggtccacctgctttcttgtatcagattttataatcttttagagcaagtcgcgtttctttccttccctcccaccaacttccccttctccttttctccatggttatcaagaccatctgttatcattggccccctrggaagcaggttggaggagataggatgagccaaaaataagaattaagattaactattaggaaggatatccacatcccagtatttcaaaaatgggagaaagtagaagagagtattgcaaaagttgatgcctccttctttggactgtgttaaatatgatagtctcacgagcatccaggactcactaatgggaggaggtggcttgactctcagagaatctcttcccagggatcctgtcttaatcttgggaatttrtagagaagcctaacgggctgaacaggtataatgtgtcacacagggttatcaaggcctggtggatggtggagatcacatcaaggaagccacctgggagagcgtttcgatgatgcttcagctggtatgttccagagaactccctgtcccatatttgctctgtccttgtttcatcccactctgttttgggctcatggtctcctaaattccctgtcatgtggtttcatgggaaggaattcagtgacaagagagggaccctatttgccctttactcttagcatttgaaaataccaccctggtttcctggggcarggagagggtggargagtgatcacaggatgctttgctctttatggaaaggtcataaacaasactatggggactgacacataagcagatcttactctagggtcacagggaaggtctggccctgaaaataaccttaccagaggactggagccagagccagaagtggagctgaaatctgccagtcctcatgtgatggagatgaggtgacctgaaaccagaccacttaaaggacgaaggaactgagacagcctttcggagtctcaaaaaaatcctaagagtatcctgaggatttccacagtcctttatgctacttgctccatgttgttttaggcttctcatgtgtatccactgtgggctagcccacagtgagtgagagaaatacaatcatttgctggtttactgaaaatttgtaaattacatttgtatcccccttttttcagctcagttccctaaaaatccatgggcaaaaatttaatatgcagtgtctagtgaaggctctacctaggtgctaagtaatggtgcctgccataaagtggtctgagaatgagccagaattctccaccagtatcccaaagtcatggctgcccaggagtacatatgatatgaaaacctaagtatacttacctctctcaggtaagtataytttctctcagggatagaaagccttaatttcccagggacttatagatacctctcttggggtatctataaggctttctttacctagagctatttttcctgtgaatacctggatattgcagcttctgctgctrgcaccatggattgcaaggagctaaggggaaaggattggcagtacctgggtacagttagaaatctcagtgcagagagaggaaaaatactacaaaacacattgggatgaactcctaataataatttggacacaatccagtaatgtcaggccattagggagaatttctaaagactgaagtcactgcttctaagatgtgaaagttggagattatttgagaagccaacatacatgtatgtattcacttgttctctttaggatagtcatggatgacaaagccttcaatgaaaggagttcttagcagtcttctcagatgtgtagcaaaatatgggaatgaccctatgatgcctcagccagcatcatttccctttcctttggaagggacagatcactcttaaggatgtcaaggaactttctagggagtcacacagttatgttaggccatcacagcattggaataggggatatctcagcatgttgagccctgtctctggggagctgacttctacctcttccaaagggaggcacrgtgattggaagtgcccggtgcaaggactttcgggaaygagaaggacgactccragctgcctacaacctggtgaagcgtgggatcaccaatctctgtgtcattgggggtgatggcagcctcactggggctgacaccttccgttctgagtggagtgacttgttgagtgacctccagaaagcaggtaagagagttttcacatcagtattgcttatttgtgtcggtacgtgcacgcrtgtacacacacacatcgcccccgccctgcttttacctcccattggagaaaaatgttacccagacacaaataggcagkctttgccctcctttttctggtattgtctacaattccttttggctagagtttctctctctcyagatatctcctctttaggcatgccaggtrcctcacccagtggctcctggtttgcttctcattgtcaggtaagatcacagatgaggaggctacgaagtccagctacctgaacattgtgggcctggttgggtcaattgacaatgacttctgtggcacygatatgaccattggcactgactctgccctgcatcggatcatggaaattgtagatgccatcactaccactgcccagaggtaaggggacttgggaggtaggcagtgtaagaagatggcagctaggacaggctaaagggctagaagctcctgaagactaaagcgtttgagctatggtgactataatggccagttttctggggctagaacactatttttaacgaaaaattatctagagcactgaaattgcactgttcccttaatgatatatgatttgtcttttgccactgtctggcccactgtccaaatatgcagctctgaggtctttcatatcattggggtaaatggttattcttcagactgggcaaatctagggagcccagacatgagctacgctttccaaccatatcatagaaagtataggtgctgctatgaccacgacagctcagagataaggggacctggggggaggcaatgtaggatgggaggatagaagggtaacagtttaccccagggtaatcctaaaggattccagttagtccaattctcccttcacttcttatcctttcctttccttcccttccctgacccggttcctccctggaacagagcctctgtttagacactttttactgctgtgttttctcaggcctaggaaggataccttgtggctaaagtatttcccctaggtcttcctggtctcaggaagcctgctagaaggcctggcagcatacatgtatctcccagagagggtaattggcctagatgtgggtggtggcttgatcttggccrtagggtcacttggactgtgtcatatgtctatctcttgcagccaccagaggacatttgtgttagaagtaatgggccgccactgtgggtaagatcctcattctgacccatttattccgtggacctagcgatagccctttccttttccccagagagtccagtgaggtctctcagtagcagcagatctggaggtgcacatgctccttgtggtgtggttccctttccggcctccatcccctctgttacatycccacacatgcatgtgtgtacgtgctcaggcacgtgcttggtgtaaagagtgggtagtgctctgaggctggaagccactgtggcaggtgaacataaatggaaggtatccgttagagacagaatctcattgaggggcccyggtgctcttacccttgccccacgaataaaatggaggctctccagaccttttatcaactaygaggactaggagaacttgttgggtatgggtgaggctatttgtagagtacaacttctagcaggatgcttctgactctcatctcagatacctggcccttgtcacctctctgtcctgtggggccgactgggtttttattcctgaatgtccaccagatgacgactgggaggaacacctttgtcgccgactcagcgaggtacttgcactttattttgcccttaagaaatccctcaccctgttccactgatgatctctttcccacccatcagcttcattccatggaccattttaccctttgttctcaaccagacaaggacccgtggttctcgtctcaacatcatcattgtggctgagggtgcaattgacaagaatggaaaaccaatcacctcagaagacatcaagaatgttcgtatgaatgaagccagagaggccttagaatccatagcccattcccttctggcttctgagtctcctgacattgcttctccccttggtccttctgcacatctctccctggttccctgcccctgattgcctcccacaaagaaccattacaagacaagaggctgagctgtccatggtttacccaagtctctgcttgttttcttcctttkactctgcgtaaccctctctctgtccctctgttggtcccttcagctggtggttaagcgtctgggatatgacacccgggttactgtcttggggcatgtgcagaggggtgggacgccatcagcctttgacagaattctggtaagtcactgggctgtgtggccctcatgccttgaaaccctcaaccttgtagtcctgccccctcagggctgcacttcaccagacagggacttacatcactggtcgcattgcctctccaccagcctttgggctgcagtggccactgacccattcccatacacttgagggttctcttctgttacaaaaatggtgagagactacgccttcctaatggtgaggaacaatatctttttgttttgttttgtttcatatatttttaatacgaattttgagataattgtagattcacatgcagttgtacagaataatacagaggtagtcccacataccctttgcccagtttctttcaatggtaacatcttgcttaactatagtacaatatcatcaccaggatattgacattgatatagtcaagctacagaacatttctgttaccacaggatatctcatgttgtccttttatagccacgtgtactttacccccacccatccctcctcattattattattattattattttttgagacgcaccattgcactcgctcccaggctggagtgcaatggtgcgaccttggctcactgcacgctctgcctcccgggttcacaccattctcctgcctcagcctcccaagtagctgggactacaggcgcctggaccacgcccggctaatattttgtatttttagtagagacagggtttcaccgtgttagccaggatggtcttgatctcctgaccttgtgatccacccgcctcggcctcccaaaatgccgggattacaggcgtgagccactgcgcctggccctccctcctcattcttaacctctggcaaccactaatctgtctctttgtctgtaatttttaatcttatgtatattatataaatggaattgcataatatgcaaccctttaggattggcttttttttccactcagcataattctctagatgtttatcaaaggtgttgtttgtttctatagtttgctgttttttgcagagcagtactccatggagtggacgtattacagcttgtttaatcattcaaacatttgagttttcaatttttggctattagggataaagcgactatgaacatttgtgtacagctttttgtgtgaacttaaattttcatttctgcagagtaattgcccaggagttcaattgggttgtatggtagttttttgtttcttaaaaaaattttttttcaaagatactgcccaactgtttccagaatagctgtaccattccatcagcaatttatgaaccacctgttttgtttgcatccttaccagcatttgggggtcgtcacyttttttttttttttttttttttttactattctgataggtatatagtggtatttcttttttctttctttctttttttttgagatggagtctctctctgttgcccaggctggagtgcagtggcatggtctcagctcactgcaacctctgccccctgggttcaagggattctccggcctcagcctcctgagtagctgggattgcaggtgcctgccaccatgcccagctaattttttaaatttttagtagagatggggctttcaccatgttggccaggcaggtcttgaactcctgaccttgtgatctgcctgcctcggcctcccaaaacattgggattactggcgtaagctactgggcccagcctttttttttttcttttttttttttaagagatggagtcttgctctatcacccaggctagagtgcagtggtgcaatctcggctcactgcagtctccatctcctgggttcaagggattcttctacctcagcctcctgagtagctaggattacaggcacatgccaccgtgcctggctaactttttgtatttttagtagagacggggttccaccatgctagccaggctggtcttgaactcctgacctcaggtgatccgcctgccttggcctccaaaaatgctggaattacaggcatgtaattccaaccttagacactcagtttaaaccctcttatcctatcttcactggaagagcaaagcaatctcctaccttgttttgtcaataagaagggaatattattaagccccagtaatcctgttgattaccatagtgggcatgtttctctagaagtaagtagaatctttggggttccgatggcaagaatacagagtcatcaagctttagatgaaatctgtttggggaggtaaagcccagtaagttctttgctgcagttcttaattgtgagactcagtcttgtgatttggaaaagggctcgagtatcctgactctctaggctgagccaagatggggcagcctgagccagactgtctttgttctctgggctcctgcagggcagcaggatgggtgtggaagcagtgatggcacttttggaggggaccccagataccccagcctgtgtagtgagcctctctggtaaccaggctgtgcgcctgcccctcatggaatgtgtccaggtggtaagtactgatcctaaacccctttcttaacactctcaagcccctgccttggagctcaaggggcatgagactatgtctaaggccactggtataggagcaggtggaaaggcaagatggtatagtaagagacatgtggggaaagaacacagtgggctttgcataggagctcttaactaagcttcagtgttcccatctgtaaaatgttcctaaggaaggtgggagattctacatcctccttagtaatgaaacccagtatctcataatatacaacctcaaacctttttatcwtgtctttattggaagaataatgctatattcctcctaactttattaagaacaggagaatattattaaattctagctgggtagcttttgtctctatgatttctatcttgaacatgtttctctgaaccaacacgaggttactaatgctaacgttgagggttattgtaaggattggagataagctatattagcatgtgatacagtacctagcaaatgttgagtgctcaggaaatggtggcctttattatgaaggaatcactcctttgataccacagagcgaacgtggcggctgagagcgagaactaggctgtgtggcctggttctgagggctggtctaaatactccccatctcccggcctccttctctctgagactcaggagtcccagttacctgcagccttgcttggaaatgtatctgtaaaagctccaaagtgaaggcactgccccacagagctgaaatcagtagttgagaagcacacagcaggaatcagtccttcctaactgggttacctgtaggatcttcatttactcatgactttagaggctgctttaaggccggggacctgggtgtggaatggaagatactatttatctgtgagcattcttccactctgcccatacttctaataaacagagcatagtgccaggcacggtggctcacgcctataatcccagcactttgggaggccgaggcaggcagatcacaaggtcaggagattgagaccatcctggctaacatggtgaaaaataccaaaaaaattagccgggtgtggttgcacacgcctataatcccagctacttgggaggctgaggcagaagaattgcttgaacccgggaggcagggggttgcagtgagccaagatcacgccactgcactccagcctgggcgacagagcgagactccgtctcaaaaaaaaaataaaataaacagagcatagaatcagttcttttcttttgctgctcattacttagacaactcaggaaaaacaaaaatacttccatgaaagtttgggggcataggaaaggtggggtgtagaatggacaggatctagtcacaatcccagagatgggcagagttcgactgtgggatggagttccagctgtgcagaatcctgaccctggagttgaaactgtcgctgtgctcccccctcagaccaaagatgtgaccaaggccatggatgagaagaaatttgacgaagccctgaagctgagaggccrgtgaggagatgacgggaagctcactagctacagaaatcagagscgtgaacgaagccaaagatctccatggctccaggcccaaaacatgarcttctgctgcttccttttctgattctctctgcagcaagttcctgcccaagaaaattagttgtgaggtgactgggaggctcagttcatctcaggggtgtggtccctggcatcaaccttttataatctgttatttctatatgtgagccccagcaagatgataagttcctctaggcaagggacagtctcttgtgctgagcatagtgcctgaagaagagtactgagggagtgtttgatgaactagtggcccttttgcagcccctgccctgtccctgctctgccccagttctgtcctcagaggtttgccctatggaacttccctctgggagcaacacttcagaccaggatctccatggctgctggctgtggggaatggcctgaagacacctctctctatttgtacttcctacaggagcttcatgaacaactgggaggtgtacaagcttctagctcatgtcagacccccggtatctaaggtactggcaagttgacttgccctctccccttttccttctccctcccccagtctctcttcataaatgctaccacagtccatacaacataagccttgccaacttctctgccccactctgatcttcagtgctgggtccctggccctattataatgatttcctcttaaccaccccagataccagagcccccttcttagtgtaccctggatatctctaacacaagacccatgcccacttcaggactggcaagatagcatgcaaagaatgggaaagagggcttatgtactttttctctgggaaaatatgggaataatcacatctaagtgtatctaagccacttcttccactggagtagtggttctcaatattaagtatatatcagaattgtttgggttgcttattaaacatgcaaactcctgggcccctctctcagaggagattcatatctgggtagaggccaggaatatgcaggtttaacaggctcccccagtggattctgatgcaggtgatccaaggaacacacttgggaagtgctgctctggaaggtctctcattcattgtataataatgatatctgagatgggggacagcagctttatttattgatctgtgatcaagaattttgcttccatgtatgtggtagccagctgtgctggcattccttgggagaggggtgtgtgttgtgttgtcttaggcagatatcctgatccctggatgacaagggcttagagcccttgccctcctttactaacctcctccctgttcccctgctgggtttctgtcctcatttttccctgcttcctcctgtatagagtggttcgcacacagtggctgtgatgaacgtgggggctccggctgcaggcatgaatgctgctgttcgctccactgtgaggattggccttatccagggcaaccgagtgctcgttgtccatgatggtttcgagggcctggccaaggggcaggtatggggactattctgggacctaggagcagtcatggggaagataagtgtagcaagaatgacctgtccattctcttggcttcctctgttcctcactacctctctctcctctctcagggtccaggcagaagtagatatttaatactagggcagtaggaacagcaggaattactgcagtgaaccattgcaaacaacatgtcttatttaattctctgtcccaaagctcagcacagtgcctggcataggtagatgcttaatatttgtgaatgagcagtaagggtagaagaagttgagtgcgtggggaaaagctaatacctggtgtaccttttccaaccaagggggatccaggggtagggttagaactcaagcagtggcaccagtcccacacaggcctcctagtgctttagccttgtgcagagctctgtgkcttatccccacagatagaggaagctggctggagctatgttgggggctggactggccaaggtggctctaaacttgggactaaaaggtaagtagcactgcagaggcacctcctcccagtyacctcttaaagttgcccttggatgtgggttcattatgccatggtctgcttcaaccaccctgttgtctgggtcctccaccctcaacctcacagttgctgccatgagggcagacatgcccatctcaacatctttagcagctctggcaacttagagctccagtatgtatccttggataggactgagagggtgggctagggagggcggcacaggtcaagaaattaaaaataaagtgcctctaactctagcttttctccccctcaattttcctgtctcttccccaaattccaattccccttcccctccccgccatcactgatcaactaggactctacccaagaagagctttgaacagatcagtgccaatataactaagtttaacattcagggccttgtcatcattgggggctttgaggtgagtgcctgccaccatttcttcctctctccctcctacctcctctccctctccccaatcctgcccttgtgctctcttcttcttaggcttacacagggggcctggaactgatggagggcaggaagcagtttgatgagctctgcatcccatttgtggtcattcctgctacagtctccaacaatgtccctggctcagacttcagcgttggggctgacacagcactcaatactatctgcacagtgagagcctatcaccacttcccatcccttttggccaggattataatccttaaactgagtgtggtcccaaacagtgagctactctttatatcaagcaaatgggaatgtttgaaaatgattcttcagctgggcatggtggctcacacttctaatcccagcactttgggaggccaaggcaggcagatcacttggggtcaggagttcaagagcagcctggccaacatggtgaaaccccatctctactaaaaatacaaaaactagctgggtgtggtggtaggcgcctgtaatcccagctacttgggaggctgaggcaggaaaattgcttgaacctgggaggcggaggttgcagtgagcagagatcgtgccactttactccagcctgggtgacaaagtgttcagtttcctcacctagaaatgcaccagtaccctgaataccaaatgttttgtttgtttttttttttctttctgagatcatgcagtctaattttctgagcagtagaaaggataggtacagctttcttcccaggagagacgttctgcagtgaggttggcaaatatgcctgttaccctaaatgcaagaacttgatgagctctaagggccctgctagcctatggagaatatagttccagggtttaattaatggcaaagattaaagagtgataagaatcaggmccctgatcatgtctttctaactataacccattgtccttgcagacctgtgaccgcatcaagcagtcagcagctggcaccaagcgtcgggtgtttatcattgagactatgggtggctactgtggctacctggctaccatggctggactggcagctggggccgatgctgcctacatttttgaggagcccttcaccattcgagacctgcaggtagctggccacccagagcctgctagatagctctcccctgtctccagactgtttccacagtgatctgaactatgagagctcaagttgaggaccgagctgattggtctgtagaatcctgtgaagaccagaaagagcactatgcaggcattctctggtgtcacctcatatgcatgaccgcagctactgttgttggaatgctgattttgagtcaggcgacctggtgctaagccctttatgggcatttttgcattttatcttcacaatagacatgcaaagaagatactatctccatataacatagaaagtttagagaggttaaaaaacttttctaaactcctaagtgagcagatggtttaagtggttgagaaagtcagtgatctttttactacatcatgtctccccttcagatttcccttgctgtcattctgcttttgagagagatactctctcaaaacagagatataaagtgtcaacactgacactgtgaccacaagtcagccctctgaggcaaggggaaccagaaaggcttggaaagggagattggagagggtgaggggctgaacactgacagttactgcagctgtctgtagtgctccctcttccagttctgtctcatttggagtcattgtttaaatttcagtccacactgagcttcttacaggaattaggcacagttcaggcccaggattgtaaacaactctcttccatgtgtctcttccttcctggagaggtgtggtrtggaagatgatttatacccaaccttatccrttcccagttaggcttaggatttactctttcattttcaggcaaatgttgaacatctggtgcaaaagatgaaaacaactgtgaaaaggggcttggtgttaaggtacctcatccatggtttgttcctaagtgaagaagaaaaataagctttggctcaaacccatagaatggccattgttgggacaccctgaggaatctgtagatataaagggagggggccagcctatcccttgaatccttggaggagataaaaattgaaaggaaagaacaaaggcagaaatgggggatgggaagccaaccacagagtcacaggcttttggtctccacctggcaggaatgaaaagtgcaatgagaactataccactgacttcattttcaacctgtactctgaggaggggaagggcatcttcgacagcaggaagaatgtgcttggtcacatgcagcaggtagggaagacaccgtagtcatgcccttcatcagacagccatacctgccaacagccatacctgccaacagccactgaggcttccactggccttttccagtcttctggaggagcctgtcagtgccatcatagagcatgggcctgcagtctcttacagtcatagaatcaaaacatctttatcctggaaatgactttagagattatatggtctatccttttcaaaagccctcatgggagggcttttcaaccttggcagctttgccttttggggctggatgataatttgtcatgggtggctgttctatgcactgtaggacagttgcacagcatccctggtctctacccactagawgccagtagcacctccctctcactcccaattgtaacaaaaatgtctccaaacattcccactttcccacctgcttcctcttaattcaaaggaaatctgtatgatgttttatattaattctgaggtgctaccaagggcagccagattgggccacaaaaaaaacacttttatgtcatcattgacagtgatcaacaaaagctgctgggctgaagaggggcaggcagctgacccattggccaataaaactaaaacaggatctggcagctgtggagctaaaagaggggattgtggggccaatcatctttaattagttgttattatatctgatacatggccaaatttgctgggccagcttgccttggatcctggcactgcctcagggcaccctttcatagtttgacttctggattcctgttttgggctgtaagcctggggcccatctttctttttttctctgtgtgtctagatatctctgccacttcattagagtccttccctctgtaatttttatgtttctttctccagggtgggagcccaaccccatttgataggaattttgccactaagatgggcgccaaggctatgaactggatgtctgggaaaatcaaagagagttaccrtaatggtaggtggggtgagagckagtgccctctatagaggctggttccccagtatagaagctgactgcccrtccctcattgcrgggcggatctttgccaatactccagattcgggctgtgttctggggatgcgtaagagggctctggtcttccaaccagtggctgagctgaaggaccagacagattttgagtgagtacatctgcttcctggagtggttcttttccctggtagtttcaagctctactgtcctcaacctgttcactgtctttaattcttttttttttttaaggagtaacacctgtattcttacccatttcagatgtgatgcacatgtcctaaatctaacctcttctgtctaacttcttcctataaacctttggtagaagttgattggggtgctaaaagattatatcatcatctacctcattcctctgtaggcatcgaatccccaaggaacagtggtggctgaaactgaggcccatcctcaaaatcctagccaagtacgagattgacttggacacttcagaccatgcccacctggagcacatcacccggaagcggtccggggaagckgccgtctaaacctctctggagtgaggggaatagattacctgatcatggtcagctcacaccctaataagtccacatcttctcagtgttttagctgtttttttcattaggtttccttttattctgtaccttgcagccatgaccagttctggccaggagctggaggagcaggcagtgggtgggagcyccttttaggtagaatttaacatgacttctgccccagctttatctgtcacacaaggctgggcacctctagtgctactgmtagatatcacttactcagttagaattttyctaaaaataagctttatttatttctttgtgataacaaaragtcttggttcctctactacttttactacagtgacaaattgtaactacactaataaatgccaactggtcactgtgcttttgcttctcctgttatcatcttcctaagtggaatgtaatactgtcagccccatgtatcagacacttgtctgatgaagcagtaaagacgttaagggtatcacagggggtggaggaagggattatctctagtacactacttgctggctgtctgaaaaattgtcactgccaaactctaaaaacagttctaaatagtgactgagaaggtttgttgctggagtcagggaataaggcagccaaatactctttgcacagttctttagtgggaagagaaattaacaataaatatcaagcactgtggtaggcatttcatcattgaatcctcatagtagcttttggagggcaatggtgacagcctgacttcagaaaggaggacactggagctcaaggtgattgattacataatgtctccttcaatattattcaagtagaactcaaactcagttctgacttcaaacctcatcctcattccccattcctgcttccttatcatgccatatcaaatccccagagccataaggcctatgaaaacaaagtgaaagggaaggttcaggcattcattcagaacattttaaatgctaattgccattgatttataggttctctgtctctttcctgtctttaatcttagagctgtttcctcaagaaaatgaagagggaaggatggctcagggaaagttaatcagagggaaaatgtcactctgtaaagagtaaaaaatttaggatgatgatacgatctgggaaaaaaaggcatagtgaagaccacttaaaaacaaacaaaaaaaacctatgaaggtgcatgctatttccccagagctaaaaagataagtgaaattgtgtttgaactcttaagtggaggtgaagcagaatttattagccaccaaccacataagtgattatgaagtaactgagaaacaggtaacattttttcccacatggacaaaactttctctttctagaatattaagtatctatgatgagaaatgaagtagcatctcaagcagtttataaatctaccagaatattagaatcacctgggacctttgaacgtactcatgcccaggtctactttattcatttatttttttgtagagatggggacttcaactcctggtctcaaatgatcctcccacctcggcctcctaaagtgtgaggattacaggcgtgagccactgtggccagccctactaggtctgctttggaccaattaaatcaatctctgggggtggagcctgggctttagtatttttaaaaattttcctaggtggttctaattaataactaggattgagaaccactgactaacacagtggaatctcattcctggctatatttgaagcactgaagcccccagtcctaccccagaaaattccaaagaattggtatgaggtgaaatcttggcaccagtgtttttaaaaagcttccttagtgattttatgtgcagctggagttgagaacataaaagcagtaattccaaatttggggtgggagaaggtataaaggaaggggaagctcttcagatactctgcccaagccctcctgttcactccagcaatgcccagaatcactgctgctaatgggagaaaggttgggatggaaagttacatagaacagccaggcagtaaacgaagaactttttctaaggggggttggagaaaagtaggaaaagtagaaattgccaaacttgcttttagaactatttattctttttttttaagtgatgttttttaaacaccagcatcaataggacagaagaagacatctgttttccaattagctgtgtcagtagattccattcattgtttgtagttcccaatcagctttaaaaaaaaaagtttttcaaatttgcatacaagtcatctaaaatcartaacaacttgatctaatttagaaaaatgaaagagtatcgttcactaaagcagatctcttttgggtagatggaccatcacaaaaggagctcttacatgcttttcccactcccatcccaagtccaccctcccaccaattgtattgtataaatcaataaaaagcaaaggttccagaacaactgaaagaaaaataattccaaactaagcagagtgaactttccattgggaatgaagacccatgggaaaaggcagcccagcccataactcctccctgctggaacacacaccgtaggtgtaggaactgcctgggaatcccattagaacacactgtttctcaggaagagaaaaagctgcattacaagaaaagttctcaggactttaggagttcttaggactgttatttcagagctatttattactgttattacagagctcttgttatttcagagctactgtagcccttgggcacaaccaacagaaagaggcaaagactgctgtttcctttgatgaggggaaagaggtccagtcccttccaaatgccccaggacatggcacagtagggatgtcatccagcccagttctggatctgcaccatttgaggttatagtatcttcatctttgggacacaattgctgttagctgaaattgtgattttcttaagttttttcacagatcaattaaaatggtttttttttttttttttttttttgagacagttttgctcttgttgtccaggctggagtgcaatggcgcgatcttggctcactgcaacctctgcctcacaggttcaagcgattcttctgtctcagcctcctgagtagctgggattacaggcgcatgccaccatgcccagctaatttttgtatttttagtagagacggggtttcatcatattggtcaggctgggctcgaactcctgacctcaggtgatccacctgcctcagcctcccaaagtcctgggattacagacgtgagccaccatggctggcctaaaatgctttctagaagggattcttctggaccgttaaccacgtccccaaaggaaaaccacacacacattatttaagtactttccatcttcctagagaaatttagttacactgttgactccttccctaaaggggaggattgagggagacctcttcttttgcaaaatgcaatataaaaagccaggtaagcaataaacagaaaacaaaagtgagggattttttttgttgggttgtttggtttgggaaggggaggtgctatggaggttattgttgtgacatgttgcttcgaaatctataaaccacacaacaggaacaactgtttttctgttttctgtgacaaggagtactgcagggacaacctcacccagagctgcctgcacgatggtgcaaacatcttctccggctattctaaaagtaacaggtattccttcaaagaagctggcagtggaaggcccttcactgcatcggggagatactggagtcccaggctacggcgcacggcatagcgagcgagtgtttttagagttcctggagctgagcacagaacagtcagtttttcacatagctgcgggtctctggccacctctcgtggcatggtgccatttttcctcaattcaaagtgtccaacagctctgtggaggagctcaaagcaagagtcctctttctctgttccaagtcccctgactagcagagccaccaggcgggagatgggtgtctggcctattaggttgatgactctgacctctgcgccataatccagaaggatgctgacactctcaagatttcccttcatggcagcccagctgagcggtgtatcattgttgtaatccagggcattsacagaggccccgctctctaggagagcccgcacacactcagcattgttcttaaaggctgcccagtgaagtggggtatctctgttgccatccaaagcattggggtttgcaccatactccaataggacctccacacaagcctcatctttctctgctgcatagtggagggctgttcggttatacccatccagggcattcacctgtaaaaagggaggaactattacagtagacagactactgagaggaagacaggacagcagcaaagaagcttgcatggttacccactacctttgctatgcagtgctctgaacaggagggtcagcaagcaactcccagggagtcctggtgataaagatgaagatatgacaggagcttaggagcaaaaaggaaaagaactgtcctcaaacagtcaacactattatgtgcactgactagctggtctgcattattttggtttttgctgcaatgttcttttatctattcattagaatctctaccacagagtaaggggtaaggcaggaatagaggaagtctaagtccccgtaactgctctgaaacattactggaaagctgcttgactatacagagttttggattattttacttaccctgaccctttctgtaccctgtggctaatgtagcaaccaaactgaaaaacatagcttttgctaagttctttaaccatacagagaaattcaaaatgttagaatataagtcagacctttgcaaaaatatgctgtgggttcacaagagaacccaaatgaaagcatgtgataggaagagcacaaatctcccagtgctggaaaagcagctggcttgctgacagtcagcatcacctgtagtttttttcttcaaatttccaaatagcatataccctcattaatgaaagacaaaaacaaaaaaaaaccctgaaacatttaagtaaattcaaccttttatttggctaaaacctatcttaagtaccacttcttaagtactttaagtacttttaagggtactttagatttaatcagagttgagggatctctgcatttatatctcctggatagacaataagcaatgagaagattaaacggaaatataaacagcccctacaaggtaagcttcctgaagtgatggccagtgacagcttaagttaaggagaagaaagaaaggcagagtatcagcaccatacaatgggggcaagcagggtggggacagaaaggtaaaagaatgaaatccttagatcattttatatatttaccattacattttccttaatattggctatgccaacattaccttgagttagaagttcagactggaggagggaagagatggaggagtgatggggagaaattctaagaaaacatgaagctcaagttttagtgagtcattaatgtgaatgtgttaaaaacattacctcggctccttttccagaagtaactccacacagtcagcatctgacaccatacaggcacagtgcaaggggttcagtgtgccatgannnnnnnnnnnnnnnnnnnntgctccctgtgggcagtaagacaacttcagtcagtgtgttcagctctggcttgcccagcaggacagaattcagaactgagtccaggggacagagagttctaactctcactattttatagatacagtgctagttcctgtttccttttctattaatattatgtcaatgtccaaaccaaaggagtacactgaagatgaaggaaaggaactgttaattccttagatcaagttactaagtttctccacaagggaggctgccagatggtcacctggacatcactgaagacaatcttatgtatcaaagcactggaaaccttatcatcaggcaggaaagctggaccagcaatccactttctatggccaccatgctctggaaaagtaggaaagtgagtctgtcagactgaggccagaaatggcatgctcttttgtccattcaacaaatgaccatcattaatagtggcatcatcttaacacggtttttccttttttataaacatcttcaaagtagcctcttagtatcagtattctttaccatctagcctttgctggtgcttctattcaaaatcaaaggagaggccgagtacagtggctcacacctgtaatcccagcactttgggaggctgaggtgggcagatcacctgaggtcagaagtttgagaccatcctggccgacatggtgaaacccggtctctactgaaaatacaaaaactagctgggtgtggtggcgggcatctgtaatccccgctactcgggaggctgaggcaggagaatcgcttgaacctgggaggcggaggttgcagtgagcc

SEQ ID NO: 95366 - DNA, 34502 bp, Homo sapiens
tctgtagtgacttttcccactgaagtcttcaatccctcaaagtaatccatgaaggctggaattaactccttccaaactcctactaatgtaaatattttacttcctcccatgaatcacaaatgttcttaatggcatctagaaatgctgaatcctctctagaagagtttcaattgatggctcagatccatcagaggaatcactgtctaaggcagctttagccttacaaaatgtacttcttaataagacttcaaagtcaaaataatttcttgatctgtgggctacagagtgaatgttgtattagcaggcatgaaaacaacattcatctccttgaacctctccatcagagctcttgggtgaccaggtgcattaccagtgagcagtaatattttgaaaggaatccttttttctgagcagcaggtctcaagagtgggcttgaaatattcagtaaactgcactgtaaagagatgtactgtcatccaggctttgttccatttgtagagcacagacagcgtagatttagcataattctcaaaaaccctaggattgggcagggtgcagtggctcatgcctgtaatctcagcactttgggaggccaaggcagatggatcacttgaggtcaggggttcgagaccatcctggcctggccaacatggtaaaaccccgtctctactaaaaatacaaaaattagccaggggtgatggcgtgcacctgtagtcccagctacttgggaggctgaggcacgagaatcacttgaacctggaaggcagagattgcagtgagccaagatcgcaccactgcgctccagcctgggtgacagagtgaaactctgtctcaaaaataataataaaataaaaaagaaccctaggattttcagaaaggtcagtgagcactggcttcaacttaaggtcaccagctccactcgcccctaacaagagagccagcctgtcctttgaagctttgaagccaggcattgacttctcctctctaactaaaaaagtcctagatgtcatcttcttctaatagaaagctgttttgtctacgctgaatatctgtcgtttgatgtagcagccacctttatcagttacctaccctagctagatcttctgcatatcttgctgcagcttctctatcagcatttgctacttcactttgcacttttatgttatggagatggtttctttcctgaaacctcatgaaccgaactctgctgattccaactttccttctgcagcttcctcacctccctcagcctttgcagaattgaagacagttggggaggatcttgctctggaataggctttggcttaaaggaatgttgtggctggtttgatcttccatccagaccattcaaactttctccacatcagcaataggctgttcttctttctcatcattcatgtgttcattggagtagcactttcaatttccttcaagaacttttcctttgcattcacaacttggctgtttggcccaagaggcctagattttggcctgtcttggctttctaaatgcctttcttactaagcttagtcatttctagcttttgatttaaactgagagatgtgcaactctttctttcactcaaacacttagaggccattgtagggttattaattggcctaatttcaatattgttatgtttcaaggaagaggaaggcctgaggagaggaagagagatgggggagtgactggttggtgatcacaacacacatttatctatttatatggcatggttccgcagtgcctcctaaatgactacaatagtaacaacaaagatcactaatcaccacagaagacataatgataatgaaaaagtttgaaatattgcaagaattaccaaaatatgacaaagggacgtgaagtaagcccatgctgttggaaaatgatgccagtagactagctcgatgcagggttgccacaaaccttctatttgtaaaaaatgcgatatttgcaaagtgcaacaaagcaaagcacaataaaataaggcatgcctgtatcgctacaattttaatccaacataagcaccctacacagtatgttccaaagggaaaatacccccaaatcaaatgcagaaaggagtgtcaaatagcaagctctcaataaatgttagctactgttattaagagctgttaaggccaggcacggtggcttatgcctgtaatcccagcactttgggaggccaagacagggggatcacctgaggtcaggaattcaaggccagtctgaccaacataacgaaaccctgtctctactaaaaatacaaaaattatctgggcgtgatggtgtgtgcctgtaattccagctactcaggaggctgagataggagaactgcttgaacctgggaggcggaggttgcagtcagctgagatcacaccactgcactccagcccgggcgacagagtgagactccatctcaaaaaaaaaaaaaaaaaagctgttaaattatgatcggcttcctgtgtctcagagtcaacctggccagcatggtgaaaccccatctcttctaaaaatacaaaaattagccagacatggtggcgtgcacctgtaatcccagctacttgggaggctgaggcaggagaatcgcttgaacccaggaggtggagattgcagtgagccgagatcacgtcactgcactccagcctgggcaacagagagagactccatcttataaaaaaattaatatgtaaatattgaaaagtagtgacaaaacaaatgtggcaaaacgtcccttggtaaatgtgggttgagggtatttaagagttctttgtgctatttctgcaacttttatgcacatttgaaattatttcaaaataaaaagtaaagtatatataaataagaggaagctaggaagtgacaaaaaccattaaaggaagaataagaaacggcagttcggccagcagccagctccctgctggttcccacgtcaggcgctgtgagaagccctttgcctctcggtcctgtgtcctcaccatgcacccttgtggtcagcctggaaaggccaacttgatagttacaggctgcttcagatctgccacccacgkggtgacaagtcctggcgcgttggcatgggtggtactgaaaaaggctatggatccagggcagtgcagcggccagtggcaagggatgaggcggggtctccaatggcatcgtttgaactgcctgcaacctttttacccacatgtctcatgaagggatcaaggagaaaagcactgtggtctgggaaaagacttctagcactgagatgctgccttcaggggcaaagattaacctggctccccagaagaggagcagtgctcattgccagacagaagagggcgatgttttcgcccatgtcatcctttgaataggcaccgacaggctttggccgccagctgtgcccactgggtgtggtttcacaaatctgcaaattccaagggcaagattagggtgaggttaatgagacagggtcaagtacaagttcaggggcagatcgtgtctttactttgttactttgttcatcatggatttttcttcattaatttttgatttttcaaaatattgcattgaatgttatttagcttgattactgagttatttggtaactccttaaattttgtgcctaaggctagtgtctcattcgccttgccctagtcctgtcttgacagatctaatccattagtcgtatcgccaccagctcagagtttgcaattaggcccttttgtacctataaagaaaggactgacaaaaggaattaatcctgaggacgtaaatacctgctttttttttttttttttttgaggcagagttttactctgtcacccagcctagaagactggaatgcagtggtgcaatcataactcactgcagcctctaaatcctgggcttaagtgatcctcccaacctcccacctcagcctccagggtagctggggccagaggtatacaccaccatgcctggctaacttttttatctttagtagagacaagttctcgctatgttgctcaggctggtctcgaactcgtgggctcctgcctcggcctcccagggtgctcgggttacagatgtgagccactgcacccagtcaaatgcctgcttttgatgtcacttcacagccagcaactggagaccaacttctttatctccgagtctcaatttcttcatctgtaaaatgaggatagcaattgctcctttgcagtttattctgaaaacagagtatcaccccaactgagtacccctgagggccaggcaccgtgctgagtctgccctttagttataacctctctaaattttcacagccctaccatgtaagagatactattaccccatgttaaaggtgaggaaaagggcacagagaagtttggttatttgtccagggctgaacagccagtaagtaaaagtgtatatgctttaacgtcatcagcattcccgacrtgagatgacccccaagcccccggagatatttggcaacatctgtcgaaatttttggttgtcacaactgggggatgtgattggcatctagtgggtagaggcaggggatgctgctaagtgtccaataatgcacaggatggtccccacaacaaagtactatctggccccaaatgtcaatcgtgccaaggctgagaagcctgctctatgctatgctcccgagtcagaaagttacatgagcacttagcacttagtgctccatgaaaggtagatactgttgtggtttttgttattattacattttgtctctatggctgggggttcccgtggcttccagggaagctgagttcccttggtaccacacccacactgtgatcaagaaccccgtctctaggtcaaacgtggtggctcacacctgtaatcccaacactttgggaggccaaggtaggaggatcgcctgggccctggaattcaagaccagccggagcaacatggtggaatcctgtctctacaaaaaaaacacaaaaattagccaggcatggtgacatgcacctgtggtcccacctacttgggaagctgaggtaggaagattagattacttgagcctgggggattgaggctgcagtgagctgaaattgtgccactgcactccagcctgggtgacagaacgagaccctgtctcaaaaaaaaaaaaaaaaaaaaaaaaagaacttggtctctggagtccattagagtatcatacgtcgcattcagcaatgatttatgagcatctgctgctacatgacaatcctgttccaggcagcacagacacacggaggtgccccctgcccctatgtggcagcctggtggagagacaactttagacaaggaaacacacaagctcagagataataagatgttacaatgcatgccatgatgtgaaaaacctgggcaccatgagagagaagacgagggaagaccctgatggggtcaggaggccaggagggcttctctgagggtgtgacatttaagctgagccctgaggctggaggaaggaagagccctgtaggcggagagaacagctgtgccaaggccctgaggggggaaccgaaagccaggcagtgcaagggcagaccagtaggggaggaagaggggagtagagtgttatgacctgggaaatgtgagcaggtagaggctacattaagaagtttgctctttgaccaataaaagccctggaaagattttaatcagagcaggcctgcccttcagaaagtgactcttgaggtccaggcacagccctgtgtggaagatagtgtgtgaggctgaaacccagagtgtgtcatcatctggaaacaaccctgcaaaggtgagaggtttgtcatagttacacaactttaactaatgcaccttcctccccgcaaactctaagctggttgtgaaacatgacgatggagcattttgcatatgttacaaaattattgttaatgctcattcatttttggacaaagaccagcatcagtcactggaaacacctgtttgggtcacgaggcttgtcttctgccaggagtggagactttcccacagacttcttgtttcttcttgctgcttttgggtgactcagcctatgacacttttgctcctcctgaaatctccatatcttgcytttctcaaattccaaggtagcctttgcgcaacatatcactctccactgactcttgtcccatcagggcccatagtggatggctgtatgggggccatgtgactgaactcctgatcctcgtttcagcccactcatgtgacatgcatggagctcttcagcagggacttactgaccaggacaagagcttgagactttgaggggatctgattgtcactgcacaatcaaggacagtattcccaagagtggatgttgctcaagatagtccaaggaattctatgaagaaaaggactccacagacaataaattttggacaccctgtttcaacacagttaagcggctttttataattacaggacttttcagaacatttaatatgctaatgtgcattctaaatctccaagaaagaatgatgcatatttatcttttcttccaggtgcatcttagagactggtgtttgcaagtatatggagcaggaaacttcatcccgaagatggagaccccggggctgtcagcaggcgttaggcaagtgcctcaaaattcccaattcccagcaagagaagccaactgaaggatgagacagggtttctgccttccctgggtcctccagtattacatggaggggttggagtgaaccttctggaggtggggtcaatgactcttggaggtaggggaaagcttcctttgaccmagttgcacacaaagacagaaaacgtgtttgcatgggcawtgtttaacctgcttaaaagaatgaaaagattttagcacttttttctttttctgtaattactaaagaagtacatgtttttgcaaaaaaaaaaaaaaaatmaaacaatmtacaagtatatagagtaaaaagtggaagtcctcctttcatctcctccctgcatccctccctgcaccctggagtgttccatattaaggttttggtatgcctggttcagtgggtgagaagattaatctggagtcagcactctgagattgaatctcagctttgccacatgctagctctstttccttgggcacaagcctcactttgctcatctctaaaataaagtagccgtaggaagggcttggcaggtatgggatgagatgaaacacagaaagccctaatgcagcacctgaacctagttggattcagttaaatttrgccgttagaattttccttccagaatccaggcattttttaaaaggtccaatttcattcaatggatgtgctaattcgagaatggggtccatctcttaatctgttcatgtgactcttttttaagtcctcaagggcagtttctatgcagaaaccactatttagaggtttactttattttttcaagttcatagtcaaattgtcaaagctggaaattaaaaaaaagcagattacttgactttctttattctacacattagctcgtttttaatgctaggaactaagaacttttctaggactttgatggaatgattactatcttagaaaatgccatgcctccataaatatatatgcctactatgtacctgcaaaaattaaaaataaaaactttgttaaaagaaaaaaaaaaagaaaatgccatgcttttaagttcagcttacaaaagttctcattctttttataaatccagctagaatttccagataaaataaaagttgcccarttgaatacgaactaccccaaattcaaatctacctactgttctatatttttatttgttaaatctgccaatcctaaacccaacaaacctaaataattacttataaggggtttgtggccaatttataaacattttatactttatttaatatgccctattttcttttaaaagttcttcaattgtctgaactaacaaaaaagctacttttaaaaaatactaaatcatttgaattctaataaagtaaacaaacaaaacattgatgataacctaaagtgtttataaatgttccagaactgtattcagacaaaggtttcaamgtaaagtcatgaacctgaatcaaaccctaccaagtgcacattttataagagagttacaagattttctatatagttggcccagcagctctyattaagtccatgaaataccgcatattccatcttaaaacacacaaaaagagtataccatggctctgagtctcttaaacatttctacactttaattctaaatcttttttctggttggaagatgcccattcaccaagaaagacaattaaccattccctagagctcctttttttttgtttttgtattttattgagatggaatctcactctgttgcccaggctggagtgcagtggtgcaatcttggctcactgcagcctctgcctcccaagttcaagccattctcctgcctcagcctcccaagtagctgggattataggcgcccaccaccacgcctggctaatttttgtatttttagtagagacagggtttcaccatgttggccaggctggccttgaactcctgacctcaagtgatccacccacctcagcctcccaaagtgctggggctacaggagtgagccactgcgcccggcccagagccacctttaccagagattcaaccaggcctgaggtcttaggttgcagacaacagggagattcattgcagcacgaactcaggaaaccatttccttccatgtactatttggggttatcttatagaattcctggcatgcttggccagtatgctgcctggatgtatgttggggatatatgtataattttccctgtggctgtggccacagacccatcaccataagaggggttggtccacagatcccgatgctggcttggagttattcttattccctacccttttcacagaattgtctttgccaaagtccattaatataccttgattggattttgcttttttttttaatttttttttgctttacagatcttcatagtttcctgcccatatctctaaaagtcattttgcttgagttgatatcctacagttcttacaagacctttctctcccagggtcacacaactctcgccaatattaaattaatatcagcttcaatcacgggtctctccatgggtttcacgggctatttgctcgcagagtccagggacattttcctcatccattccatcagatccccaattgctttctctggcaacacactcctagtatttgtacggtaaagctgcctaaaaaaattaagtaattcaaactactcttgaccttactttacaccaccagggcaattagagtcacagtctgggtgtgtctgaggacagcaggccgccaaatcccagtgatttagagaaaaccgagcagaatttcccatgcctcctgcctcattgtcccccagcagaaggttccgtcaccccaggtgccctctagggtggaccacttccgagttcatccactgtcaggaaaaggcacatggcatgcaaccgcargaccgatgactagatgtcagagctggctcccggttgggatatgagtgactttgtggaggatggcgcctaaatgaggcatgccaatttcygcaccagggtgacgaacataagggctcctwaaaggctagcccaatgtatctgtatttccttggggattaaaacccatgatcttcagttcctcagagaactgaaagttgcaaggagaaatccagtaattcctgttatctgcaggctttataagtcagtggagcctgcggaagtggccagaatccagcactccaagcactgctgtcttctcacagagtcttgaagccagagcagyrccaggatgtcacgggagctggccccactgctgcttctcctcctctccatccacagygccctggccatgaggatctgctccttcaacgtcaggtcctttggggaaagcaagcaggaagacaagaatgccatggatgtcattgtgaaggtgagcccctttcctgggaggaggatcccagacacccctcacaccctctctcctgtctgcagactttaagagactcaaggaacttaaagttggcccttagggggaatgtagaagctggcttggaacaataaccacttcaactctctgtacctcctgccgtcatcttaaaacaggrgtgataacaatggttccctccagggttgctggggggactacaggagttggcaaatggaaagctcttaatgtagtatctggctcattatacgttccagataagggttagccattatgatttttattgctatttattgaatgcctgtatcaggcactataagcacatggtttcacttcataatctttatgaagagggactattactccccatgtagaggtgatgaacaaagaaagatgaagtaaccttatacagctactccttttcaccagcaaagcccagctcctttctctctctttccttttcttctttctttcttttctttctttctctctttctttctttctttctttttctttcttcctttttctttcttctttctgtcttttctttcttcttcctttctctttttctttgtttctttcttcctttcccttccttacttttttccttccttccttctctctcccatcctcatcatccctccctctctttgtctttctttcttcttctcctccttccttcctctctccctctcctctacttccccactccttccactttcgcttacgctttccttgggtgatatacccaatgtctggggacactgcttgctttctctggagtcaattgactccctttatcctacaggttaattaatttttgatgctggcaacttaaccctttcccgggactctggaaaggtacttattaccttaggaaacctgagacaccatggtgtggtaggggggccaggagccctgggtccagattccacctaccagacttgtgagcttgggaggccctgcccctccctgaaccaccagctcccctagtaaaatggygaccacatccaaataccacctgtagcactggctggtgaagagaactcagggtgcctgaggcacccagcagagcctgcagcaaggtgggtatycatgagccagagccgctgctgttgctgtcactgggaaggaggattggagtgaggactggcaggctctgttcttccttggacgagcctctcagacccaggtggccctgccctttgggaggtaaccaaggccttctagatggtgktgtttagccaggatagcaatgccaagcctgtgggagccatgacaagattgttcaatgggaaaccctgacatgcaaggcaatgattttccccacttcacacatggcccgtggagcctgggtagccactgagttcccatctccttcctcactgatgaaacccggctgtctttttgttccttggtgagtccatcrtgggggcttgaactctgcatctcccctgagcagctgtgtcctgcagagcatgtccgaagtccttgtcaaggctgcctcaccctccccatcctaccaagaggccatccccaaaacactgcaagagctaccctacagggcactcacagtcacccgagaatgccaggcattcagaataggattatccctagcgcccattgaccaagcacctcctataggtgctaatttttgtatttttagtagaggcgggtttcaccatgttggccaggctggtctcgaactcctgacctcaggtgatctgcccatcttggcctcccaaagtgctggtattayaggcgtaagccaccgtgccyggctgggactgtattttaacagttcaacatggtgggctttgtagtcacgcagacctaagttcaaatcctgactctaccacctatcctggctgtatgactttaagctagtcactcaaccactctgagcttggtttctgcctatgtttaatgggctaataagcatagttaccccacagggttgttgtaaggctcggagtaggtttgcagtaaatgtcagcttttataattattatcattataattatacctctttatttctaatccagtctgttatctttgcttactaagggcttaataaatatttattattattattgtaattattcaagcaaagccaagaggcaggatattgtggggaggtcatgagcaaggggctctgggcttgaattacataggttcaaattctgcctccgccattttctagtagggtgattgggagtgtaatttactcaactttctctgagtctcaygctcctctttaaaatgtacataacaaaagcacctacctacctcagggagtccttcatttagttcagagaagaaattattttaataagcactcagtgcaatacttaaaaacagtaagtgtccaataaaaggttttatttatctgtggtaaatgacctcaaacccctggkaattctctttcttgcaggtcatcaaacgctgtgacatcatactcgtgatggaaatcaaggacagcaacaacaggatctgccccatactgatggagaagctgaacaggtaacatggggaagggtgggccctctagggctcaaggtcaagtgcaagggcatctgaaaacccctgggaactgaaagtaatgtgagatcccgcacttgaccaccagttcacacagccagtgttgcccaggagtccagctcccttagccacggtcctgagaactttcaaccagttgattttactgtgataaaatagaataggggaaatagatgaggggtctggacacagaaagaaatgaaaaaagcagatgaggctgagctaaaaagtacagttatgaagaaaatgttggagaaaagagaaaagattagaaaccaatagtagaagaaagataataaaattacaacatgctcacacacaggaatattatgcagctgttaaaagtcatgctggtggccaggtgtggtggcacgtgcctatagtctcacctacctgggaggctgaggtgggaggatcgcttgagcccatgaggtttaggctatagtgagccatgatcacaccactgcactccagcctgggccacagagcaagaccctatctcttaaaaaaaaaatcatgcttgctacagaataagttagagctaaatattccagcacggaataatggccacaatatattgaaaaaaagcaagttgagaattgcaggtaaaatagcccatttgagtcatcatgttacatgaataagggtgtgtttgtgtttccatgtgcatagagatgaaagactggaaggatgctctccaaactattaatagtggttacttctggtggggggggggggggtgtgatcagagagctgtggtgaaaggggttagtgaaggagtgaggggcacttgcttcttattttagtactttttaaatctgagactctgttgcccaggctggtatgcagcagcaagatctcggctcactgcaacctttgcctcctgggttcaagtgattctcctgcctcagcctcccaagtagctgggattacagtcacacacccactatgcctagctaatttttgtatttttagtggagtcggggttttgctatgttgcccaggctggccttaaattcctgacctcaagtgatctgcccctctcagcctcccaaagtgctgggattacaggtgtgagccgctgcacctggccatctcagcaagaaacacttaatagggacttttgaacaaaagccatgtctgggtcttgggcaggagcaagatgagatggtagatcctggtgccatcatcccccaggctctgggcttatccatcatagggaaggcatgtgtaggacaattgtagggacaggcaagaatccatgtcagtctgcctaagggcttcccttatagtaagggaactgagtgggggacctgcctgagtyacccagccaggaagtggccaagcctacctttgaacttgcgtcacatctgatctcatagccagtgctctattctttgtcatctcagccttccttggagtgtccccagtcaggtttatgggagactgaggggacaggtttgtgggggactgaggggacaggtaggctccagtcatctcctccacagtcagtctggggcgagtcttttcaccaccagtggtcttggcacwccccaacctatctagactgtcgcggactccaagcagagccaagcctgtttgtctctttatcccccacaagccaggatgggccttagtcactttgcaactgagtcaccacaagcagtttgctaactcaggacttggcaggctatgttcaaaatagggccagtctccccaaagtggaagcccggcagaacctactgttcacactcctggggccccaggggctaagtctgccttagcatactgcatctgaagtcccaggaatttctgtaaggtctaagttggcccctaaataccccttctgctttttttccaactgaatctgagaatatgctgcagctttagacatgccctagatctttttgtgagcagatagagtgaaattatgttaggctctgcccagagtggagttatcagcaggtttggtaaacacacagaaagagtccgctttccctggtgcaggtgaggggcaaggtcaatgggacttcatggctgtatccccagcacccaggatataaacaacagtgaattgaaatcgtggtcccaaagcttgtaaaaaaatgcctgrwggctttcagaggagagaatattcctgcttatcataaatgctcaggagtggttcgtggacacggacaggtggcctgatgacatttattccaccagaaagcatgagctgcagctgcagccatgggcatgagcggggtcaggggctgattctggccaagattgtcttctagggtctcagtggcctcccacaggtacaggccaaagcatgcgggttttggggtgagttggatctaggttcaaatcccagctttgggcttgcaaaccatagaaagggggtaatgataacactctcctcataaggcaagaaataatggctgtaaagatcgtggcagatgccacattccagccaatcaatggtgrctcytctcattggactcaaaggttatgatgaacagtggcccttccacatgatgccattgggcrtatggaggcagattggaaagaaaggaacatgtacagtaggggaatgtttactcttcaagatgcagtgttaaatctttgttttctagaaattcaaggagaggcataacrtacaactatgtgattagctctcgscttggaagaaacacatataaagaacaatatgcctttctctacaagtaagtatcacctatgctccctggaacatggccaccaataaatcgtgaattgaatcaaaatgcatgtcttttcttcaaaaccaaattttgatttctaaccaattctcagtgttcatcaaaataattgctgtcaaaactaggggcctatgcaaagtattgactcttcaagctgaaaacacaaggggtctccaaacacctaatttgttggttggctccatggttggcaggccaggtgttctttactcctcatagtcaagtcctggcccagggctggaaagctgaggttctcagcacagctgattcctgaacttcgtattcttttcctcttcctgctagtaatttcttaagtctgaacattaacttttgggtgccacagataactagtatggctcagatcttcagctcccagattcgcaacagctccctggctgttgagaagagttgacttagccttgttctcaggaaaacgatcctgtgcttgagcctkctctggcttctgagaaagccatgggaacctacatctctgcttcatgaaagtagtaagaaaagggctgactcagctgggaggacttccttttccttcttatagggaaaagctggtgtctgtgaagaggagttatcactaccatgactatcaggatggagacgcagatgtgttttccagggagccctttgtggtctggttccaatctccccacactggtaagacccacacaggcctttctgtctgggacctccccaacrgcccatgaatgygcagcagccttgagcatgagcccattaaggaggcattaggctggatgtgacagtgcattgcttctaatacttcaatgtagacgatgcagttcagtgtgatggcaccaggcttgcttctcagaatgccatgactcaagacttccccagcccagaacccactttctggaagcaatggtagtccactctctttggagagtttaggctcatggaaattgttttctgcaattccttggtacctgtcaagtacaactcttccttcctttttaaaaatcctggctgggtgcggtggcgcatggctgtaatcccagcactttgggaggctgaggcaggtggatcacctgaggtcaggaacttgagaccagactggccaacatggtgaaaccccgtctctactaaaaatacaaaaattagctgggcatggtggtgcgcacctgtaatcccagctactcgggaggctgaggtaggagaatcacttgaaccagggaggcagaggttgcagtgagccgagatcgtaccactgcactccagcttgggcgatagagtgagactcttgtctcaaaaaaaaaaaaaaaatcctaagcaatggcttaggtgaacccctagcctagaggctcactctccctccagtcactgcatygcagactcctccacaggccgcagcgggtgaggaaatccaaatggattgctccctgaactctaacaacagtacttgtactggcccctgattaagtgccagcctcctgtaatccttgcaatgactayaaggtagggagtaggattatctccactttacatttcaggaaactgaggtttaaaaaggcatggagtcacccagctactgaaatggacaggccagggttgtaacccaggccaccacctcaggagctcatgttcttttttttttcttctgtttttgagatagggccttgctctgtcatccagtctggaatgcagtggcatgatcttggctcactgcaacctccacctcctgggctcaagcaatcttcgcacctcagcctcgcaagtagctcagactataggcatgcaccaccacactcagctaattttaaaatttttaaatagcgagataggtctcgctatgttgcctaggctgttcttgaacccctgagctcaagccatctgcctgccttggcttcccaaagtgctgggattacaggtgtaagccactgtgcscagccagtggttaacatgcagtgttatgcaatgctcgatggagtcaagaatcaaatattttttcagtacctactatgtaccaggctctgttgagggcactggacaagacagaggaggtgacattgggctgtgacctgaagaagtcagccatacagagggctggagaaagggcattccacatggagggcacagtgagcacaaaagctcagaagtgggaaggaagctggaatatttagggggaccaaaaagaggatggaggagtgcagtggaggcctgaggaggagagctggcaatgaggacacgtggggccctggatgcagcctgctgggctgagttctggctcctctctgtgtgacttgagcagtgaccgccccacagcccgtgtctgttgaggtaagagtgggaatccaggctgagaatgaggggaagtcccaggaggagctgctcagaaggcgacagctgctgttagcaggtgggccaggaacggcttctgaggctcgcgcacattgccacactcaggctctcagtcctccaacggtgggggaaggttttcagacacttcacaaaagtctttcgtgaagaccatgctaatttttaaatagctttttggaacttttgttcttaattacaaaggagtataaactgacaagcctcatttttttttttttagacagagtttcactcttcttgcccaggctggagtgcagtggcgtgatctaggctcaccacaacctctgcctcccaagttcaaacgattctcctgcctcagtctcccaagtagctgggattacaggcatgcgccaccacccccagctaattttgtatttttagtagagacaggttttctccatgatggtcaggctgatctggaactcccgacctcaggtgatccatcagcctcagcctcccaaagtggtgggattacagaagtaagccaacacgcctggccaatttttttttaactagaaaatgtgcgactgggctcggtggctcatgcctgtaatcccagcactttgggaggctgagatgggtcagtttatactctttttgtaactcccagctgggtgtggtggctcacacctgtaatcccagcactttgggaggctgagatgggtggatcacctgaggttgggagtttgagagcagcctgaccaacatggagaaatcctgtctctaccaaaaaaaaaaaaaaaaaaaaaaaacaaagctagccaggcatgatggtgcatgcctgtaatcccagttacttgggaggctgaggcaggagaatcrcttgaacctgggaggcagaggttgcagtgagccgaaattgtgccattgcactccagcctgggcaacaagaacgaaactccgtctcaaaaaaaaaaaaaggaaacctttaaaaaaaagaagaaaatacaaccataaatatatgcaatttttcctgtcaattaaaaaaagaaagaagagggataaaatacatcagaaacaaaagaaaatacagatttgccacacacacaaaaaggggaaaataaaagcactcacaatgccagcatggaacacagttgttataagtaaaatgtttatttagaaacagaatgcttgttccctggtactgcaaggaaaaatcaacattcagataaaaagttttctcagcaagccaattttactttctgcagaaagggtgctccttgcagatggaacaatggcgagagcacacctgaataaaggagggaagcaatttttatcctttactcagcttgtccctgctactgtgtcctgtctctctattggctggagccagaccacacaatctaagctaacccgactggctaataatttaaacctttcttaaataggtaaaggcaagggagaacaaaggaaaagaggaagttgcttatgccaaatagggaaggggcaaaggctgtgagctggaatgtgcctgygagctggaatgtccagcacaaatatcttggttaaggtacaaggacatagaatgtactatgtgcctgtgagcatgtctaacagctacataggatagagcttaacaaagagttattagcacaaagcaaggagrcttgaaggaagttagtctttaaaggaaactattatttctaacacttatgatttattctttaataagaagggaaactttgaagaggaaacttttttactttctacaacagtctaccagctttctcttagccatgaagggcaactgggagaaatgagtctttcgtgtactaaaaataggcagcctaatgaccccaagatcattaaaatctcggccactggctggaccctctgggaactggggacccagataatgcagcctgtgccttctggaggggacagcyggtttccctccagcagtgtttatgagaccttgacaggggaagtgtgtgacccccgcctctttcctgtttctcagctgtcaaagacttcgtgattatccccctgcacaccaccccagagacatccgttaaggagatcgatgagttggttgaggtctacacggacgtgaaacaccrctggaaggcrgaggtgakgactgctgtgtcagacgaattcccatctagcaggggcaggctctggtccctgagtgggatgagtacctctccagggarggggaggaggaagggcatgtgcaggctaccaccacttacagcattctttaaggcctttcttcagccctaagtatcccttttgctaaatctgcctgggtaccctgcatgtgggccttgggaattgccacactttcccattaataacagatgccaacatttactgagtgaatagctagtgccaggcactgtgctgagacttgacatggacaagtttatttaatcctcccaataatcccttgaggtagctacagtacctttctcattcccactttgcaattgagaagtgtaaggcatagagcagtcaggattgtttcagttgcaagggacagaatcttaacatggctcatgaaaaaaaggagcaattgattggtttgtgtaactgaaatgtccaggagtacttcaggcatagctggatccagggctcagacaaggtaatcagagcttgatttgtctcttcctttctatctcctggttgccctttcctctgtgtggctccattctcaggttggytccatccctgggatggcaggacagccaccagcagcctccagaccaaaataaattttctttcccacaaggcaacaaatagtgtgggactgagtctcattggctctgactgggtcaggtgtccatccctgaaccaatcattgtgatcagggtgttgasmtactctgattgactaaatctgtgtccaccccagctccaccccaaactcagtttgaggtggaggagggatgggtggtctcccaaaggaacttggggtgctgttttcacagaagggggcacatatttgccatccctataggctcagttctttccacttttggaagagaccacttgtggctgtgaggggctgtgaaagctcttggtaaatatggaagtgcacccaagggttcttcttctgtatttctcttttctcgtttcggaatgtgactcctgtgatcccccttcctcctcttgagttctgctgctcaaatgcaaaatgaatcaaataaagtgtgaacatagtccatcagagctggggcatggaaaagaccaggggtgtrtttcattgcttattaataaataggtcaaaagaaagattcattctttccaaaaattatgaaatcattcacttattaaacaagaatgtattgagcatctattgagtgttgggctgtggggaggcatcagtggcctaaaagtgaacaagaggggaaactgcttcagtgaagcagactgggatgtgattctttttttttttttttcttgagatgaaatctcgctcttgtccccaggctggagtgcaatggtgcaatctcggctcactgcaacctccacctcccgggttcaagtgattctcctgcctcccragtagctgggattacaggcatgtgccaccacgcctggctaatttttatatttttaatagaaatggggtttcaccatgttggccaggctggtcttgaatgcctgacctcaggtgatccacccgcctcggcttcccaaagtgctgggattacaggcgtgagccacggcgcctggctgggatgtgattcttgacttcaccatttgaacctcccagtcctgtggcctagagcaggtcacttaatctctcaatcctgtttctatagaagttagtgggctcttgtacctcctattgtttattgctgccaggtgtaaatttaaaaacacctagtgctaggcctggcacatagtgaatgttcagcaaatcmtgtctatattagcagaagctggtgatcactgaggttaaggatgacactctgtcctcaactgaacccatcaatcayggggaaaattgtgatcaccaaggtcaaaataaaatgttcttgaagaaaactctgaagtcagcaatgccccaccaaacaatagcacaaacaaggaaatctggcacttcctctggattgtggaatgttgaaaattctgttccaagagccttgcagggaaaaatatttccaagataggaagtttctcttggtggccttgggtgggggtggacagctcactcaatggtcccctcccctgaagatgcctcccacctcctcaagggactgaattttcacagaaataagtttccaacttcaaaacaataggagagaaagagtgatgccagggttgtcaatacaccacccaaattcacttttcctgcttgaaagcaaaaggcgttgattcattcgtatatttacaccctacagtagtttgagccagggacaaaagatgtgagggaatagattcactgaaattttttttatccacacctgactctgcatgctgaattatggaaatgtggcgactaagaacagcaaacattctccttcctgttaagaacatcctccctggtacgcactcgcctgtcatcgactcatcaaaactgtgactcaattttaaacaacaaaaagaaatttttaaagaccttatattcatttgctagagctgccataacaaagtaccatactgaagactgggaagtttaaacaatagaaagtgagttcgtcaccgttctggaggctggagtcccagaacaaggtgtgccagcagggctggtgtcttttgggggcctctctccttggtttgtagacggccatcttcttccagtgtctttacatggtctttgctccacttttctgtgtcctaatttcccctttttacaagaacgccagtcatattggattagagcccatccatatgacctcattttaccttaattccctcttgaaaggttctatctccaaatacagtcgcattctaaggtgctgggggttagaacttcaacataggaatttggccggggcgggagcagggggtagacaagattcagcccataacagaccctgttgtttactgggcctgggacgcagagtctttgctagagtccastgtgaaagcattctgcagcagcacccaccaggtgacagttccaaatcttgtcttttagaatttcattttcatgggtgacttcaatgccggctgcagctacgtccccaagaaggcctggaagaacatcygcttgaggactgaccccaggtttgtttggctgatcggggaccaagaggacaccacggtgaagaagagcaccaactgtgcatatgacaggtaggaggccctgcagggtgctgctggctcaccacagtgcttggtgtgcactaggaaagacgcaaggtggctgggcactgtggctcacgccagtagtcctagcactttgggaggcctcgatggatggatcgcttgagtacaggagtttgagaccagcctgggcaacatgatgaaaccccgtctctacaaaaaatacaaaaattagccaggcatggtggcacacacctatactcccagctactcaggaggctgaggtgggaggatcgcttgagcccagaagrtggaggctgcagtgagccaggatcgcaccactgcactccagcctgggtaacagagtgagactttgtctcaaaaataaaaaataaaaataaaaataagaaaagcacactgcttgcagagctgagtcaattaaatgtcaggcccctctactgggtaccacatgtagcgtatgaaccacaggaccctatgcggtggccctgggcactgtagcttagcagaggtaagcactggcttcgctatcagataggcctggatttaaatcctgacattatcacttcatatgtctgtgaccaagagacaagctctctgtgtctttcatttcctcccctgtaaaatggaagttatcctagtgcctcactcatgaagatccgatgtggagtaaatgaaataacatgtcaggctgctagcacaatgcctggcatacggcaagtgctcattacattcatgggctgatcattgttccatcacaaagacttaccgcaattgatgcgcccaatccccatcattaggcattgggttattaccaagggtttgctgttataaatactgctaaaatcaatatcctctgtgcattttgtgcaagtatttatgatttcctcaggaagcaaccctaaaaatgagaccaattagtgcaacggtatttatatttttaaagytttagctacatattcctaaatgcaatgcatacatttaagtcctagcattccctcgtgctttttaaagtcccttcagggattttcaaacagctttcatctttgctccttcaatggggacagaggggggagtgcctgaggcgtgtgaatgttagtgatcttccatcacagagaccacaggtggggaaacccctaggagcctggtcccaggtggtggccacagttcccagagctcagcctgccacgaggaagtgtgagatggccatctgcatgagagccaccaggccactcgttttcacttcctctcggagttttttttttttttttttttttttttagacagagtctcgctctgttgcccaggctggagtgcagtggtgcgatctcggctcactgcaagctccgcctcccgggttcacgccattctcctgcctcagcctcccgagtagctgggactacaggcgcccgccaccacgcctggctaatttttttttttttttgtatttttagtagagacagggtttcaccatgttacccaggatggtcttgatttcttgacctcgtgatccgcccgcctcggcctcccaaagtgctgggattacaggcgtgagccaccatgcccggcctgttcctcttggagcttttgaggctggtgtttcctttgcagaagttatcactctgcaaagtgggaacccaaggcggggagttacaggggtctaagtgcccagaccccctattttgaaggacttccagcaaagcctggacgatggccactcactcagttacacatggcagttgtgtgcccgtgggtaggtcaagtcccttctccagcgccattcttctcccctggcaaatgagtgggaagtgawtgaaaatgatacagaagaatcagaaggcaacatggccacagtagatcaggtcwggggtagaacaggttagaaaaagatgtttactaaaaggatcctgattttatacacatgtatcccaaaggatggtgggattacatgtgacattttaaagattcatttcttattttgatgctctgaattttgtttctcataacaacatgtataactcttgtgcctcttttttttcttttttttgagacagagtcctgctctgtcgcccaggctggagtgcagtggcaggatcttggctcactgcaacctccgcctcccgggttcaagcgattttcctgcctcagcctcccaagtagctgggattacaggcatacacaaacatgccccgcttttttttttttttttttttttttttgtaattttagtagagatggggtttcgccatgttggccaggctggtcttgaactcgtgacctcaggtgatccgcctgctttggcctcccaaagtgcttggattacaggtgtgagccaccatgcccggcctcttgtggcttttaaaaagtcataggccagttgtggtggcatatgctgtaatcccagctacttgggaggctgaggcaggaggatcacttgagcccaggagttcaaggctttagagcaacatgatcacatgcctgtgaatagccacggcactccagcctggacaacatagtgagacctgtctcaatacaataaaataaaaagtaaaattaaataaaataaacggagaaaatgaaaagccataaaaatgatgttttaaaaatgtaattagacaagatggtctcagttccagtctttgttccatgttcacatatttatcaaacacctctcatgtgctgagtgctgggggaacatgcaaagatgcccaggatctggctggtgccctggactgaaaacgtcacatgaacactggcctggtcctgcacatccctagaagaagtcagaaatggaagagcctttaacatgtcattctttgctttctgagtcttaaagaaagctttcacaaatgtctaacttgatgcgaagaatttacatttgggttgaattaaaagccgtagcccgggccgggcgtggtggctcacacctgtaatcccagcactttgggaggctgcggccggtggatcacgaggtcaggagatcgagaccatcctggctaacacagtgaaaccccgtctctactaaaaaatacaaaaaaaattagccaggcgtggtgccgggcacctgtagtcccagctactcgggaggctgaggcaggagaatggcatgaacccaggaggcagagcttgcagtgagccgagattgcgccactgcactctagcctgggtgacacagagagactccgtctcaaaaaaaaaaaaaaaagccgtagccctggagcggtggcttacaccggtaatcccagcactttgggaggttgaggtgggcggatcacctaaggtcacgagttcaagaccagcctggccaacagggataaaccccgtctctactaaaaatacaaaaattagccaggcgtggtggcacacacctataattccagctacttgggaggctgaggcaggagaatcgcttcaacccggaaggtggaggttgcagtgagctgagatggcgcactgcactccaacctgggtgacagagcatgactgtgtctcaaaaaaaaaaaaaaaaaaaaaaaagttagttgtgctggtgatgttagcaaatgcagataccaaaactgttgattagaatggggaaggcccactggtcactcatgaaatggcagtttgactcaccttgccattcctcgggaagtcactcaggaccacgtagaccacaactgcatcacccaacttgggatatgttagtttgtttccaaaactcatttgactacctcattcttactttttgtcattattgcaaagcacatatgctgtgatttttctcgatattttccattaaatcgcttaatttcttgctgaaataaatttttaaaagaaatttcatgatactagcatgagtaagaaagcagcagcatttgccataaattgaaggtaacgtaaaaattaagtccagtgaaaatcacgccttgttaaattctgccttaattctcttgcctgcagaatgctcggagatggcagcctactctctgtcaacacgggactgagggaggtattaaagacaaaccagcacctccctgagaatttctccataatcaaatcagggaaagtgaaaaataattgaaaaaggaacagcgttctcagtacgcaagtcattgttgtgtgggatagtgtgcgtgtgtcatataaaatcttctcctactccaccagaacattgcccacactgggagacagtgtcctggtgtccacagaaccatggcagggactgatcctatttcacagttgtaggcactgtcctttagggtcacaggctaaaaccagctctggactttgagcgccacatgaaagggccagactgctcggttaattccagacagcaaacacagaccttggtttgatctcagcaatcacaggttggattaacacaactgttttccctccccttgttccaggattgtgcttagaggacaagaaatcgtcagttctgttgttcccaagtcaaacagtgtttttgacttccagaaagcttacaagctgactgaagaggaggtaaggttgccatcttgtctttctatgccattgtcctggaargatgagttagcttgggcaacatgatgagacyccatctctatgaaaaattcaaaaaaattagctgggcatggtgatgcatgcctatggtcccagctacttgggaggctgaggtgggagkatcacttgagtccaggaagcggaggttgcagtgagccaagatcrcaccactgcactccaggctgggcaacagagtgagatcctgtctcaaaaaaaaaaaaaaaaaaagatgggttgatgccaccctttgaggtcaccactgaagacacaacattgggcactagaccttgaccctcaatgcctatgattctgtgatttgaggcccctccaaaatttctgatcgagctggtcttggaatgacgcttaccagtaagtgttctgtggggtgacttcgggcatttcctctcccctccctggtcctaaatttgctcatcgctaaaatgaaagcatctcccaggcatctcctaatttccatgtctacctcccctttctccttataggccctggatgtcagcgaccactttccagttgaatttaaactacagtcttcaagggccttcaccaacagcaaaaaatctgtcactctaaggaagaaaacaaagagcaaacgctcctagacccaagggtctcatcttattaaccatttcttgcctctaaataaaatgtctctaacagatatgaactgctccctgtacttaggaaacaagagtgatccaactgctttcattttttgacctgaatttattctgacttgagccaaattggaaggagaatcttttgtatctctcttggtctcatacctcccctgaattgtctaaaagggaaccaggggcatttgtagaccaaaatgatgatcttcatgccctgagccagagccccatccactgtcactggccctgctcaaccctgtcatgcgagaggctgcagggggaggaagagcgtcagctttcagtcctcatgaggggtcctgttccacacgcaatgaccagaaacaccaaggccccagctgcccctgtgatttgggcaattaactgttttaagagtctgccccctcctctctgaggtcaggccaccatcacgtctcacagtgttgagggataaaggccactcccacctggtttctctgccttcgaattgtcctccaactcagccagcccaggaagcatcagtgtcatcctctgaaatactaatctgaccacagcccaccctcagtcccaccctcagtcccaccctctgcccataaatccttcagcggctcccatcaccatcggagagagctcagtcttggccaccatgaaggtctctgctatctggcttattgcgccagccccaccttctgccagggtcccaccctgaacccctgctccaggaggatgtcctccgccctgcataccccatgctctccctccctgggggccttggctctgccccccccatgccctgccctattccagagcccgggccaagtgcccccagccctcatgtgcgccctacctctattgcaacatccaccacattatatttgtcaccaaggtcagtgttggaggtctttggggccccagtgtgacaaacacctagtgggctggctgggactcgaggattttgttatctttctgcaatcaaggaggctcattggagtccaacaacacagcaccatttagcctgtatccaaggtgcccatttttgtttgttttgctttgttttccctgatgtttctttgttcaagtcatacacgaacatggctaaatgtgtgaacagtaccgaagaataagcagggaaaaggaatgccgtgccctgaccccatccccgagtttcctgtctcagaaacagcccctcttcccagctcatgtgtttttccagagagtctgcacagaaatgagcactatatgtaaccttaaaaatacaaaatatagcacaccatatgcatggttccactcttcgcttttttcctttaatatattggggatgatgtgacttttgatgtaggagaaaaagaccttaagtctgacacttgaaattatgtaacatctgactgggggaataaaatcaaaagggccctggttaagcacgggaagccatcttcctcaaatgtccaattaacctcattggacaaaggtctcactggaattggtgaggggtgagtgatggcaaggctgctaacacatctgtcacccttctcctaagccagagctcatagtcccaggaaacttaccagtttccaaggtccaaaatggtcaaacaaggtcaggcgaggtggctcatgcctgtaatcctagcactttgggaggccagcctgggcaacatggcgaaaccctgtctctactaaaaatacaaaacattagccaggcatgctggtacactcctgtagtcccagctactgggaggctgaggcacaacaattgcttgaacccgggaggtggaggttgcagtgagctgagatcgtgccactgtactccagcctgggcgacagagtgagactctgtcaaaaaaaaaaaaaaaagtcaagcaagtcataaatgggcttattccggagagagaggctcatccttctgtcccaaagtactgcaagctccgaaagcccacatggctgggataagaaccctggctgctggggcttgagactccatgctgggtgggggaggaatgggaaggaggaccagacactaaatgagtcagtccatggctctgacttggtcctgacaccctgcagcttcctcccaacaagacatctctccactcctgcccaggagcaggttactggagccacaggcatctgccagctcttattccggccaaattctgacaggcaagagggcacagcgcagggcatgtctcactgcgcataacctaatggagctgcaaacatcctcctgtccctttgggtcacctggcctggcctgggcaaggaactctggtggccttttggggaaaatgggtgtcccctggtcataggcacccttttagccttggctttgtccaaagagtctaaagcttggctgggtgcggtggctgacgcctgtaatcccagcattttgagaggctgagatgggaggatcacttgaacccaggagtttgagaccagcctgggtaacatagcaagaccccatctgaacaaaaaataaaaaaattagctgtgcatggtggtgcatgcctgtagtcccagctactcagaaggctgaggcaggagaatcacttgagcctggaaagtcaaggctgcagtgagctgtgatcgtaccatggcactccagcttgggaaacagagcaagaccttttctcaaaaacaaaacaaaaaaaacaaacgaacaaaaaagagtctaaaccttggtgtgcactggaatcccagggaaccagttaccatggtgattcccaggtcccagtctcccagagtctgggccagggcccaggaacctgcaatttcaacaagtcccccggttgattccaaggcacatgatctgaggcccagatttgaaatcactctcccagtcccccttggtgaggcgaggtgtagcatggtagcaaggaccaggctcactttggagccatagtctctaccacctaccagctgtgggacctcgagcaggctacttacctttagtttccttgtgtgtaaaacagagataataagagaatcaacctcataggtaaagtttaaataagatgatggatataaggcatggaggatgtgcctgatgcttagtaagccctcgataaattaaattcccttacttgtatatttgtattaacagggcttgctctgttaaagggtaggccgctttaagtctgggtgtgcaggttgctcgagcttagttattcagaatgaatttttgccacacaaggaatcatgccagggttccatttctttgtcattcaccacggcaaatattttggcaggtaaccctgaggatggagacgcccctgcttccagtccttgtgacatccttttccttgtcaacaccactttcctgccacaaatacagaaaccctcccccagtgaccttctccctgaccctgctgggggtggggtgggtgaagggagcttctgcaattcagcaaccctgctcctatctctcccttgggctggagagggcaagtataaagagtagttgccaaaccaggaaagggcgacaaactgggggccacatccctcgtccctcccggaaagaggaaaggcacccagcccaggcaggcgtgagggtggaaagcagggcagctgagagaggctcacatttgcatcagctgctgagtctcctgatcagggcgggcttccacctgaatgatcctgaaggagccagcatccccatgtcacttgcccatgggccatatttcaaaggaggagcgggtccccacggtccccaagaccctggcaacagtggcgtcaatctttgggattcagggaagctactaaaattaaatcaaaataagggaatttgaggaaacaagaatctatggatgcaggtttgtgtgtgtgtgtacgtgcacatacacacgcactcagctctttcccaggggtctccctgcctggcacatattcctcggcctgctcagcttctggctgggtcataccagcccatgtccctgcctcaaatgcgtcttccgatggcaggtgggaggaggttggtcatttacagaaactcctcctgctgcccctctatgctctgggaaactctaccaccaaataccctgggagttttatttttccgagttatcattactttgagattcccgctcctgagatcttttcacagtttcctagaggctagagctgaaaatatccttaaaggtaataataagtaatggctgccatttgctaagggctgctgtgtgccaggctgtgtgctaagaggcagtggcgtgggccatctcactgaattccaaccgcagcagcgaggtggagtctgatgtcatctccattttataggcgaggcgagtgaggcccagagaagttaaacaacttgcccgagggcacacagctggggagtattgaacccaggtgactcacccattaggcacagcactgtgcctagggcccatggaaatgtgttaatttctttcagaatcagaaagaaaaacatgaactttggggatgaagaaaaaattaacataataataataacatgtttgtctttataccaatatagttgtaaaatacaattttaatattttttatgggggaaaggatctataaaggcaaaggtgcctaatgcccgtgaaagccacaatggggccctgggggaggcagaattaaaatcccggtctgcctgccttcaaagttcgtgctctcttcagtctagtctaatcctgtttacaggtgaggaaactgaggtccaaggccacacagcgaatggcagagccaggtggagagctcaggtttccagtgagccaaccaccatggcttgtggtccgacatcaccacccggtggccttttggggaacttacctttagtccagaggtgaacctagaaagagaaagggctcagacagttccagatacccgcaggaaacctccacaagccagtctgcacttgggctccacactcagcagtggtgaagccaggccagggagccaactccacactcacttgaggctgtcgttggaattcacacatctcagcctacacacacacacacacacacacacacacacacacacacacacccctctgccagggtaaaagcatcatcccccagagttaatatttgtaaagttcttagaccagtctggtccaataggaatataatataagccaaaatgtaatttgaaattttctggtagccatattttaagaagtaaaagaaataagtgaaattaatatatttaatattttatttaacacagaaatcagcaaactatacagcctgtgggggaaatctggcccaccatctgttttttttaaataaagttttattggaacaagccatgcccatttgtttttatattgtctatggctgattttgcactgcaatggcagagttgagtagttgcatagttgagaccaggtgatccacaaagctgaaaattcttactatccagtcttttagagggaaagtttgtcaacctctgatttagcccaatctatccaagtatggtcatttcaacataaaattcaatataaaaattattaatgagaaattttacatttcattatactaaatctttgaaattcagtgtgtgttttatacttagagtacatcacaatttggataagactcattgcaaatgctcaatggacatgtggttggatcatgactaccgaactggacagtgtagggcttagaacaatgcccgcagatatcaaacaggtattcattaaatacctaaataaactccccaccagcctttcttaactgacttccagaaagaattaagccctaacattcggggacagcccctgtttgtaatgaatcaacttctttcccatgcctgtagaatggtgtcattcctgggaggactgagaaaagtcactggtgtcattttctgtagggtttcatttattcacagaatcccagttgagaaatgctgcagccattccttttctaaggagcttgaagacttgctgctgatagagataattattattaatataaatcacatgtatagagccaggcactgtgctaaggtctttctgagcattgtttcaatgacagaaatgacaatggcctccctcaggaaggctcctctgtgcaccaaaggtgtccactgtcccccatacagcccttttcactatgtcctgtgagctccaagatctgacccctcattccccgggagctcagcctaggcccggcccacaggagctgctggatcaatatttgttgcattcaatcaagtaactctagagaacccgggggtcatttggtgtttgattcaacctggcaggtgtttttccagcagctctgttgtgcaaggctgctgtgtgcatctcaagggaatccattcccacattgatgctcactcacattcccaagactgcccagggaaaaccagacaagatagttgcattcgcagttttaagtggtctagctcctctctgacagttcaggctaagagacagaccaccagagaccagggaatagtgattcgtttgcccagtgctttctctgtccagcatgaggaactgcccttttgtccaagtaaggagggaagtgta

SEQ ID NO: 95367 - DNA, 18492 bp, Homo sapiens
  misc_feature (1)...(18492): n = A,T,C or G
cacccccttaacactggattcccagacatttagggcattctcagtcacaggatgagataggaggtcagcacaagatacaggtcataaagaccttgctgataaaacaggttgcaggaaagaagctagccaaaacccaccaaaaccaagatggcgataagaatgacctctgatcatcctcactgctacactcccaccagcgccatgacaatttacaaatgccatggcaacatcaggaagttaccctatatagtctaaaaaggggaggcatgaataatccaccccttgtttagcatataatcaagaaataactggaaaaatgagcaaccagtaacccttgaggcttctctgtctatggagtagccattcttttttttttttgagacggagtcgcgcactgtcgcccaggctggagtgcagtggcacaatctcggctcactgcaagctccgcctcccagattcacaccattctcctgcctcaggctcccaagtagctgggactacaggcgcccaccaccatgcctggctaatttttttgtatttttactagagataggatttcattgtattagccaggatggtctcgatctcctgaccttgtgatctgcccgtctcggcctcccaaagtgctgggattacaggcgtgagccaccgcgcccggctgccgttcttttattcttctactttcttagtaaacttgcttttgctttgcactgtagactcgccctgaattctttctgtgcgagatccaagaaccctctcttggggactggatcgggacccctttcctataacatctttctggtgaccactgaagggactacagtgcggaaaccctggacccaaaccccttacttaccaaggttttcaccaaaagtaaaagttgctaagagttaacattgtaacatgtatttgagactactaaagaaacagttcttctacacgtaaggcgtgtagggaaagcgaaatgtgtttttagtaaaagattataagaagtcacgggaatgtggattttcttgtctaaagggttaaaggattgttttaagttaaacaggataaagctaaaggtttgagcaagttatgaaaagtttataaaaaatgaatcttgtaaaaagaaattctttgtgtgaacatattggctaaagttaaaggggtattattcagtttttccataaattaagcattggactaaaagtacaacaggtttttcttagaacactaatctgctctttcacaaaaaaagtaaagggttaataaaaggtttatgaaaatcttacctatggtcaaactaattgagtattcctaatttatgcaatatagttatttgcataagtgcaaataagtatctgttttcttttgcaacaggacacaattggagaaactggttattttatcaaggctttgactggaatggcatgttttcttttaaggaattaaacttaacttatagagccaatagaagccccttggggaactggcctcataccttgcctacacagtccttgtacaggatttctgacctgtggtaagtaaagaatgtcactttctaacagacccaggaactccaagttatcttggaacctcaagaagagaggaatttacccaactcatacgtatttgagggtacaaacccatggcaaaaagtcttatctaagattccttctttggaacagagttccaggaaagccaatttaaaaagagcttatgtggctggctgtggtggctcacacctgtaataccagcacttcgggaggccaaggtgggcagatcacttgaggtcaggagttcgagaccagcctggccaacaaggtgaaatcctgtctctattaaaaatacaaaaatattagcagggcacggtggtgggcacctgtaatcccagctacttgggaggctgaggcagatgaatcgcttgagcccaggaggcagaggttgtagtaagccaagatcgtaccactgcactccagcctgggtgacagagtgagactccatctcaataaataaataataaaaagagcttatgtgaaaaataattattcttgctacactttatataaataatcaggccaagtataacaaagcaaatcagtcttaccaagatttgcctttagtaaaaatgggaaactggagagagaaatataatgtttcaagaacttatggtacactggttattagattctagtctcatcagttgtttttaagtttgtttctgcaatttaggctaacccagcttattcctgtgaaccaaccagtgatctctgactgctgctcaaaacaaacaagagtgatggtgtcaggtctctgagcccaagyctgcacgtattcattcagatggcctgaagcaagtgaagaatcacaaaagaactgaaaatggccggttcctgccttaactggtgacattaccttgtgaaattccttctcctggctcgtcctggctcaggagctccccgactgagcaccttgtgaccccccacttctgccagccagagaacaaacccctttgactgtaattttccactacctacccaaatcctataaaacggccccaccgctatcttccttcgctgactctctttttggactcagcccgcctgcacccaggtgattaaaaagctttattgctcacataaagcctatttggtggtctcttcacatggacgcgcatggaagatgggtaatgtaaaaatctgaatcgatattctaattctgaacacactggaatcagctagcaaccccacatcagcttggttccaacagttgcccagttcatggaaagccttctaatttagtttacttgggataattttacttattttgctttactcttgtggaatatattgctattgtactctttgtgtaggagtgcaggataagcttactgaatgttttcttaaactgaatacttattaatcttccagatatcaccttttgtcagaacttggagttatgaatggccctcactatactgatgttttctgagctcctctctactctgaacataagggaccctaatagttaagcaggaatatcatcacccctattcagcctgaagaagttacagaagatgcatcttcatccctccgaaacttttaggattaaagtttctctcataatagggaggaggcaaatgtcagaggaatgtgaaccagagcaactccatcttgaataggagctgggtaaaatgaggcagagacctacagggctgcattcccagacagttaggcattctcagtcacaggatgagataggaggtcagcacaagatacaggtcataaagaccttgctgataaaacaggttgcaggaaagaagctggccaaaacccaccaaaaccaagacggcgatgagcatgacctctggtcatcctcactgctacactcccaccagcgccatgacagtttataaatgccacggcaatgtcaagaagttaccctatatggtctaaaaaggggaggcatgaataatccaccccttgtttagtataaaatcaagaaataatcataaaaatgggcaatcagcagccctcagggctgctctgtctatagagtagccattcttttattgctttactttcttaataaacttgcttttgctttgcactgtggacttgccctgaattctttcttgtgtgagatccaagaactctctcttgggatctcgatcgggactgctttcctgtaacatctccttttgcttggcaaatctgatcctgaaatcttttggtgctaggttgtgggaaaggtgggaaggactgattcactttttcattctgagcaccacccacaaacttttgggggctgaaatctcaagttcaggagtttctcagggatgctgtggcagtctaggaagtgctggccattcctgaggccctggcagggacagttgggactagacgatggtggcaggtgagggagactcagaaggtgttgattccatatcttgaagatcttctatccattttacagatgaaacagtcccagagagtaaatgtcatctctatgcagctgtccccaaatttctacctttagccctgactaggccctaggctccaggcaacctgggtatgtcccagtcatctaaagaataaaggctggctgcagtggctcatgcctgtaatcccagcactttgggaggctgaggcgggtggatcacttgaggtcaagagttcaacatcagcctggtcaacatagtgaaaactcatctctactaaaaataaaaaaaattagccgggcatggtggcaggtgcctgtaatcccagctactcgggaggctgaagcaggggaatagcttgaacctgggaggcagaggttgcagtgaggcccactgcacttcagcctgggtgacagagtgaaactccatctcaaaaaataaacaaaaatacactcttacttccccagctcctggcacttacactgccccaggctcctcccttaccccatctatccatccagcaatgacaaaaatccaaaattttcctctgctcttccctagcacttacagcattcctattgattctagcccaaatagatctcaaaactgtccccctcctctccatctggaagttgcctcctagtctgcctctgttgctgccacagacttcccagcatccgcctgttctgcctttgcctccaccccctcccattcccagtcagcaacctactggaagttgcaaattcctaatttggcagcctgcagctgtgatccatagaagggaatgtttggaatgtcttggggatgggtggagactgggtgctcaattgtcccatctgacccccaagggccaaattaagactaatgagcttccagaggttgtccctatggccaagtgtttggcacctccccataagggaggagaccacccctcatattgtcttatgcccaatttctgcctccaaagaaagaaaaagtaaaaactaaaaggcagaaatgaaatccacaaacagacagcctggtgccacaccctgggcctggtaaagatcgaccccgacctaatcggttatgttaactatagattacagacattgtatagaaaagcactgtgaaaatccctatcctgttccagtctaattaccggtgcttgcagcccctagtcacataccccctgcttgctcaatcaatcatgaccctctcacgcacacctccttagagctgtgagcccttaaaagggacaggaattgcccattcggggagctcggctcttgagacaagagtcttgcccatgcccctggccgaataaaccccttccttctttaactcggtgtctgaggagtttcgtctgcggcttgtcctgctacatccatagggccgcccttctctaaagttgttgtaaccttcccccaagcaggaatccacttctgctttaggaagcagtgggaaaaagaccatgctttagagtcaagacagtcctaaattaaaatatcggctcatttaatcaatttctgcttcagtttaaccgtcttcaaaatggagataataataacactaattacccaagtggggtactgtgagaatgagctatacagcacatatctcaatgcttggctcacagtaggtgcttaatgcaatcaatgaaagctatgatgtgcattataaggaatcaacagacagcactgtccagggaagactagactcactcatgaagtgttaagttccccatcagtagagcgtgtgcaagcacttcttggtgcccaaaggattccagcacccacaacaggttggcctaactcttaaggtctctccagcttccagagatcatgctcctcagggtctgacttctagtccccacgcttcaagtaacaccgaccaggcacgtgtgcccagcgtgcaccccgcctgtcggtcaccgcctactgtcaataaagttgatttgaggcggctccaggcagaggggcacggccacccacacgccacctcagcccggccccgcggcccctcacccggtgggcgggtgggcgggtcacgcagccggcgcgccttgccattggcccgcgccggtggaggcggggcctgctcacgtctgccggcccctctgttgtcgtttggcagcggatagaggacacgaccaagatggcggcggtgtctggcttggtgcggagaccccttcgggaggtaggcagcagcgcgcggcctgtattcccacgcgacccctgcccaccctgcgtcccgccgtcatcttcctctctccctgccaggtctccgggctgctgaagaggcgctttcactggaccgcgccggctgcgctgcaggtaacaggcgcgggtgctcgtcggacgagggcggggagggtccccccttctctcgggaaggaggccggagtcgcgcctgcgctgtggccttccggcgccgtgggccttgggtttgcggagccagcatcctccgtggagctcctgctgcctctgtcgccgcctggcaattagcacaccggcgagtcaccacctcacagctggctgggcaatgggggaaaactaagactaggcgtttcctccctcactccatgtttttttctttaaattgcagcaaaatagacctaacttaaaatgtactttttagaagtgtataattcagtggcattaagtacattcaccatgttgtacaaccattaaccaccatccatttccagaactttttaatcatcccaagcagaaactgtccattactcggtaactcctcatttcccttccccaaacccctggtaacccctgttgtacttttctgtctttatgaggttgcctattctagaacttcttataagtggcatcatttgtccttttgtgtctggcttatctcagcgtaatgtcctcaaggttcatccatgttgtagcatgcgtcagagtttgattctttcctaaggctgaataatatatatatgtatatttttttgagatagtctccctctgtcacccaggttggagtgcagtggcgcgatctcagctcactgcaacctccacctcctgggctcaagggattctcgcgcctcacactcmtgagtagctgtgattagatgccggtgccaccacaccgggctaatttttgtatttttagtacagacagggtctcaccatattgcccaggctggtcttgaactcctggcctcaagtgatctgcctgccttggcctcccaaagtgctaggattacaggcatgagccacctcgctcagcccgacattttcttttttttttttgagacggagttttgctcttgctgcccaggctagagtgcagtggcactatctcagctcactgcaatctctgcctcctgggttcaagcaattctgcctcagcctcccgagtagctgggattacaggcacccgccaccacacccggccaatttttgtatttttagtagagaatgggtttcaccatgttggccagggtggtctcgaactcctgacctcaagtgatccacctgccttggcctcccagagtgctggaattacaggtgtgagccaccgtgcctggccttgttttgtctattgtgagtaatgctgctgtgaacattgatgtgcaagtatatgcttgaatccctgctttcaattatttggggcatatacatagaagtggaattgatggattgtatgttaattctcctctccttcctttttttaactagattttaccattcattatattaaaagagcaactcctacattctggatgcaaagtatttggcagtrcktggcacctagtgagcactcagtacattaacacatgcaaagaccaactatgtgtaatagaaatgttacttttagaattctttgagtttttagagagaagcttgttctagtgtttttatattgtatgctgtgggcagcctaggtaaatataaaggaagaaaatcttagttgaatcccaaacaattctgtattgactgtttttgcatacctgtgacaggtgacagttcgtgatgctataaatcagggtatggatgaggagctggaaagagatgagaaggtatttctgcttggagaagaagttgcccagtatgatggggcatacaaggtaactaaaatatatgaaagttayacaaaattgaggtcactgttacccccagatacacttaagggatcaactcttaattgtaggttagtcgagggctgtggaagaaatatggagacaagaggattattgacactcccatatcagaggtaagccttccagtgggaagcagaccctggagggcatgtctrttagtgtccattatcctcatttttatggattttcacttatgtttatattttactttatagatgggctttgctggaattgctgtaggtgcagctatggtatgtaatactctttatgaaacttatccaaagacatttcttgttttctttttttttcttttgagacagagtctcactctgttgtccagcctggagtgcactggcaccatctcagcttccaggttcaagcaattctcctgcctcagcctccatagtggctggggttacaggtcgcgccactgtgcctagccaatttttgtgtttttagtagagatggggttttaccatgttggccaggctggtcttgaactcctggcctcaagtgatccgaccgccttggcctcccaaagtgctgggattacaggcgtgagccactgtgcccatccccaaagagatttaacatcaccttttaaaaacatcatttgggaaaaaaaaaaaataccaagtaggtagatgtggtggtgcttgcctgcagtcycagctactcgggatgctgaggaaggattacttgagcctaggagttagaggctgcagtgagctatgatgtgtgccactgcactccagcatgggtgacagtgagaccctgtccataaaaaataaaaataaaaaaaataaaaacattatttgaatgttggaagacttggagtgatttgtttgctactgtttgttgctgtttctagtctttttaacatccacgtttttgattttacaggctgggttgcggcccatttgtgaatttatgaccttcaatttctccatgcaagccattgaccaggttataaactcagctgccaagacctactacatgtctggtggccttcagcctgtgcctatagtcttcaggggrcccaatggtgcctcagcaggtgtagctgcccagcactcacagtgctttgctgcctggtatgggcactgcccaggcttaaaggtggtcagtccctggaattcagaggatgctaaaggacttattaaatcagccattcgggataacaatccaggtcagcacagggaccctttggttttttttgaagattgaaaaactaaaatgatatatttgcacagaggaaaccattaaagtcttttagttaggcttagatatatcgtatagaatgttaatactttatatagtaaagatagtaaagaatgtgcttgcttttcctatttccgaatataagggggccagctaggtaaaggggacatttactgcacacccacaatactggtttgatagataaaattatattgaccactacaaatttaagtacctaaactgctctcaaggctgctggtcatggtagagataaggctaatcagcacaatgaaacttctcacaagatgaatgataytgctttctatgcagttttagtcattctggatgtgattaattacttttgtttaaatatttatgtttttcagtggyggtgctagagaatgaattgatgtatggggttccttttgaatttcctccggaagctcagtcaaaagattttctgattcctattggaaaagccaaaatagaaaggcaaggtaagaaaactaagatatataaacagtatttttaatccagcccctcaattttggtaaaatttaatctagaagttactgtcatttactttgactgaaaaattataggatgagctcaagatgccccaatttctcattcagttgtgcttttctagatctcagtctggtaggtttgtgtttcatttctaggaaggctgccacattcctcagctcactggaatgaagttgaattgaagactttatgaatgaacaagagccacagctggckgcacagtggtgtagcatcttcartttcaacctgatctctgatctgtgaccactctgttttcaggaacacatataactgtggtttcccattcaagacctgtgggccactgcttagaagctgcagcagtgctatctaaagaaggagttgaatgtgaggtgagtggacatttacttgttcttaaagaattaraagggctccttttagatttaagacccagaagagttctgtaacaggttaattagatgtaaaaccttgctttgtcactcatttctgtctctgcttaaagctgggaacctgcctgcagttcacatacttagctttttaccwctcaggtcacttaggttctggatctttttttttgagagacagtgggagctctctgaacctcttctggttctcagtgataccccccgagagagaaaaaaacaggcttttgttctgttgcccaggctgaagtgcagtggctggatcatggctcactgtaaccgtgaactcctgggcccaagtgatgctcccacctcacccttctgaggttctggatcttttagaaactcaccaygtgctagttatacttgggcaagttatatactctaaatctgtttcatcagctataaaacagggataatataaatactgtcccgtcatagggctgttgtgagaattacacttagtgtagtgcttsgtacatgatgggcactcagctgttaactgttaacttattttgatgagggaatttaaagtgaaggaggattggctgggcgtggtggatcacctgaggtcaggagttcaagaccagtctggccaayatgttgaaaccccatctctactaaaaatacaaaaattagctaggcgtggtggtctatgcctgtaatcccagctactccagaggctgaggcaggaaaatggcttgaactgggaaggcgggggtggcagtgagccgagatcacgccactgcactccagcctggacaacaagagcaaaactccatcccaaaagaaataaaaaagtgaaggaagataaatgaatcctataactgcacagagctgcttgtggtagacatacagatctttgttttaattaaaatttttccttttacagtttgtacattcatgaataggtattcataggcagattagattttcctagatacaaagattaacaggaaacaaaaaargaaatggtattatggggataaggctctatttgtrctgcaatagctctgtaaacttgattatattacctgtttaggtgataaatatgcgtaccattagaccaatggacatggaaaccatagaagccagtgtcatgaagacaaatcatcttgtaactgtggaaggaggctggccamagtttggagtaggagctgaaatctgtgccaggatcatggaaggtatttcaaagaaactggttctagaatacagtcaagctatagtaaacatcatgtacctgaatacgtacaggataaagagattgaaagctaggagtggccaaacgacttcaactttaaacttgtaagtttggcatttctcttcaggcasatatttttaaaagcaaatccagaaagcggttccccataattagcattccttacattttctcttcctggtcagccacacctctgtgccaaggtggtagtgcccagctggcatttgcactctctcagttgagccttccttctcctaggtcctgcgttcaatttcctggatgctcctgctgttcgtgtcactggtgctgatgtccctatgccttatgcaaagattctagaggacaactctatacctcaggtcaaagacatcatatttgcaataaagaaaacattaaatatttagtttggacttgaatatcaagtcgttgaaatttatttgaaatacttgctggcactgcacctggatttgtactgcaagacctgactattcataamggaaaaygatttctaaagcaacagcaggtatttttgtacagggaagtttaaatgtgtttgtgtatggaaaactctccactctcctcccctagatgccatgcttccttttgtstgttacggttgccatgttctttgaataacaaattatatmacattttatcctctctcaccacaaggacaaagtatggatgtggcagagtcctsatgaaagatgtatccaaacaagataacttatatgtataaaattaaagcatataatayacrtttactgttagtttgttttgataaggaataaaggaatttctaacatgactaattttttttttttttgagacaatgtttggctctgttccccaagctggagtgtgatggcacaatcttggctcactgcagcctccacctcccaggttcaagtgattctcctgcctcagcctcagtaggaaattagccaccacatccggctaattttggtgtttttagtagaggtggggtttcaccatgttggccaggctggtcttgaacacctgacctcaggtgatccacctgccttggccctcccaaactgctgggattacaggcatgagccaccacacctggccatgannnnnnnnnnnnnnnnnnnnnnnnnnnnnnnnnnnnnnnnnnnnnnnnnnnnnnnnnnnnnnnnnnnnnnnnnnnnnnnnnnnnnnnnnnnnnnnnnnnnnnnnnnnnnnnnnnnnnnnnnnnnnnnnnnnnnnnnnnnnnnnnnnnnnnnnnnnnnntgagcagagatggcgccactgtactccagcctggacaacagagcaagactccgtctcaaaaaaaagaattggctgggtgtggtggctcagacatgtaatcctagcactttgggaggccgaggtgggtggatcccttgagtgtaggagttcaggaccagcctggggaacatggcaaaaccccatctctacaaagaaaagatagatagaaaaaaaaaaaagtcaatgtgggtagaaaacttgaaattctatttattaagaaattagtgctgccaggccacagtagctcatgcctataatcccagcactttgggaggctgaggcagggattgcttgagcccaggagtttgagaccagcctggggcaacgttgcaaaaaccctgcctacaaaaacaaaacaaaaaaaacaaacaaaacaaaaaacccaggtatctggtggtgtgcctataggaggattgcttgagccctgggaggtcaaggctgcagtgagctgtgattgggtcactgcactccagcctgagtgaaagagcgaaaccctgtcttaaaaataacaacaaaagaaattagttccatgtggaaaataagctgatactgtacaagaccattacctgtttgtattcatatatctgaactatccagaatagtcagcaaaactgacttcagaaggactcaggcctcacaagcctccatcaggtaatcacctaggttgcatcacacttgaaacaggaacttctccacagactctccaaatgcctaattctaatagcattctctttaaaattatggcaaagtttatatcagttgtttttcccatttccaaagatcagatattctgtcaaatactgccctccagaagctgagatggaaaagatgggtttaaattagttagagaagcatataggtggtacctaatttaagtagcaaggcaggatttttagttcttagaggaaaagtgagacacaaaagaataagagacaggataggtaggaaggaaaccttagactgtgtgaatctattctttgctaacaacagacgctacaaaaagttctcatttgaaatatcttgtcaagctacagacaacacgttttcttgacatgattttaataaaaaatacagctgacataacagattacatgaaactatacacaatgacattctctgcatagtaaccaacactgatgtgtgtacttgaatttttaaatggattatttataatcctttaaagtgcaatttattgaaargtttaagcaaatcaggataaaggatctttctaataaatgactaacattaaagagatgctatattgatatatttagataaatctttcaaaaatcataattgatttctatagatgccaaatttacttctgttgtaacaatgacctgcccccctcaaaccccaaacttaattgctgaggattaagaagatcctctaattggcaagagctttttctgatgttaatatttttgtctgtttcaatacatctaactaaaaagaactatgggtctagagtagttgctttagcagccctgagttctataaccacaatggtattcctgttagaacttaagagaatgttgtgaacgttccccattctatttgaggagaaaacaaagaactcagttgctttctgatttagcaaagtaactatgctttgggctatagtgttaatgtctaagataaaggtagcaaaaattggagttatctaagaatcagaaaatgctttagagaaatgaactgtaagaggaatgtttctaggagctgtctgatggggtagaagggattgcaacacaaaggccatttactgctgtgattgaatattgtcattgtttttctgtctatttcctttagttggtgaaaatatttcaatatgctgctgtcccaaaagcctggccattagaggataaacaagactcctttacagggttaataaaggagcaagatcttaagggagcaatgccagcctaactttattctgcttaaagaattatttctctcgaaaagctgcttacatgagcatctgcaaaatagtactgtttgtggctgtactggctcagcaattactttcccaggaagagggtagtttggggggtaggggtgagtaggaataaaaaagaacttttccctccaagtgtaaacaggaagcttcagccgatcttcggagcactgtgatcacaggttttggctttcctcaaagttcctttttggaaattctggatggagctgagcaaggcccctcggctcatgccattcacagcctgagacgagagctgggcaggtgcctcggtgctcgcaggaggcaagggagctgctggtggtggtggaggtggaggaggtggaggtaatgcagatatccctgtggaggaaaagggggacaatcagtattcacctccacagctgccctgcacacacgctgctgctcagtcctgagcacaacggactggtgagagtccacatgtttttctcagagggaccaacatacctagtactgtatgagttcttaaaatactaaagaaagctagaagcatcaaaggggaattaaaagttgccatgtttctcaaacaatagtcatgttaaaggctgttggaacaaataattacagattacatgaaaccacatatggtgacattctctgcatagatgaggctctgaccccatttgcaaagtaatagtccccaaagaagagttccatctatcagttactttagccaggtcccaggaagctctgtctgcttctgagctagcaattaaagatagacatctgcatgatggagttgggcttcctgaatgtcagttattcataaggggtgaacagttctttcgctgctccaacatacacaatgtttgaaggatgtgatcttatgtaaaatgacagaccactcaggattctcagcaaggaatcagtgcctcctgggttatgcatttcccagaggagtctgtctcgaataataatttcctattaggttgcattaaagaaatacaaaatgctaataactgttagcaatgcaaagcagggggcagaggggtctctctgccatggtattcttacagagaaatccttctcaagtactattctctccattgtggcccaaccaaggaacaggacataactgcactaaatgtctttgacgaagcatcaggagaaactagaatgtcgtgctgtaccgcagtgggcaaggagagggaaactgggcaggtgtctaaaacttccctcagcttccaggcacatggacatttgcaactcgaattttatattttagaatcaatgaatggttctctcaggacagaataaacacccgagttcagaaaaagccttgccttaaagaatgttcctgtgccacagttagttgcctcgtctcctgtgaccttgcagctctctgagactctgtcagatgctgtctctgtccctcccagggctactccagggagacattctgccaggtggtttcccctacactgctactgagttgtgataagtaacaggtaaagctaccctacttaagtttgtatggacgactggctcagaatcaccaacacaatactcaggtaagtacatccttttcaccaagtgtgacaggtatgggttaaagtcttacaatagaaaatcacttacctttctttacatcttttactcaaacctaaggcagctgaaattaaagaawcacacaaatacacacgctcatgctctgcaatcttggaatgctcaaakatagcaatacaaataaagactaaatacagacaaatgaccaacaygttcattggttctacacaataacaactgatgaatgaaattgttatgttttatgctaaggtggattgtgggaaaatgttcctggctttatgtcaccaggttacagagataaaaaggactttaaacctgaagtaactgttgaagtgggaaaacggagaataagcatgtgtgatgagcattcctctgaagaggacttctggagagcaaccagtgaaataccaggaggaggggagacctctgctgaaggtttttggaactgagtctcttgactgcaacaccaagtgggcccgaaggagtgagctctgcccacttgggggtaagtaggtgccagtgcccttccccagcaccctcccacccaatagccagaaaagggcagtggaatctggacttgatattcagggccacgtagtgtaacagaaggagctccagggtttctgcctcccaggtttgtgctttgacccccggcagaagaatcactgtgcagttaaggacaggctctcggctgcggcggtacttgggagttctactaaaggctcagcactggccatctagagactgactagccctccaggcaaggattttggggggctggagacgggcctcagggctgggctgaggggtaggggctgccatcttggcacagaacaaaactgcttggcctcacagagaaccaacccttggttttggcgtcattaccaggccctcaaaattagaagtgcaaatgcaccaccgcagagtttgggagttgagggtggggttcagtacatggattttccactgtccaagtaaatggacatggattttccactgtcactttaaatgagtctctttgaaaatgtaggtggtgtcaataaatacactgtccaaagggctccagggctccagtaaagcagatggaacgaaaggacaggcagcaggatctccctgatgtggcctcagcaggctggagcagtccggtggggcttgatgtcccagcaagtccacttttcctcactgggcctacaacaaccatggtggctcttatgtacaaccagggcaaggaaggccagacccagcttgccagtttggaacactctggaggggagaggaggtctaggggtcagaaggtggaaactggaggaggcaggaacacagacctgggactcggtctcactcagtctgccccattgattgtttttggcttttccttttggccctttccatggtccacaagcttcctgaaaggtccgttggggcttcagctacagcacatggctaacaatggaggaagagggggcaggggcaacaagggccaaatgaaagttaccatttggcctgtgacaaacctgggaacaactgcctgctgcctgcgcgctctccacccctcagatgtgaatgaggccttcctgccaagagacctccaatacccttatctccaggccacatatgagagcagaccgattccatgttagacttatgatacctgaatttgcacccaggaagggggatgctgcaaacagcttaccttcagttacgaccaggtcagtcccgatttctcccatctcactttctcttagacaaaatccctgagagccaactacttactctacccaccccaaaatcttctccaccaaaccacacgggaacctggcagtccagcagaggccctgtcagagggcagagaatgctgcagggagagcgtaggtcagatctagggaggaatgccaggccagaaacccccttgacagccttgtggacaggatgtctgagggtccctccctccagttcctttttttctgagatggagtctcgctctgttgcccaggctggagtgcagtggcgcgatctcggctcactgcaagctccgcctcccgggttcaagtgattctctgcctcagcctcccgagtagctgggattacaggcgcgtggtaccatgcccacctaatttttgtatttttagtacagatggggtttcaccatgttggccaggttggtcttgaactcctgatccttgtgatccgcccgcctcagcctcccaaagtgctgagattatagatgtgagccactgcgcctgg

SEQ ID NO: 95368 - DNA, 69220 bp, Homo sapiens
cgagatctgtttatcagtctttctcctttatttgaaatgggactctcactcgttaaaatcttctagcataatttatcaaagatcactgaatatgtttcttaagatcagatctaaatatccttttagtatcttgggcagtaatttctcttgatctggtaatttgaactaatttaaatttttgtgtgctctttctccatcttttcttcctatcctgagctcagtttccctctttgtgatattttcacctgatcaaatctttttccatgatcaagatgatgtaatataggaaaccggtagtttggctttccctctgccatctgttaacattccatatgctccgttccttttgcattcatcatttttatcctaatttggttttacattaaccttttcctgtctttagcagtggagtcccaatcattctgggtgttagtatccctcacctcttattaaaggtccaggttaatcttttggaaaatttccatcaccttctgtcttagtccattttatgttgctataaaggaatacctgagattgagtaattattaagaaataaggttaggctgggcacggtggctcacgtctgtaatcccaacactttgggagtctgaggcaggaggatcacctgaggtcagaagttcgagaccagcctggccaacatggtaaaaccctgtctctactaaaaacacaaaaattagctgggtgtggtggcatgtgcctgtaatcccagctactcgggaggctgagacaggagcattgcttgcacccaggaggcataggttgcattgagccaagattgtgccactgcactccagcctgggcaacagagcaagatgctgtcaaaaagaaagaaggaaagaaagagagagagagagaaagagagagagagagagaaagaaagaaagaaagaaagagaaagaagagaaagaaagaaagaaagaaagaaagaaagaaagaaagaaagaaagaaagaaaaagaaaagaaagaaagagggaaagaaagaaatgtaggtttatttggctcataattctgctggctggaaggatcaagactggccatgtgatgagggcctcagtatgcttcctctcatagtggacatagaagcagagcatgcaagtgtagagatcacacggtagaagaggaagcaagagagagtagggagttgccaggctctttttatataccaaccagctctcacgggaaataatagcttactcactaccccatcctgtcaaagggcattcatctattcatgagggatctgtccccatgccccaagcaccttccattaggctccacttccaacaatggggatcaaatttctacatgagatttggtgaggttcaacaaaccatattcaaactacagcatcttcccacttcttttcaggtgcttggcaagcctgagcttatcagagtgctgcaggtgcagtgacactgatctctcaaagtcctccctttccttcccatccaggacactctctggcctagtgctatgctcaactggcattttcagtgaatgaatcaatatagtaggaattacagtcttagaacttcctgattagtgagtcctttctatgattatatactacatatgacatgtgttgacatatgttgacttgttgtcttgtgatatgttcttattacttaactcttgcactgatgttctttttttcaggtgtatataatttagactgttctccttaaaggaaggggtaaaattgtatctaccatagcttgggtcctatgcataagtaaatgcttgtaaacatttaattcacaaataaatgaataagcaatattttaaggcatttggaaagaaatatttttagcctaaaaaagttattacttcataaaatgctcagtacaagctttttaaggtgagattttgttgtattcttcttatttaattccattacttgtcatggcagcaggtggctgaatggttagaatatagattttgtgctcagacatacaaaactttgtttgaattctggcagtatcgttgactagctgtgtgaccttggtgatatggtttggatgcttgtcccctccaaatctcatgttgaaacgtgattcccagtatgggggtgggcctaatgggggtgtttgggtcatgaaggcaggtccctcgtgaatagattaatgccctttggtaggtaggggtggtgggtgagttctcattctattatttcccagaagagctggttgttactaagagtctggcaggtgactggatcacaggagcagacgcctcatgaacggcttagcatcatccccttggtgatgagtgagttctcagtctggcagttcacatgtgatctgattgtttaaaagagcgtggcacctcctttcttactctcttttgccctcactgtctcttgctcctgctccctcttgctcccactgtcttgcctggtgacacactggctcccctttaccttccactgtgattgtaagcttcctgaggccctcatgagaggcagatgctggcactatgtacagcctgcagaactgtgagccaattaaacctctttccttaataaattacccagtcttggttatttctttacagcaatgcaaaaacagactaagaggccaacatggggaaatcttgtctctactaaaaatacaaaaattagctgggtgtggtggcaaatgcctgtaatcccagctactcaggaggctgaggcaggagaattgcttgaacctggggaagtggaagttgcagtaagccgtgatcgtgccgctgcactccagcctgggcgacagagtgagtgagactctctcaaaacacacacacacacagactaagatatttggataggtgatttaacacatttgggtagatttgaggctcagaaactctctgagcctcaaaatgttcctcatttgtaaaatagggctaataacagagtggttgggaggaatccatgagataatgcttgtaaagcactgagcacaaggtgaggaacacaggaaaagctcaacacatggtagctaattaacatttgcctgttctgtgctactcatcatgcttttccctggggagatggaagtggaaaaggaattcacaactccgtggagttgagagttgcctaaataaataaacatatcrtcatgtataatgtgctacaggggtgtggacgatggaaaaattaattttgcctggatagtcaggtaaggctgctgggaggcagtgatactggagttccagattgggcagaggcctcagggattggctcagagttgtcacacagcaaatgcttggggaatagatggtacgaatgactcataagctcaggggtgctgcccagctggtgtctgtgtacacatggtatcttgtgttttttgcttttctcctgcacacatttccatgtrctgacatggcttttgtgtgattccctcacagcttgtgtgtgattccctgattaaatagcttctaatattttattattataaatagactctaagtccttgagggcaagaagtgtgtctctgttcatccagacagtacctagtatgtagtaggttctcagtaatgtttgctacataaatgaatgagtgaactcctttgaccgctggccctgccataagctggctgtgggatcttgagtgagtccattaacccctctgtacctcggtgtgtctgtaaagtgggttagtataactcacaggtgagcatatttcactatgtgttgtgaggactaagtgatttgatgccctgcggctgaaggtagtaagtgcgcattaaataatggcatccttcagctctgatagctgtgctgctgcatccaggagacatgtacaggcttcatggcagagtgaatcctggagtgttctgctgcaactgctggcagaggaaaggtttcaaaactctttcttaatgctagggtgagacctgtccactgataaggagtttctatttgggatgactaaaggtgccatctggaaagtaccaggcccctgggactgctccctggtctcccacctaggtgggattcctcagtgacagcactcaggggtatcaccggctcagggaggggccggaggtgagttcccttatctcctcttgcctccttcactgtaaaactggagctaataaggtttctctcctgtcagccatccagtggagataagtcacccagaatgtgactcccacatggggctcaaaaaggtgtttctaaatataaaactctgagggaaaaaaaccctcgggatatagaaattccaggcccttggagacgcccagggtcacaggctgtgagttaaataaaaaacccaccaaactgatgaactacccatttttaaggttttggagagggaaaattaaaagactaaggagcaattgttttaaactttataccaggtgtattgatggcttctaggctggggccttccaggaagtcattcatcaatttcattgtctatttattcaccccctggactcctgttttggtgaatgttcctgagtccaagatgctaatccaataggtggccagtagtgactgaaggacatttaatccccacattttgtgctatctctgtggacctgctctggggatgttggtggactgctggcttggaaaggttctgcttcagccgtaaggagagataaagccagagaggtgggactgagcaacccgctgtttggtgaataaattgccactgaaactcgggggccattccctgaagtgaatcacatgcagccattgaagtctaagtgataaggcagccaacaatttaaaggaaaatgctccagcccaagccagggggactgtcccaaactccggatgaattccagctgccctgcagagcagggtttacaggcatggggatcactagtggcttcagagatgcccctttgccacttctccgggacttcttgactgtgtcctattcttaaaacccaggacctgcaccactcagccaggctccaccagcgtggaggccttggcaggctgaggcccaaaggctgcctttgtgggggatttaaacggccaagagagtcttgctgagccctggccccttgacgtctggagtggcaggccaagcactcagtgcagcaggaagatctgggtgccactaaggcccctaacaggtgtagtaaatatctgttaaatgaacgaatacatgttttgatgaaagaagcccacagtgcagtgtgagcccaaaggggtcttactgaaggcttcctggaggaagtggcagctaaactgagacatggaaaacacggaagagtagccaggccaagctggggtttaactgtccctaaaagaaagaaacgaccatagcaggggtttaaccagaggtggccgaaggcctttccaggtgcccatttctcccgtatagctttggagtcagacgatcctcggttggaattcccagttcagtccttacagtctgacgtcccgcacaacccgacgccggcaactgtctccaaacacccgagagccagggcgggagcatgagcgcctacggtgttccttggggtggagccctcgcagtgtccagaggatttgggggctcctgcgcccccatttctcccatttcctggactatccagggcaagcccctcacctccctgagcctcggtgtcttctgagaaaagaagtcgaccccagtgcctacctcataggattacgtgagacaaccgatgtcaagcagtgttgctttgctgcctgagaacccctgcctgtccctttctctctgatgcccttcggggcagagatccagagatcctgcctgagtcactttggcgggtttaatgcccagccgcgccaggcacacagtaggtgctcagtaagtgaaacagtgccgggaagaattcgggccggggatgtggaactgtgtgtggctctgcgggctcagaggccctccccgcgccccgccaccgtgtgcgttccggggcggggcggggcgggggcgggggcgggggcgggggcgggaccgggcgctcgggctccgcccccggtacctctgtaggcgatcctgctctcgccgtggctttcgggtgctaggagacagttgccggcgttgggttgtgcgagacgctaactgtaccctccgggtttaacgctgtgaggcagcgcgcggaggaactggggataagcgccccggagcccccaaacagagcgcggccgctgggggacagcgcgcggcgccgggtcggggcggggcggcttttctgtcggaggacgcgaaccggcacgctgcgcctttaaggagtccrgctgggctgggcgccggagctgggagcggcgcgggtaggagcccggcggcaggtcccagcccggggctagagaccgagggccggggtccgggcccggcggcgggacccaggcggttgaggctggtcaggtgagcggaggcgggcgggcgggcggtggtgcgctcctagggggatggggcgccctgatggccccgtgacctctcccccagtgtctccctgcagcggcgcatcgagtggaaagagtcggcgatctgcacttgcctttccactccgctccccgcgcgggcgctgcccccacctcccgctgcctggataggtttgagatgcccgaaacccggcgccccatttcctgggtccagccagcctcttgaagccgggggacagagtgaggacgggtcgggacctgcaccctctttctacttcgcctccccaccccctgcgcccgcagcagcccttaggcgcccctcgcagtgccgagaggattttggggtcctgcagccctgtttcccccatttcctggagaaggactgcagctcgcccacccagatagcatcttgctccgtgtcacgcgccgcctccgcgccgtccccaagatctcgctccgctactcccctcccccagcagcctttcagcttccctttccccagcctgccccggctcccgtgcccttgcgccccttccgtgtcgaaacacttgaatcaggatgctgtccagccaggtacccgccggcaacttgcggtcccccgcctacagcgacacaggtttcacggctgccttagaaatgcggattgtgtaacgccggctgcagggcagtgcacgtgcagggtttgcgcccctgagcccacagcgaggccaggtgacagagtgaggcatgggggagtgggggaagaggaggatgccagagggtctagatactgtgcatgcagagaatatgtattttgagccctttgtatgccccaggagctgggtggttaggaagaggaaataaagtgggggtcttactccagctgggacctggaggccctcatttatctcgccgcccccctccccgctgctcccgcctgctcagaaatccctagtggctccacctggctaagagtttaaagtagtttataatgaataatagctgacatagaataagcaaatcttgtgtgccaggccctgtcctaagccccttaaaagaattacctgccatactttccccaacagccccttgaggtaggtaccaccgctgtgcccattcctgagagcaggaatatgaggcttccagaggtggtaccttcccaagacacgaagtgagtctggcctcagaaccacccccttcccccaaccgcccccccaacccgacctcgaaccactagactttttacccaatttcaacaaattcttatcaagaacattgttataatataggaaattagaaataacagaaattaatcacctgtgtttctagcactaatttgtttttctcagaccagcaagggcctctcagcttctggtaatagtacccactttaaagggtagtggcaatatttagataaaataatgcacagggcccagcatgttttaagcactcagaaagcagcagctgttattatgaagagtggtagttgaccactaccttgaattactggaaaaaaataattaataaatggctcacactgactctacagaaattaaccattttgtgtgctcagaaaggcctatgagactttctctattttcatctttttattatttttattattttgccttttcgacacattctgtggctttcgtcaactccaaattatccattgtctttgtagttagagacagaagtgcccttctggtttttttagcttttaaaatgtgtgacctttgattctgtgagcatctgcaaacctagagtaaaagatgggaatgcagtttgtgcaactgggaagtaattctgaaacttgatatgagaaaaaaattgtccttagaggtgatcctggtttgcagtatgcgttgggtgaggtctatcctgggggcgagaagttagactcaaagattatctttgggtttggagggaagaaaggcaagcatgaatgttttgtctcggtgtggtgggctcacacctcaaagtggccagcactttgagaggccaaggcaagaggatcacctgaacccaggagttcaagactagcctgggcaacatggtgaaaccccatctctaccaaaaaaaaaaaaaaattagctgggagtggtgttgcgtacctgtagtcccggctacttgggaggctggggtgggaggattgcttgagcctgggaggtcaaggctgcagtgagctgagattgctccactgcactccagcctaggtgaaaaagtaagacccagtctcaaaaaataaaataaataaataaagaatgagtgtttatcctagtaggctagctaagattggaaatcagcttcactatgtcatattctttaaaaaaawttttttttttagagatgaagtctcactgtgtttcctactcaggctgacctggaactcttgggctcaagtgattctcccacctcagcctcccaagtagctagaactacaggtgtgcaccaccacacctggcatgctatgtcatactttttatgaaactcctggttattttggtgattagatcaattattaccgtgatgagtgttcaaaagaaaagaggcaagacatccccatcaaagctaaatatttggaagatgccaggaagctagttctgcaagttgaaaaaaaattctttaaaaatttctcctatttgagtcttaaaaaaattttttttttaagggacagggtctcactctgttacccatgctggagtgcagtggagcaatcttagctcactgtaactttgaactcctgggctcaagcaatcctgctacctcagcctcctaagtaactggggctacaggtgtgcaccaccaaacctgggtaattttttttttttttttttttgagacagagtcttgctctgtcgcccaggctggagtgcagtagcgcgatctcggctcaccgcaacctccgcctcccgggttcaagcaattctcctgcctcagcctccagagtagctgggattacaggcatgcacaagcacgcctggctaattttgtatttttagtagagacggggtttctccatgttggtcaggctggtctcgaactcccgacctcaggtgatcygcccgcctctacctcccaaagtgctgggattgcagatgtgagccacygcgcccggccaaacctggataattttgaaattttgttgttgttgttggttgtcacaacttgtaggtaacatcaagtgggtagaggccagggatgctgctaaacgtcctacgatgcacaggacggtgccacaacaaagaattatatggcctccagtgtcacttgtgccacagttgagaaactgaaactggatatgattttcacaacattaaagtcctttctgaccttgcatgtagttgcctcttccaagaagatcaaagtattctcctaaaccggaccctcagaaaccctctggatcctatttgacgcttcccaatcctagaggccacttggggtgttgctgcctgtggctggatgggtttggggtctgtcatgagcttctgtgcggctctctggtgctgtaccaaggaaactgctgattcaggggagcaggacagcactcaggaggtgtgggcagaggttcttacactgctgcaggttgggatcctcttctttttaagtaatatattaacagcagcctttgctcttaggcatttttccagaagctgtggctgtttggctgttggcattgggtgtttgccttgtgatatacccagaaaaggattcatacgttacatatgatgaagtctggggatgggactggattctgagagtataaagatggcaatgcagacsctgcccagagactactcaggcatctcaataggcctgagcagtggccatgcagggtggtggaggtatggcagggctgcctaactctgcctgtgaagtcaggcaagatcccagcagtgcagagtgaatgcttagtatctgcctgtcactgctttgaacagtttccttgcatcatcccatttcatccccacactgaggtagaattctaagaggttaggtcacttgctacagtcacatggcaagcatgtgaccagagcagagtcacagtggtcaatggcagagcagagatttgaacccaggttgttgagctgcaaaactgaactgtcaggagcatttacagagagcggcagtgctttaatagctaagacttttaggatgggctggagctcgccaggcgagagggagaataggcgtgccggggagagaggagcaggtgtgtcaaagtcccggaggtgtgggagagcacggcatgtctgggggttgcagatcattattggaagggatggagggcaggcaataggcaggtgatagragaagatgacccttgagagatgggcagcaccaaatcctaagtggccttcaacatcatgctgagagccactgccaaccaccagtgaattagcagagaggaagagaaagctgtgtgacattgagcagcttgcttamtttctctaggacccagctgcccatccaamcwaaaayctctaaaactatactgctctgacgaatgtttctttcatttgtggccatatgakcagagtgaaggaatgcctgcattgacactggtggggcagccctgttgattcatgacttctccccctaaggctgtgtgatgggtgcagggagtggtttcttctcagtcagcagttggttttgtttcagctttccagcttatcatttggcattgaccaagtgtctgccaagggcaaggcacagtgtatgctaagtactgtgacagaggcaaagatgtggtcagacttgtttttgaggagcttgcagcctagtggagggtccagccagtgatctttttattgttattattattattatactttaagttctagggtacatgtgcacaacgtgcaggtttgttacatatgtatacatgtgccatgttggtttgctgcacccgttaactcgtcatttacgttaggtatttctcctaatgctatccctcccccatccccctgccccacgacaggccccggtgtktaatgttccccaccctgtgtccaagtgttttcattgttcaattcccacctatgagtgagactgtgcsgtgtttggttttctgtccttggaatagtttgctcagaatgatggtttccagcttcatccatgtccctacaaaggacatgaactcatccttttttatggctgcatagtattccatggtgtatatgtgccacattttcttaatccagtctatcattgatggacatttgggttggttccaagtctttgctattgtgaatagtgctgcaataaacatatgtgttcatgtgtctttatagtagcattatttataatcctttgggtgtatgcccagtaatgagattgctgggtcaaatagtatttctagttctcaatccttgaggaatcactgcactgtcttccacaatggttgaactagtttacagtcccgcccagccagtgttcttatcacgagatacaaatctcaagtgtcttgagagagaagtgttcataccaaatactgtggggcatggaggatgaaatagagattactgggggattgaggaaagtctaagtgaaggagataacttctagctccaccagaaagattttttaaaggagaactgggggtagacagaggacgtcttataggtagagagtggagaaaatagagaaaaaaacagaaagccagtgcaggtatagtcatgagaaagtcagattattaagtgtatctagtatctgattctccgcagtttccagattgtggatgggaagcagaagttttcttttttttttgagacagagtctcactctgttgcccaggctggagcgcagtggcacgaacttggctcactgcagcctctgcctcctgagttcaaggcattcttgtgcctcagcctcctttgtagctgggacgacaggtgtgtgccaccacgcctggctaatttttttgtgtttttagttagagacagggtttcaccatgttgtccaggctggtctcaaacctcaagtgatccacctgccttggcctcccaaagtgctgggattacaggtgtgagccactgtgcctggctgggaagcagaagttttcataacaggaaaatattcattaatggacttgccatgtgcaaagttaagtcctacttcatcatctatccctctgttttcaaccctggtggtcagccaggctccaggagcatccatattttggctctgcgtctctgcctggtcgtcagatgttttgcaaatatgacataaacaatggaaagtaaaattgcaactcttaagagaggcaatatctcttgaaatcaaagccagtgatgttaaggaactgcttggatgatgtgtcaaagcaataataggatctggcaatgtgagatctgccaacaattgataaagagaagggatgaacactcctttaggggagagacttgaaaatcaaacaattgagaggcccttgagaaatcagtgaggccataagatatttttgcaaaaatggcttctttatgatagcacagtgatgaccaaatgttaattggaaggacttatcataccgtaaaagagtctacacaaaatgaagtctttgttctaagaattcgcacagggctgagcatggtggctcgtgcctgcccaccactttgggagggcaaagcaggaggattgcttgaggccaggggttcgagaacagcctgggtaacatagagagaccccatctctgcaaaaaatgaaaaattagctgggcrtggtggtgcatgcctgtggtcccagctgctcaggaggctgaggtggaaggatcacttgggcccaggaggtcgaggctgcagtgygccactacagtctagcctgggcaacagagcaagaccctgtctcaaattaaaaaaaaaagcaaaaaaaagcacagaaatgtaattgtaacctaaattttgcttggtatttactattgcttttaaaatagatagattcgatttttgttttatttagataaagtactaaacaaaactgtattttacttttaactatgaaattctgagtgtggctttaccatatatccttttttctggtgtttatcttcctgggctactgaggtctctgggaaggagattctggctagaaagaagatgtggatcagtgcacaaggaccctgaatgctagactttgtgctgggagtgagaagtcttgtcctgccaaagcctgccagtgtttattaacagggctcatttttttgtttaacatcaactttgttcctgcagttggaaagtactgtagaccaacttcacctcctttttttttgttttgttttgagacggagtctcgctctgtcacccaggctggagtgcaatggctcgatctcagctcattgcaaactctgcctcccaggttcaagcgattctcctgcctcagcctcctgagtagctgagattactgagatgcctgccaccatacctggctaattttgtatttttagtagagacaggatttcaccatgttggccaggctggtcttgaactcctgacctcaggtaatccgcccacctgggcctcccaaagtgctgggattacagccctgagccactgcatctggccacttcacctcatttagaaaggcaaaaccccaggctgagcacagtggctcatgcctgtaatcccagcactttggaaggccgaggcaggcagatcatttgaggccaggagttcaagtccagcctggccaacatggcaaaaccctgtctctactaaaaatacaaaaattagccgggtatgatggtgcacacctgtagtcccagctacttggggagactgaggcacaagaattgcttcaaccccagaggcagaggttgcagtgaactgagatcgtgccactgcactctagcctgggcaacagagggagaccctgtctcaaaaaaaagaaagaaagaaggaaggagagagaagaaagaaagaaagaaaaagaaagaaagaaagaacaaaaaaagaaaggcaaaactgtctttgatctccctgcttttcctcttatttaaaagtgcaagtttggccaacaggagaatgttttgggtgctgaggttctattttttccatctgctatatagcacaccaatagagggctattttaattcctttcagccatgtggcaaatagtcacttacatgatgctctttctagcacttcacctttgaggggtgacctggctgatgacagttacatgtactcatgctaattcagtgagaaacgttcaaatcaaagcctgttgtgggctccactagagcctgaagactttgggctccttaaacgtaaagggtcaagtggcttttggctcctgttttatccagcaggagactggcttgtatttctgtagggctgtcttgttttaaacatgatttcaagcaggcggttattccagactatcaccacagcccccatcctgacaaaagaggctgatgttgccaggtcagtgtatgtgtgacatgtttcatcaccttgcttcttggccagcatgatttgttaaaagctgtaccacaggatacacaacccccctgccttccaactgagcctcggactgatctgcctgcctgtccctcctctgcctgtcacttctctagagaatcaggtagcacggctttctggttctctctgatcctccacccacaggaccagcctggctgggctgaattctctttcccacagtgctgcccaggtggccaaagcagggaggggactgtgggctgggctggttctttaatgagaacccccatgaggaaccagttgtcagagttttggtgcaaagcaggagagagtgaaccatctaatcagtacctctcccagaatcacgaaggagataagaatttgtggtttatggatggtcatgtgtttccaggatagaacrataagaacgtttatcatttgaaaaatttaaattcctatcttctaycttagagtactggactttgagtcttaaggactaaagttcctgccatgcaggcataacctttggacagtcatgtgggcagtagtccgccagtcattgaatgttaatagagtgggctgctaggctgcatagtgtggagatggagggagtttcatcctccatccttccagcattcacatttgtatttctttcctcataatgaaaaacagttaatatttggttgccgtctctaatgggcctttttttttttttttgagacagagccttactctgtcacccaggctgcagtgcagtgcactgcaacctccgcctcctgggttaaagggattctagctaggactacaggcatgcaccaccacgcctggctaatttttgtatttttagtagaggtggggtcttgctatgttgcccaggcttgtctctaactcctgggctcaaagtgatcctcctgcttcagcctcccaaggtgctgggattacaggtgtgagccacggtgcctggcctcttgaactagtgtagagtccgggactggccagtagaacttttgtgataagggaaatgttctatatttctgctgtccaatatgataaccacaaactagtggctgttgagcatttgacttgtggctagtgcagctgaagattcgaattttaaattttatttaatttcaatttaattttaagcagccacatgtgactagtggctaccatattggacaatacagatggactactttatttgaggagtttgtattgtagttattttttgtttttttgttttttgtttgtttgtttttgagagagtctcgctctgtcacccaggctggagtacaatggcacagtctcggctcattgcaacctccacctcgcggtcaagcaatccttgtgcctcagcctcctgagttgcagggactacaggcgcacaccaccacgcctggctaatttttgtatttttagtggagtcagggtttcaccgtgttggccaggctggtctcgaactactggcctcaagtggtctgcccgcctcggcttcccaaatcctgggattacaggcgtgagccacagtgcccagcctatattgtaatttttcgttaaatatgcacatagtagcacttcaaaagggacaaaaggtatcagtgaaaagtctccctctcatctctgtccccagccctgcagtttcccttcccagtgctaaccataatcatggccaatttcttttgtgtccattcagaaggatttcccacgtacataagcataacaaatatattttctctctcactctctgtttttcagtgttagggtattactcttatccactgtcttctgttccatgcttttttgagttaatgtaccttggaggtcattacccatagggacaaataggactgtctcattatttaaatggtttatatttaatttctatttgtatttagtggctatatatgtttctttgcaaagctgtatcatcatttacttaactataagttcactatatgtaagcgtgtaaattatttccaatcttttgccattatgaatactattgtaatactcttacgcaaacgttttcacacataatcaggcataaacatagataaattcctagaagaaaagatcatagccaggcatggtggctcacgcctgtaatcccagcactttggaaggccgaggcaggctgatcacctgaggttgggagttcgaagaccagcctgaccaacatggagaaaccccgtctctactaaaaatacaaaattagccgggcatggtggcacatgcctgtaatcctagctactcgggaggctgaggcaggagaatcgcttgaacccgggaggcggaggttgcggtgagctgagatcgcggcattgcactccagcctgggcaacaagagcgaaactctatctcaaagaaaaaaaaagagagagatgatcattaggtcaaggatatgtgcattttacrtagccacagattttgccaaattgcaatctgtagagtttgctgatgagaatgcaaattggtacattatatgagagcatctatttttccatagcctcagcagcacagtctgtattaaacttcttgttctttgccagtacaataaaggaagatcaccatcaccctgtagatttaatttgcatatctcttattataaatgagattgagcatctttttatatgtttaagagtcatttgtatttccctcctggtaaattatctgttcagatcatttgctcatttttctattaggttttgttgttattggtcttgatttgtaggaaccctttatacattaaggaaattactatgttgtctctattatgtatttacaaattttaatcttatttatggtatctctttycatgtggagatttaaaaacttttttatgcaactaatactctttgttatggcctctggatgttagacattacttagaaagccctttcctatggagatacttttaaaatagaattctcatgtttcctcctagaacttagatggttttattttttatatttaattctttgattcatctgaaacaattcaggggtttttctggtttcatttcctttgctcatctcattctcttgctgctgagcagtttgtagcgcctccctgcttctgcccaacccagttttggagcggtgcagcccccctgacagtaccagtgccatcactctggtaacaatattatcctcacttgcccattggttgctgccttgcttccattcctttctgaacacactgtttaggtaagccctaaccccgatggaggagagctttaactatcgttccatgcttgactactcaccagatttcttctttgacctctgtcaattcttcctagtcctggctcattatctgagacgccctgccctttgtgcacgtttgccttattgcctcactgggggaggtgacctgaacaagaggcatagtataaagccacaagctgtttgtactttgcctgtgctgaggaaaagagtgctccaccttcactgaagccagcaatttggccggctgttagcacttcattcatattccctagtatgagttaattctttgtcattttatttcttgtgattccagaatctcattttcagcttctgccagagccagtagcagttgggaaagaaggctgtgctctttgaagagtgagtatggattttaaccaccatagatttcccccaaaaggcagcctttaattaaacygggactgctgttgtaagccctgcttccaagccctctgcaggccaaagtgtgctgcatgatttttctgatcagtaggtctagtgggaagggatttggcacctgaaggttttcaaagctctgacgcacaccctaaaagccccctgcaaatagttctgaaagactatgtgggggaacctggctctgaatttgaagggagtctgkaaggcatgggttcatgggccccagtgctttcctgaaaaggggacacttgaacaggctctgaaggcagggaagagttcatcaggcagccagacgtgggagtgctctacaccaaggggtcagcaggaaggaagacagaatgaagctgtatggggctcgcgagctggttatttggagtgcaggcaaagacgtgggagtcaggactgggaagttgagctgggactacatggggcggtcagagttcacattttatttggtggacatgagaccagcacagcctgatccctggtgtgaattgagaagatttctctggcagctggggtggtgggactatggggtgtgaaagaatagcctttacagaaacaggagggagaggaagggaggacctggacccagtgtggtggctgaggggagctgcggtccgaatcatacaaagtcctacacctggtgaaaatttttctttttaccttacattcctagtaaatgttgaacccaactgggattgggtttttaggtattagtttttaggggtgtaagtcccctaaggctgtgctgtctaatatggtagttcttatccacatgtagctgttgagcacttgaagtgtggctggtgtggctgaagaactgaagtttgaattttctttggctttaatcaatttaagtttaaattgccatatatcaggcagtgtagtttgtttagacttggacaagttgactccagtgctggtgcctcttcacctttgcctaacaggagtggtgagcaagtaggagaatgaaagatgcattggcatctaggaggttagactgatgcaattactgtcagcagaaatcagtaagtcggctaggtgcagaagcttgcgcctgtaatcccagcactttgggaggccgaggcgggggggatcacctgaggtcaggagttcgagaccagcccagcatggtgaaaccctgtctctactaaaaagacaaaaattagctaggcatggtggcagatgcctgtaatcccagctactcaggaggctgagacaggagaagcacttgaacccaggaggcggaggttgcagtgagccaagattgtacmactacactccagcctggctgacagagcgagactccatctaaaaaaaaaaaaagaaagaaaaaaagacagaaatcagtaagtcaggcgaagcgaggagagatgtgtctatgagattctatgaaagtgttttacgttgtttattcttggattttactttataccctgaagactaagatattggaactcaagatcccagttttcaaaatcagtgacaacattaaagaaaattgtgagatgtgccttactcctaaccccagattaaacttcatttccctgatgtaatgttyatctggatccactgacatgtcccctatccaattaatctttgccactgtattcagacataagggcccccaaatgcacagcttgggtgttgagcagtggcagaggatcctgagcctgggatgtgagagtatgttttccctggtgccagcatggccagctctccttcctggcattgcctgcttcacactgtgccgcagtgtctttaaccctgggrtgcctcactttacacgataaatagataaaatgaagtgtttttctttttcagtgtattcagtcaggcgataaacatgatcaagcaccaagtctttgccaggtgatgttttaggttctgggaactctattaggaaagaagattcttgtgggagcaagccaaatcctactctttaattgcctggcataattccagaaatgtttaagtcaccaaagtaagaaagaacagacatgactatttgaatgttctcattaaatagatgaagaagccaaggtctcccagctgatgtgtggaagagccacgatggagagggccagctgccacactggtgcccccagcctggtgccatccattgcacgagtttgtccctcagtggcagccattcatggatgaccatcacgatttttgctatattcatgtgtcacctactaagcatttttctttaaattgactgcttgttttttttttttttttttttttttggaacagtctccctctgtcgcctaggctgtcggctcactgaaacctcagcctccaggctcaagtaatcctcccacctgagtctcctgagtagctgagactacaggcgcatgccaccatgcccggctaatttttgtattttttgtaaagatggggcctctccatgttgcccaggccggtctcaaactcctctactcaagcaatctgcccgtctcggcctcccaaagtgctgggattacaggcatgagccaccacgcccagctgtggtttaacaccaccacactgagagtttctctttgacccaagcaggactgaaaagaactgaaaagagatgactttcctagtatatatgttgttatctaatgctgtgtacccctgaaacattctttagtactctcctgctcactaaagtcatcttgcaaactctcagttgtatgggtgccatgctttgggaaactcaagttacacttcttggttgatctctgatttttggccattggcagttcctggttcataatgcttcagtttgttctgcctccagcctctccctggggtacatagagtactctagaaataaacaccagcatggcaggggagctgtctttttaaaggaaagctgaagcaagacctttgtaaaatgaaggatgttgtagagataggaataaattgcctaccctttatctgtacagaaaactcagaattgtggtttcttcaactaaggtctggatttatttgaccttgtcagggagagtgtgcagggttttctgtaataagtgcaaaccttactaaattgatcatgttctacaaaagctgcttatggaagactttattctgctgttaaatagaagatggaggcagatgcgaccttcgctgaaactgactggcattgtggcaggcacygacagagcacagaggggtttttttttttgatgatcatgccttcatttcggggctatcatctccagtgtcagagtctatgatatatatggctttgggcataaactgttctaattcctagtccaaaggactccctgctgctcagtaatctgaatttacagtggcccccagcagtttttaaggactttgtatgatgtggaaaagtcttctcaaagctgacagttccyatctgtgtcaactcattcacagcccatgatgttcaaacagatctgtacagattcccttcagtctgtgattaacttgcttactccttgaagktgatgccttttagcagggtaaattgtagccagtgttaaataggtgactccttcagggatttttgtaattaccgaaagaggaaagatgtcaggtctcttacagagtcattgggaatggttgttcctaaaagaaatgaaacagatggaacccattttgtaaatttgcttttcattgattcatttgtacyttatttgtgtcctgtgccatacttgacactgaggaagaacatacatgattgtccctaccctcaaggagctctggttccagaaggagaagcaggccaatgatttcagtgtgctgggaaaattgtttacagtgactgagaaactgagagggcaattgcatcagagacaaagacagtgcttatgccctgggaaggtggcagctttcatcactgtagactcaggactgtacttaggtagagtatgggtatgtaatgaaaagaaccatctaacccacctatgggtgcatctgtctccttctccaggctgtgaggtgcttgctaggcaaaacctcttgaagatggagagctcatatcttcattgagaaattagggatgttgaatgtagatacctaacagcaaagaggttacagagactaaggacaggccatttgaaaaaaataaaaaatagacaaagtggagcttggtgcaaaggtagtagattggagttagaaatctgttttgtaatcatgactaccagctgggtgaccttgggcaagttacttagcctctcagagcctcaatttcctcagcctataaaacaggatgaaacacttgcctttcctatgtgacagggttgatgtgctatatcaagggttggcaaattacagcctacaggtcaaatttggcctacagcctatttctgtgaagttttattggaacacagtcatactcattcgttacatgtcttcaatggctgctttctcatccagtggcagactgagtagctgtaatagagactctgtgtcccacagtgytaaaatcgtcaccgtctggcactttacagaaaaagtgtgctgacccttgtgcttagtggtcgagaggttatactgtgctgcattgaacttattatcaaattgaattaagtatcagtcgatagaggcatatgggagagatcactccatttcccaggaaatgtaaggaaggccatgatttgctagatgttaatgctttttcttgaagaaatctgtattatgtttggtgagtcctgcacacttagcacagatggcagggaatcaaggcagagggccacgcctggcttacaggtccttccaggggttttctgtgttggggagaatgactggacttgaaatatatatttattatatatttatatttatatactttatgatatatatgtgtgtatatacatatatatgtgtatacacacacacacacacacacacacacacacatatatatatataaaatagagatgaggtcttgccatgttgcctaggctggtcttcaatgcctggcctcaagtgatccttccacctctgcctcccaaagtgttgagattacaggcatgggccacggaacccagcctgaagtatttttcattctatgctagaatgaactgtattataagctcataagacaggacagggcagggcctctgatacagctggaattctagtgccccaatggtgtgtcaggtcttagtgttggtgctggggacacccagtccttactctcatgcatcccacattctagccttcagatgtgtaagtctttaggaagacatcagaaagtacactgaaaactacctttttggcttattctcccttaactttgtattatgtatttattttttgaattggttacatatttacataacaacttaaaagttttaaaaagtgmaaaaccaagtttcctgtctattcctgacacttagctatctacttccccaccttagatcaatcactgttactggtttcttgtatccatgtgtacatgtatatttgttcattgatttctttaaaagtctgtcttttttttttttttttttaaaggttctcactccgttgcctargctagagtgcagtggtgcaatcatagcttactacagcttcaaactcctgggctcaagtgatcctcccaccttggyctcccaaagtgctggatcacaggcatgagctaccatgcccaacctgtcctccttttttatttttatttattttttatttttattttttgagatagagtcttgttgcccaggctagagtgcaatggcacaatcytggctcactgcaacctctgcctcctgggttcaagcgattctcctgcctcagcctcccgagtagctggaattacagtcacctgccaccacgcttggctaacttttgtgtttttagtagagatggggtttcatcatgttggctaggctagtctcgaactcctgaccttaagtgatccgcccacctcagcctcccaaagtgctgggattacaggtgtgagccactgcacctgtctccttttttatttttaaatactgcaagcctacagaaagattgaaaggataatatcatgtaaccttcacctggattccccagtggttagcattttaccatatttgctttatttctctctcttttcctcccaccaacacmcacacacacacacacacacrcacacacacacatmcacacactactttttctctcctgaacctttaaaagtgagtagcagataccattatacttcaccccttacaacttcagcaaacatctcctaaaagggaagatattctcctacatacatacataatcacaatttcatcatcatactcaagaattgtgtcactgatacattgacgttgtctaatacccagcccttactcagattttcacatttgtcccaactatgtcctttataatgttttttttttacaaatccaggctcctctgaaaagttcctcattacttttagttgtcatgtctatttggttttttgtaaagcacttgcctgctttggtttcctcctgttctttaccctcactctgggaacttcacttttcttgtcccctttacttcttcgccttttttcctttratacagagttttaatatcgtcattctctttggcccctgcaggagtcagccagcctgaaagagcaggatggatcttgatgtggttaacatgtttgtgattgcgggcggcacgctggccatcccaatcctggcatttgtggcttcatttcttctgtggccttcagcactgataagaatctattattggtaagccagttttatcattgatgttttcaagagtatcataatattgacatcttctctgcttgtcctttttgtggttattgtccaacattttatcaggaagtatttcagacagagagaaaagttgaaaggtactcatcctgtttggaattttgggaatgctcttgaagaatattaccagatcagttctttcaggtttgtttgtttgtttgttttttggagacagagttgtgctctgttgcccaggctggagtgcagtgggatgatctcagctcactgcaacctccacctcctggcttcaatcaattttcctgcttcagcctccaagtagctgagattttacaggtgtatgccaccacgcccggctaattttttttgtatttttagtacagatggggtttcaccatgttggccaggctggtctccaactcctggcctcaagtgatcttcccatcttgcctctctaagtgctgggattacaggcatgagccatcatacccggcccttttaggtttctgatagcatctttctccacccacattsccaaagtcagtgattctgtcttcaagcaagaattgtacatttttatgggaactcctttggtatcttcttgatcattggttgtttttgtttgtttgttggttggttggttttttgggtttttgtttggttttttttttgagacagagtctccctctgtcacctaggctggagtgcagtggtgtcatctcrgctcactgcaacctctgcctcccaggctcaagcgattctcttgcctcagcctcccaagtagctaggactacaggcacgtgccaccatgcctagctaatttttatatttttagtagagacaggcttttgcygtattggccaagctggtctcaaactcctgacctcaagtgatcctcccacctcagcctcccaaagtgctgggattacaggtgtgagccactgcgcctggccttcatcattggattctgaccctgtgatgtcctgacaggtgcagcgatgtcactgaaaaatgaacaagaaagaccagaaccattgagatggcatgtttaggacagaatgcttttagagttgttctagaagtgttcattagtaaagaagtgacagaaagaaaaagaagtttccaaaatatgtcattcttgtaccactgttattattmttgtcctatctggataccacctgtccttttattttgtatttcctttagagtgagccatctttttaaaaaaatccttaaatcaagtatttaaaaagtgatatgaatatcactcccttaagtgaaaagcttgccataaatagtaaattaatatcaaaaagtgcctggcgcagtggctcattcctgtaatcccagcattttgggaggccgaggcaggcagatcacctgagatcgggagttcgagaccagcccgaccaacatggagaaacccaatctctactaaaaatacaaaattagctaggcgtggtggtgcatgcctgtaatcccagctactcgggaggctgaggcaggagaatcgcctgatcctgggaggtggaggttgcggtgagctgagatcgcgccattgcactccagcctgggcaacaagagcagaactgcatctcaaaaaaaaatatgtatatatatcaaaaagtaaaaataaacacagtgacattaaacagtcttattaaattgtatctccttttactttgttacaaagcatgagcagcgtgaaagatgtagcagccctgagctgagcctttctccttgttggaatcagaaggttaacagtcaaaaagaaagtgactttctcatgatgtgcttcattgccttttcatgccactgtccaattatcaaatgaaattgcccttcccacccccatggtgtacatcccctgatgaagggagcatcgaaatagacctggttcctctctgtgctataggtaagcccattgagatctaactgggacttcaggaagtcggaactcacttctgtacgtagaagagtccagagagggtgttatgccctttatctgccctcctttctggctcctttttgcttcacttgagtgtggaattttccgcctgccagccaagctctaatccttgaaactaattgaatggaagggagcttttcatcttttgctcttgctctctgggggcgggagtggggagttgtgaccccctcccaagtcacccgggacccaccttctgcactgagaaagcgagactcactctgaagctgaaatgctgttgcccttgcagtgctggtagcaggagttctgtgctttgtgggctaaggctcctggatgacccctgacatggagaaggcagagttgygtgccccttctcatggcctcgtcaaggcatcatggactgccacacacaaaaygccgtttttattaacgacatgaaattgaaggagagaacacaattcactgatgtggctcgtaaccatggatatggtcacatacagaggtgtgattatgtaaaggttaattccacccacctcatgtggaaactagcctcaatgctgcatagtcccccaacagttccctgggctgtcgaggagaaggctttcagagtaagggtgttagggtaattttgatgtttcatttgtaatgagaaaaataagttgatagcaaataatttgctttttaaattaagttaaaattcacataacataaaagtcaccattttaaagtgtacaattcaaggctgggcacgatggctcacacctgtaatcycagcactttgggaggctaaggcaggaggatcacttgaggccaggagttcgagaccagcctggccaacatggcgaaaccccgtctctactaaaaatacaaaaaattagccaggcatggtggtacgtgcctgtaattccagctacctgggaggctgaggcagaagaatcgcttgaacccaggaagcggaggttgcagtgagccgagatcgtgccactacacttcagcctgggtgacagagatgagactctgtctaaataaataaataaatgaaacataaatataaatgtaaataaataaaatgtacaattcagtggttttaatatattcagagtgttgtacaaccattaccactatctaatttcaaatatttccacctccccaaaggagtccccatacctagtagccatcaatcccagtttctccctcacttcatcttctggcaaccactcatctacttcctgtcttttyagatgtgcccattacggacatttcacgtaaatggggttatacatgtgtgacctttgtgtctggtttctctcacttagcataatgttttcaaggttcgtccatgttgtagcatgcatcactccttcactttctgttgtggttaaataatattccattgtgtatatatacagtttgttcatccattcatctgttgatggacacttgggttgtttccaccttttggctattatgaataatgctgcatagcaaataattcacttttattaacaaataataccacaaaaaaaccagagaagccccacagtgcagagcattcagagcctctttaattggcagtatggatgcatggggtcttaaagcctgcccatgcctgtcacccagctcagtgccgtggctgaaagacaaacacaatgctctttattttgtgaactcaggcacacaggccaagaagaaaacccagctggtttgggaagatgaaaatcctagaaaacctttcagatcatgccaggtggcattgtgacacgggggattatgattttagtaataaaacccatgatgccattgcagagagctgtcagcaatcctgtgaggcacttcctccgcatcactgaaatgcacagactgcttcctccaaatagcctcaccacaagtgacatttacacagtggttgtcatagaatgagcagcatcaccatgagtcacttatatcccttaaccacagcgactcctccaaaggccttcatttgctcggctgccagtgatgaccaccagtgggttcacctcgcagacctaggtgggtcaggttaattttcaggattgctacacaaacaggatcagcaggcagtagaggtagcttggcacccagtccccgttycccgctgccctgccatatgagcataagggtttggtgaagtcatcacatcgtgcaagctcctggagttccctctgggattgtctcagctcctcagggaacaagaacaggtgtccccagtaggccacagcaagtcttcagagcagctctctctgggtctaagtgtccctggagcatggccagcacacttccacaacaccgtggactatggctgctcctgcaggaggtaccaaatgcttcaacatgagtcaacagagagccacaccggggatgctgtggccactgcggatgacatcaggtctgattttcattgtgtaatgaaaatatcaggactgttcacaagatgagaaagactgagattttctaagatttttgttttcccaaagaaactcagttgtgaaatcaaggtaagaaataatagtgaacagttcacttatataaatataagaaagaaaaggggataagaattggaaaagaagaaataataataatctgacattgtttgcagatgacacaattgtgtacatagaaagtccaaaaaaaatctataaataatttgttggaattaataagtgaatttggagctgggtgctgcagctcatgcttgtaatttcagcactttgggaggcagaggtgggcgattgcttgagcccaggagtttaagaccagcctaggctgctcactgcaacctctacctcccaggctcaagtgatcctcccacctcagcttctagagtaactggggctacaggtgtgtgccaccttgccacctaatttttgcggtttttgtagagacaggctcaaactcctgggctcaagcgatccacccaccttgccctcccaaagctctgggattacagttgtgagccaccatgcccrgcctggttctttctttttattgtggtaaaatatacataactttaaaaaatggaaaataagtgttggtgaggatgtggagagattggaaccccctatgcactgctgttgggaatgtaaaatagtatagttgctatgcacaaatttgtcggctccccagaaagttatacatttaacgtaacatccagcaattctacttatgagtgtaaatcccaaagaattgcaagcagggtctcaatgtgtgcaccaatgtccatagcagcattctttgcaatagcgaaaagatagaaataacctaaatgtccaacagacaaatggataaacaaaatgtggtatatacacaatagaatattattcagccttaaaaaggaatgacactctgattcatgctattaacacaacatggatgaaccttgagaacaactgtgctaagtgaaactaaccagacacaaaaggacaaattttgtatgattccacttttacccagaatagacaaactcatagagaaagtagaatagaggttgctaggggactgggggaaatgaggagttaatgtttaatgggtacagagtttctatttaggatgacaaaaagttctagaaatggatagtggtggtagttttacaatgttgtgtaatgtcattgatcgtacacttgttaaaatggtaaatgtttatgttatgtctgttttaccacagtataaaaaaatctgtaagtacttttcttcagaagttcccgttaactagacagagacataggatgaggactctgggctccaggagactttattaaagaggaaccccgaggaggtcctctttggggcttttctatttaggtcaatagagccttcaatgacttctgtccctgaaacaggagcagtttggctcttgtactgagattgtaaaagatcttgctcctgagacattcattcatcccaccttaattcttctctttgtttctgttctgtaaggttctgcttttgtgaattagaggtaatctattctctattatctattatcattaaaccaaagaagattttttccatctgggccatgggtctttcagaatttttcagctggcctggtatcttagagtcatcttcctactctttcgttgaggggatcatttgaaaatattagttctctgggctgggcatggtggctcaygcctgtaatcccaacactttgggaggctgagggaggcagatcatctgaggtcaggagttcaagaccagcctagccaacatggtgaaaccctgtctctactaaaaaaatacaaaaattagaggctaggcgttgtggcccacgcctgtaatcccagcactttggaaggccgaggtgggtagatcacgaggtcaggagtttgagaccagcctggccaacatggtgaaaccccatctctactacaaatacgaaaattagccaggcgtggtggcacgcgcctgtagtcccagctacttgggaggctgaagtgggagaatcgtttgaaagcagaaggtggaggttgcagtgagccgagatcatgccactgcattccagcctgggcaacaragcaagactccatctaaaaaataaaaataaaaataaacaaaaacaaaaattagccgagcgtggtggcacacacctgtaatcccagctactcaggaggctgaggcgggagaatcacttgaacccgggaggtggaggttgcagtgaactgagattgcgccactgcactccagcctaggcaacgagagtgaaactccatctcaaaaaaaaaaaaaaagaaaaaatattagttttccagtttcttgtttctggagcctaggtaaacttgtccagtggatgtaccaattaaatgaaaaatatcgagtagtaccaaagagctctgtctgataatgaagaagcccttaattcctgaatccggcagtctggccgccttccaaccctgtgtctcttcattctggttcaagtcatacttggctctccccgaggcccttgcctctgctgtctctacctcctggcacaccttctccagcttccagctgatgtatgttgagtatccagtagtctgctgaagtttcaccttttccaccaggtccttccagctcttccatgatctcacactgtactttgtatgagagttatagagaatttgatgattataaaaacgtaacccattcgagccccactcccagtaccaaaaataaaaaataataaataatttaaaaataaaaaggtaacacaaagaaaatgtaaattacccatmacccctggaataattaattttcttcaatgcttcttttgctcttcccacctctctcccccaccacttcatctgtgtatacttaacagttttttttaacagaattggaatcaatagtatttaaaaaaattgggtcctgttttttcacttgacatcatgtcataaatatttttccatgttattgaatattctttgaaaactccattttaaataatagcaaaataagacatcacctagctatatggtagtttatctaatatatttcctattcatggacactaaagttagtattgattttttctaatttaaacaacacataacgctggctggaacactttaaaaatattctttttcaaagtttctacttatttccttgagacagattattcttggaattatacttactaggtcaacaaggggcatgaggtttcaaagattcttgatattttatgccagattgctttcttagaaagcctgaactttataactggttatataaacgcgcrcacacacacacacacacacacacacacacacacacacacatatgccaggtgcagtggctcagtggcaggatcacttgagttcgagaccagcccgggcaatacagggagacccagtctctacctaaaaaataaaaaaattagccaggcatggtatatgcacctgtaatttcagctattcaggaggctgaggtgggagggtcagttgggcttaggaggacagggctgcagtgaaccgtgattgtgtcactgcactccagcctgggtgacagagtaagaccccatctcaacaaaaaaccccaccacttttctaatttagaagctcataaagggtgttcatattttttctttattaattttttatttaaaaatttggggggtacatagtaggtatatatggggtacacaagatgttttgatacaggtatgccatgtgaaataagcacatcatggagaatggggtatccatcccctcaagcatttatcctttgagttacaaacaatccagttacactcttcaagttatttaaaaatttacaactattattgactatagtcaccgtattgtgctatcaatagtaggtcttattcattctttctattttttttgtacccattaaccatccccacttctcccctacccccagctactcatctcagcctctggtaaccatccttctactatctatgcccatgagttgcattgttttgatttttagatcccataaataagtgagagcatgtgawgtttgtctttctgtgtctggcttacttcacttaacataatgatctccagttccatccatgttggtgcactattcatatttttaattactagtgaacttgaacatgttttttatgtttgttagtcattaatatcttttctactctaaggtaccttttcatttattttgcctagtgttgaattagggttttagcatggttgagatcaatttgtaagctttttatttattaaggatatcattctgcagctgtcatattcattgcaaatatttcccctaatttttccttttaatttttggcaaatgatgtatttggaaggacaaaatcatctttacataatactaataactatcatgtactgaatacttaccatttgctgggcattgaacaaaactttgtacatggattacctcatcatttaatctttgccatattcttagtggaatgcagcatttcctcatattataagattatatagttagtgtcttattccattttgtgttgctacagcagaatgccacagactagataatttataaagaaaagaaatttgtttggcttattgttctggaggttgggaagcccaagagaatggcaccaatatctggcaagggccttcctgctgtgtcatcccgtggtggaaggtagaaggacaagagactataagagtgagccagaagcaagaggggaccagactcacttttatcaggaatctactccctcaataatagcattaatctatttatgaaggcaaaactgtcagggcctaattacctcttaacagtcccacttcacaatggcaattaaatttcaacatgagttttggaggggacattcaaagtcagtaagtgaatgagctgggatgtgaatggatgaacaaagtcgtgttatgatttagaattttgaaatacgcttgccttgctgtaagaagagcttttaagctagccaatgctattatgttctttacgttttgagtaggcaatgcagtcattaaaaaagtttcaaaagaaaccaaccaggtgcggtttaaccagctggacgtctgtaacccaagcactttgggaggccaacgtggatggatcasttgaggccaggagtttgagactggcctggccaacatggcgaaaccctgtctctactaaaaatacaaaaattaggcaggcatggtggtgtgcacctgtaaccctagatacaggctgaggcacaagaattgcttgaacccgggaggtggaggttgcagtgagcggaaattrccccagcgtgggtgacagagcgagactgtatctaaaaaaaaaaaaaacctgaccaaacaaacaacaaaaaaaaaaaccttatgtatgctctcacattttttgtatgcggataaaagtaaatgaatatatatcttctctccctctctgcttattttacacaaagagttaagaccagtcagtttaggttatttgcttttgcaagacttggctacttctttagtgtgaagtatcttacaaagtgcacctctgattgaattaattatctctcatcttggagggattcaccatgcagagagttcaatttgtttagatggtaatttcatattgaaattgattttgggccaaagtccagcactgccaagtcttatgtaaccagcagaagctgagctttcaaccagctgccatatgttatgaggaacaaagccagaggaccagtgcagatggttctcaagaaataagttatcactctcaaagtctctagaaagacatattatcaaaaggttatcatgtgtggcatrcttcttaagaaaacaccgcatttcccttcctagagtgattagtaaaatatataccaaaatagttcatttaaggtgttctctggaatggtttggctttgtgttccttgagggtaaagctcaggaggactctagagactgatggaggacaagggctggagaagtgtttgtgttatcactaaggaagacttatagagaggacctgtgcccatcttgaagccactcatctagagcttactgatttcgttttgtctttatttctcaccccttccaggtactggcggaggacattgggcatgcaagtccgctatgttcaccatgaagactatcagttctgttattccttccggggcaggcctgggcacaaaccctccatcctcatgctccacggattctctgcccacaaggatatgtggctcagtgtggtcaaggtgcaattctcgattcttctctcttataagaaaagggagttgggtgctgtggctcatgcctataatcccagcactttgggagcctgaggcmggaggattgcttgagtccaggagttcraaaccagcctggacaacataaagaaaccctgtctctacaaaaaattaaaaaattagccaggtgtggtggtgcatgcctgtagtcctggctactcaggagactgaggtgggaagattgcttgagcctggggggtcaagtcttcagtgagcaatgatcatgccactgcacttagcctgggcaacagaataagactctgtctcaaaaaaaatwaaaataaaaaaaggaagaagaagaaaagggtttccactaggacatgatgtcatcaacaatggtagaaagcaaagggaactcagaactgtggtggttcaagtcatattagaactaatgcagtgtggcctggcacagtggctcatacctgtaatcccagcactttggggaggccaaggcaggcagatcacttgagcccaggagtttgagaccagcctgggcaacatagggagactccgtctctacaaaaaaattagccaggcatggtggcatgcacctgtagtcccagctactttggaggctgagatgggagaatcacctgagcctgggaagtcaaggctgcagtgaaccaagatcgtgctataccacactccagcctgagcaacaggagtgagaccctgtctcaaaacaaacaaacaaactaatgcaatatgttactcattcttttgtcagaaaaaaattattgagttgaatattatatataaaaygtatggcttagaaatctttttacctcatggatatttctttggggaggcttctgacacagctgcatctcagaactgctgtgagatcagagttgggctttgaaaagtcattttttttgtactcccaagtttcttctcttccttcccctccatattcttccttcattccttcttttcctttccttcccactccctcttctacgtctgcttttttcttttcctttgccatttagagaaacagtcttgatctagcagctttctggaagagttttccaagtcactttttgtcttggtttacttgggtgtggcaacttgctgctcttggtaagagtgatcaggtgtgaaggttggggctggcagaagtcttgggcaggaagcatccctggctcccacatcaggcaacaccatacctgagggatcccaagtatcatctacaccagtaggtgaagactcacacaccctctagttagttgtattcttatttccaaattccactatgaggacagtcattttcatgccttgatgaacttcctgtcccctcctcagataaatatctttcttataactggatgtttgtttgttggtaacttatgtttctcagtttcctggttaaaagtggtacatatctaaatggaagaaggtgttttaggataataataatttggaaaagtagaccttaatgtaaaaagaaaccaaacaaaccagaatcggggtgatcagatgtggttcttggggaaaacattgctcctgttggctctggagctggctaggatatgagagaacagaaccatcccttccagatccaagtcagcagctgcatggctggagtaagtgtggaaggggtgagggaaaggaggaggcagtacatgtcaactagtgtgaagaaaaagcaagagacttaagcctgctgccccgactttgtcccctttttacaggcatctcctgagcctgcttccatctatgtattagcctttgtgggcctctgctcccgatgaggctactggcaatgcttattcaattactggggtaaaacactgagtggccaagacccatacatccccagggatggctgtctgggtcactgtacatggggcaacctcccaagaaaatgggcagacatgttttgcacaccacatactgactctctgggtctgtgtgtcctcagttccttccaaagaacctgcacttggtctgcgtggacatgccaggacatgagggcaccacccgctcctccctggatgacctgtccatagatgggcaagttaagaggatacaccaggtaagcaggaggctctaccaaagattgcccagactgtctcagccaccattacatgtctgagtctggagagcagggaagggagtcctgtgctacctcatgaccagtctcctgtacattctgtctacaagtgatggcaagccaaatggcaacctgatgwtatctctggttggcaatggagggccagggcttattacagacttaagcctattgcagttgtttgtaacgaaatacaatctgagcattttctcaactctttgaaaaggggtttagaatttcttaaaaccaattcccttcctagggatctctctttctgctcaccagttatatgataacagtaatagcccctctgcctagctggggagggtgttcttcacattataacgtactttagcatctattgctagcacctattttagaatctatctctagccttctctggctaagctttcaagatcataggagtttaagagccatttcagaatggggtagcctgtaagtttcaggttgaccttaaatattttcccccaaatgaggatatttaatatctgcctcctccattaaactgttttttaaattcggtcaggaaccttgtctttttagctctttgctgtgttttcagcatctaatcatagtttcctgtacataatagatatccaatgaatattttttagaatgctggatagttgggtggatggctgattggatgattggatggatagatggatggatggttggatggatggatggttgaatagacaaatggatgggtagttatatgaatggatggtcagatggacgagaagagctttaaattagcacaggagccctcaaactacagcccatgagctatgtttagcttgtacctatttttgtaaactaaattttactggaaaacagccacactcactcatttatttaatacatattacctttgactgcttttgtctgcaacagcagagttgaatagttgcaacagatcatatggctctcaaagcagaaaatgtttactctctggacctttatagaaaacttcatcagcctggacaatatggtgaaacctcatctctacaaaaaaaaaaaaaaaaaaaaatcagccagatgtggtggtgcatgcctgtagttctagctactcgggaggctgagatgggaggatcacctgagccccagaggttagccatgatcacgccactgcactgcagcctgggtgacagagtgagaccctgtctcagaaaaaaagaaaagtttgctgactcattaattagcmgaatccctgttgattttatatttataaatgacctctcaatctcttgtgccagacagagaagtccatgcatgccacagggctcatcttataatggatccagtagagtttcagactctttaaacagtagtcattttcagttgtccataggaagtccagggggcttctatgctgtagtcaccattgccattgtctacagctgtataaccaagctgctttctcatttcccttcctagtttgtagaatgcctgaagctgaacaaaaaacctttccacctggtaggcacctccatgggtggccaggtggctggggtgtatgctgcttactacccatcggatgtctccagcctgtgtctcgtgtgtcctgctggtaagttatgaagctgaaacatccctcggcagggatgaatccctgaagaaacaagtagctagtgtctgctatgaccgttttttggaatcatctttttgatgtatgcttgagagatatgcagtgttttactgataactctaaccaaccaatagttatataatcataatcataaccagactgattttgaaaatatagagccagccttgttacaccaagaatttgaggtggggccaggcacagtggctcatgcctgtaaacatttaaaatttaaaaaaaaaaaaaggaatgtttgaggtggttgattaaaatgtatatagtgctttgcagcacatactttgaaatataatgttactattaacatccaacatttatcgggctcttacgagctaagctctttatatgaatttaattcttgcagtagccctgtgaggtaaaggtactataattatgcccctctccttttttggtaaaaactgagagatctttatttattataataagatcttaaaaaaaatccagctttagtttctctactgttatatgtacatatgtcaacgtgaagtgtaacatgttctccgatattaccgtttgaagttggatttttaaatttgtttttcttctataagtctttagagttgtatttataatatataatagataaaaatcatattttttctctcctctatctccccctctctctgttttttttttttttttttttttttgagacagtctgttgctcaractggagtgcagtggtgcaatcatggctcactgcagccttgacttcccaggttcaagcaattcttgtgcctcagccacccaagtagctgagattacaggtgtgtgccaccatgcccagctaattttttgcattttcagtagaggtggagtttcgcaatgttggctaggcaaacttgaatcctgttggctaggatcctgttggcctgagtcccttgaactcctggcctcaagtgatctgcccgcctccacctcccaaagtgctgggaataggcgtgagccaccgcacccggcctctctctccctctccctttggtgctttattggggtatcatttacacatagtaaattgtctaaatttaaatgtgcatctcaatgactttttacgtatgcagttaccatgcaggtcaagatattatgcccattttataaatgggaacgttgaggcacagagaaattacattagtgccaaaaccacagtaggaacagagcccaggctgcctgactccagaacccaagctgtgatgtttggaagtccttgcatatttactgcctcctttttatgactcatatcttctacttcctctgtatgattcaactagaatccagccatgaattgaacatttaatgacttttactgaaacttaactaaattgacctttaaaatccttctgccactctgaaagctaatcattttcgatatgttgaggacattgaaatcgaagagaagacaccaaagggtcttctcctctcttttttcaagtagcatatctgaaataatttgatcttataataataagtttgagaattgaaggaacagcatctatggaaggtttttagattttaaatcacttacaggaagtaaaatctaactggctttttcaagtataggttcatttgctcagagaaaaaattgacatccgaatttcaactggaaatttaaaattaagtttgtatgtgaaaactaaaaagtagaaataaattcaggattatatcctaccaagagttttaaaataaactttctaaaaattttgaaataatttttaatttacagaaaaattgcagagatattatagagcgccccatataacctatactcagtttccccattaatagctcacattaccacagtaaattttttcacaactaagaaaccaacattagtatattactgttaactaaattccaggctttatttggatttcakttagtttttcaactcatgtcctttttctgttctgggatccagtccaggatgtaccacatgacatctaacctaggtttagttttaaagagaggggaaatagataatgtcatctgcttcatggcatcgtgaaagccatacatcatacccatgttagatttaaagggtttgctggacatagatttgcaaagcgtgggtttctgcatcacgaccaatattattgatgctactgcctttcattataaaatctagctcttttctagattttgctgggtgaggtagctcacacctgtaatcccaacactttgggaggctaagagaggaggattgcttgaggccaggagttcaagaccagcctaagggagaccccatctctgcaaaaatataaaattaaaaaaaaatctaacattcacacatatgtttattgcagcactatttacgatagcaaagacttggaactaacccaaatgcccaccaatgataaactggataaagaaaatgtggcacatatacaccatggaatactatgcagccataaaaaagaatgatttcatgtcctttgcaaggacatggatgaagctggaagcatcattctcagcaaactaacacaggaacagaaaaccaaacaccgcatgttctcactcataagtgcgagttgaacagtgagaagacatggacacagaaaggggaacatcacacactggggcctgtcagagggtggaggtcacagggagggagagcattaggacaaatgccgaatgcatgagggacttaaaacctagatgacgggttgataggtgcagcaaaccaccgtggcacatgtatacctatgtaacaaacctgcacgttctgcccatgtatcccagaacttaaagtaaaaaaagaaaaaaaaatctaattatttggctaagctaaatgcctagaaatttgctccatgctggaagtgaaaattagttttgccctcttgcatacatagcatcagcttctgtggactctcgtgtcgtgccctgaggtgatgggagataatgagcaatctcaattttgctctcctagaggaagagcaactgtggagaaggcagcagggttgctgccctaaagcaagggacagctgggaagactcccagtccccctgtgttttatcattgaccccaaataagagagtaccacgtgggtccaggccaagggaaggagtgtcattcatgccagccctatgttttcttccggtcatgtatttcctcacatttcctgtcaacactcagatrtgcttaggcaagttgtcttctaggctaaccctccttaaattctatcatacatatgaatcccctggcaacttgtragaaggcaaattctggttcaagaggctcagggaggagcagcgtctgcatttcttgtgggcttttgatgctcctggkccatggactayagtgtgagtgaccagtccctgaaatatgtggaaggatttttttgtgtgtttctcagtgtggttttgatttgagcaaggatggcagtaccaacaaaaaagaaatctactcatgaaataaacctgaaatatattaactctgggctgctgtcagaagttccctatataaaatgggattggtaagaaggtggatgtatcatcaagccatttgggtttgaatcccacaggcctgcagtactcaactgacaatcaatttgtacaayggctcaaagaactgcagggctctgccgccgtggagaagattcccttgatcccgtctaccccagaagagatgagtgaaatgcttcagctctgctcctatgtccgcttcaaggtgccccagcaggtaaygtggttgcagcagcgacacaactaccctccccagaggcccgggggcgagtaccagcttcctgcacgtattccctccttcacctactcattgactacttcttgtcctcttctgcatatattcagcaagtgtctctgcagtgcctgcaacacgctgggcactgtgctggtacagtgatcaataaagacaagaaggtccctgggcagacacagtccagtgggggaggcagacaataacaagtaaacaatgaactaccagtggtcatgagttttatagcagaaatgaagatggtgtagtgattgaatacggggaggcaggggtggctttgataagcctcttctagggacagcatatgcagaggtggaaaaacatacatattcaagacaaaggaagccagggtagctggagccccaagaataagagaatggtgaagatggagttagaaagggaggcaggggctaaatcagagatactcaattgaaaaaaaaaaaatctcaggaccccttatactctttttttttttttttttccagacrgtctcactctgtcacctaggctggagtgcagtagcatgatctcggctcactgcaacctctgcctcccaggttcaagcgattcttctgcctcagcctcctgagtagctgggattataggtgtgcgccaccacgcctggctaatttttcatttttagtagagatggggtttcaccatgttggtcaggctggtctcgaactcctgaccccgtgatccgtccacctcagcctcccaaagtgctgggattacaggcttgagccacctcacctggctaggaccccttatcctcttttttattttttaaatatactttaagttctagggtgcatgtgcacagattgcaggtttcatacataagtatgcatgtgccatgttggtttgctgcacccatcaactcaccattcacgttaggtatttctcctaatgctatccttcccccagccccctaccccctgcctggtgtccaagtgttctaattgttcagttcccacctatgagtgagaacatgtggtgtttggttttctttccttgtgatagtttgctgagaatgatggtttccagcttcatccatgtccctgtaaaggacatgaactcatcctttttatggctgcgtagtattccatggtctgtatgtgtcacattttcttaatccagtctaccrttgatagacatttgggttggttccaagtctttgctgctgtgaatagtgctgcaataaacatacgtgtacatgtgtctttatagtagcatgatttataattcttagggtatatacctagtaatgggattgctgggtcaaatggtatttctagttctagatccttgaggaatcgccacactgtcttccacaatggttgaactactttacactcccaccaacagtgtaaaagcgttcctatttctccacatcctctccagcatctgttgtttcctgactttttaatgattgccattctaactggtgtgagatggtatcttattgtggttttgatttgcatttctctgatgaccagtgatgatgagcagtttttcatgtgtctgttggctgcatagatgtcttcttttgagaagtgtctgttcatatcctttgcccactttttgatggggttgtttttttttctgataaatttgtttgagttctttgtggattctggatattagccctttgtcagatggrtagattgcaaaaattttctcccattctgtaggttgcctgttcactctgatggcagtttcttttgctgtgcagaagctctttagtttaattagatcccattcgtctattttggcttttgttgccattgcttttggtgttttagtcatgaagtccttgcccatgcctgtttcctgtatggtattgcctaggttttcttctagggtttttatggttttaggtctaacatttaagtctttaatccatcttgaattaatttttgtataaggtgtaaggaaaggatccagtttcagctttctacatatggctagccagttttcccagcaccatttgttaaatagggaatcctttcccatttcttgtttttgtcaggtttgtcaaagatcagatggttatagatgtgtggtgttatttctgaggcctctgttctgttccatttgtctatatatctgtttttgtaccagtaccatgctgttttgattactgtagccttgtagtatagtttgaagtcaggtagcttggtgcttccagctttgttctttttgcttagaattgtcttggcaatgcaggctcttttttggttccatatgaactttaaagtagtttttttccaattctgtgaagaaagtcattggtagcttgatggggatggcattgaatctgtaaattaccttgggcggtatggccattttcatgatattgactcttactatccatgagcatggaatgttgttccatttgttagcgtcctcttttatttcgttgagcagtggtttgtagttctccttgaagaggtccttcacatcccttgtaakttggattcctaggtattttattctcttygtagcaattgtgaatgggagttcactcatgatctggctctctgtttgttattgktgtataggaatgcttgtgatttttgcacattgattttgtatcctgagactttgctgaagttgcttatcagcttaaggagattcggggctgagacgatgggattttctaaatatacaatcatgtcatctgtaaatggacaatttgacttcctcttttcctaactgaatatcctttatttatttctcttgcctgattgcactgggcagaacttccaacactatattgaataggagtggtgagagagggcatccttgtcttgttccagttttcaaagggaatgcttccagtttttgcccattcagtatgatattggctgtgggtttgtcataaatagctcttattattttgagatatattccatgaatacctagtttattgagagtttttagcatgaaggggtgttgaattttgtcaaaggccttttctgcaactattgagataatcatgtggtgtttgtcattcgttctatttatgtgatggattacatttattgatttgtgtatgttgaaccagccttacatctcagggatgaagccgacttgatcgtggtggataaactttctgctgctggattcggtttgccagtattttattgaggattttcacatcgatgttcatctggaatattggtctaaaattctctttttttgttgtgtctctgccaggctttggcatcaggatgatgcaggcctcataaaatgagttagggaggattccctctttattgattggaatcgtttccgaaggaatggtaccagctcctctttgtacctctggtagaattcgcctgtaaatctgtctggtcctggactttttttggttggtaagccattaattattgcctcaatttcagagcctgttattagtctattcagagattcaacttcttcctggtttagtcttgggagggtgtatgtgtccaggatttatccatttcttctagattttctagttaatttgcgtagaggtgtttatagtattctctgatggtagtttgtatttctgtgggattggtggtgatatcccctttatcattttttattgtgtctatttgattcttctctcttttcttctttattagtcttgccagtggtctgtcaattttgttgatcttttcaaaaaaccagctcctggattcgttgattttttgaagggttttttgtgtctctatctctttcagttctgttctgatcttagttatttcttgccttctgctggcttttgaatgtgtttgcccttgcttctctagttcttttaattgtgatgttagggtgtcaattttagatctttcttgctttctcttgtgggcatttagtgctataaatttccctctacacactgctttaaatgtgtcccagagatcctggtacattgtatctttgttctcattggtttcaaagaacatctttatttctgccttcatttcgatatttacccagtagtcattaaggaacaggttgttcagtttccatgtagttgtgcaattttgagtgagtttcttaatcctgagctctaatttgatcgcactgtggtctgagagacagtttgttgtgatttctgttcttttacatttgctgaggagtgctttacttccaattatgtggtcaattttagaataagtgtgatgtggtgctaagaagaatgtatattctgttgatttggggtggagagttatgtagatgtctattaggtctgcttggtgcagagctgagttcaagtcctggatatccttgttaaccttctgtctcattgatctgtctagtattgacagtggggtgttaaagtctcccattattattgtgtgggagtctaagtctctttgtaggtctctaagagcttgctttatgaatctgggtgctcctgtattgggtgcatatatatttaggatagttagctcttgttgaattgatccctttaccattatgtaatggccttctttgtctcttttgatctttgttggtttaaagtctgttttatcagagactaggattgcaaccctgctytttttttgctttccgtttgcttagtagatcttcccccatccctttattttgagcctatgtgtgtctctgcatgtgagatgggtctcctgaatatagcacactgatgggtcttgtccaatttgccagtctgtgtcttttaattggggcatttagcccatttacatttaaggttaatattgttatgtgtgaatttgatcctgtcattatgatgttagctggttattttgcccattattgatgcagyttcttcatagtgtcaatgatctttacaatttggcatgtttttgcagtggctcataccggttgttcctttccatgtttagtgcttccttcaggagctcttgtaagacaggcctggtggtgacagaatctctcagcgtttgcttgtctgtaaaggattttatttctccctcacttatgaagcttagtttggctggatatgaaattctgggttgaaaattcttttctttaagaatgttgaatattagcccgcagtctcttctggcttgtagggtttctgccaagagatccgctgttagtctgatgggcttccctttgtgggtacctgacctttctctctggctgcccttaacactttttccttcatttcaaccttgctgaatctgacaattatgtgtcttggggttgctattctcgagtagtatctttatggtgttctgtgtatttcctgaatttgaatgttggcctgccttgctaggttggggaagttctcctggataatatcctgaagagtgttttccaacttggttccattcttcccatcatttccaggtayatcagtcaaacatagatttggtattttcacatagtcccgtatttcttggaagctttttttgtttctttttacttttttttctctaaccttgtcttctcactttattttattaattttatcttcaatcacggataccctttctttcacttcatcaaattggctattgaagcttgtgcatgcatcatgaagttctcgtgccatggttttcagctccatcgggtcatttaaggtcttctctacactgtttattctagttagccatttgtctaaccttttttcaaggtttttagcttccttataatgggttcaaacatgctcctttagcacggagaagtttgttattactgaccttctgaagcctacttctgtcagctcagcaaagtcattttccatccagctttgttccgttgctggcgaggagctgcaatcatttggaggagaagaggcgctctggtttttagaattttcagcttttctgctctggtttctccccatctttgtggttgtatctacctttggtcttttatgttggtgasctacagatgggattttggtgtagatgtcctttttgttaatgttgatgctattcctttctgtttgttagttttccttataacaatcaggtccctcagctgcaggtctgttggagtttgctggaggtccgctccagaccctgtttgcctgggtatcaccagcggagtctgcagaacagcaaatattgctgcctgatccttcctctggaagctttgtctcagaggggcacccggccgtatgaggtgtyaatcagcccctactgggaggtgtctcccagttaggctacacgagggtcagggacccacttgaggaggcagtctgtctgtctcagagctcaaatgctgtgctgggagaacaactgctctcttcagcgctgtcagacagggacatttaagtctgcagaaattgcctgctgccttttgttcagctaagccctgcccacacaggtggagtctagaggctgctggccttgctgagctgtggtgggctttgccgagttcgagcttccaggccactttgtttacctacttaagcctcagcaatggcagacgcccctcccccagccaggctgccgccttgcagttcaatctcagactgctgtgctagcagggagcaaggctctgtgggcctgggacccaccgagccaggcacgggagagaatcttcttgtctgccagttgctaagaccttgggaaaagtgcagtatttgggcaggagtgtcccagttttccaggtacagtctgtcatggcttccctggctaggaaagggaaatcccccgaccccttgcacttcccaggtgaggygatgcctgccctgcttcagctcgccctctgtgggctgcacccactgtccaaccagtcccagtgagatgaaccaggtacgttaattggaaatgcagaaatcacccgccttctgcgtygatcacgctggatgccgcagaccggagctgttcctattcggccatcttggaacctatcctcgttatactcttaaaaattgttgaggaacccaaagggtttttatttataggggttatatttattattaatgtttaccatattagaaattaaaactcaggccgggtgcggtggttcatgcctgtaatcctagcactttgggaggccaagatgggaggattgcttgagactaggagttcawgaccagcctggtcaacgtagcgagaccccatctctatttaaatacaaataaaagaaaataaatgaaaactcagaagattccaaaatgcaatgaatgtacaagcacttattccagtagccaagagcaaggacatcatcccacattttataggctctgaaaaacagtgtamttttgagagaatgtaagtgaaraggcaagtaacaytgagtattaggaaagtagtttgacctcctagactcccaagaaccactttgaaaaatgctggactagatcctgtaggaycttataggtacggaaaggagccaggrgtttttctaagtataataggaccactgagagattgtaggagagcacaaatggaacagaggaacccatttgggaactattgtgccttggagatgatggtggtgtagactaggatggtagcaatggagatgagatttgagaaagaatggacaggatgtacaggcaaattggaaatgggggctggggaaaggggaggagtcccaggtgacttccagcacttgaggtcctggctgggcatggtggcttgcacctgtattcccagcactttgggaggccaaggcgggtggattgtgtaaatgcaggagttcgagaccagcctgggcaacgtggtgaagccccatctctacaaaaaaaaatttttttaattagccaagtgtggtggtgcgtgcctgtagatccagctactcgggaggctgaggtgagaggatcacctgagcccaggaggcagaggctgcagtgagccaagatcatgccactgcactccatcctgggcaacagagtgagaccctgtctcaaaaaaacaacaacaaaaacaaaaacagaggtagtatattctgaagagtagaagggcaggcttggggaatatgccaaggactccatttttcatgtgttaagttcaggttgcctgtgaggcctccaagtgcagaggtcaaggtgtagctgagggaagtctggcctgaagctgtaccactggagccatcagcagacgctaatattgaaggttatgggactgaatgaagtcatctagggaaatggtgtgaagaaccaagagaggagagtccatggctgaggcttcataacmccaaattatctccctctgttgtaggagctggaccctgcctggrggtgggcaggtcctcctaagacttgagggaatagatcccattcagaagttgtgaacatggctcagttaatagatacggcctgtccctcaggaaacacccagaatctgatgctgtggcatgttccacccctgaaatccctttttagccatgaagtagcattcctttctcccagcastgatctcttcccagaatagagtggccaaatgatgttttagaaaactccatgttttgggttgtcagggatatgaaaacaccaagagaaaaataaatggcagctccaaaagtctttccttcctaggagagaaggagcacctgcacactcagcccaccatgtcatattgtgttgtgattgcacgtctgtgtcttccactagggactttgtcttaattggctgttctatccccagactttagcacagtgcttgcatgaagtaggtcctaggtatagattggatggattgatggatgagaggatgcctggataatgcagggatggacaatggatgggtgggtagatgcaggatagatttttgcatgaattgattgatgtgccagtgcacagatgatttaggtctgcaggatggatagatggctgaatggttggatggatggatggatgggaggatatctggttaatgcagagatggaggttggatggrttgatgaatacaggatagataggtagacaaatgcatatgtggttcaggatggatggctgmattgagcagaggtggaggatggatggayacaagatgaatagatatgtgggtacakgtggatagctgaacaaagaaaatctctgatgctgagcacaatgttgttattcaacaaattgtcattgtcctcatgtccaggctgaatgagttagagtctagtgatgctccagagggttggtttagtccatagcagccatggctggktcttccccactttcagtcagtgcasaggactcctgagakagtgtaattaaagggttcagacctgtttgcaggtagaggagaggagtagaggagtacagccactaatgtgaaccctgtactctacctcaggagtcctgaggcaggaggaagagaagaactgtgttccttccagccaccactacctctttgggtcagtagcccaggtccagaagatgtggcctgtccacattggctgcagccctcaccagccctcagcagggaaggcaaagacagtgtcaaatgataaacaaagggctgttgaaccctcccagtgggactgtggaaccctccccagaatcttttcaatagtttatttctttgttgtttaatagacctatcatcccccagtggcttaatttttttaatggaacttgttctgcgtttggatattactggcgaattacttgatattatggtcatcctcattatgtcttttttttttttttgagatagagtctcactgtcgcccaggttggagtgcagtggcgcaatctcagctcactgcaacctccgcctcctgggttcaagtgattctcctgcctcagcctcccgagtagatgggattacaggcctgcaccatcacatcctgctagtttttgtctttttagtagagatgggggtttcaccatttggccaggctggtcttgaactcctggcctcaagtgatctgcccgccttggcctcctgaagtgctgggattacaggcatgagccaccatgcccggcccatcctgattatgtcttaagtgaagcagagaatctctcaagctaaagttgctgtcaggccatctcaggtgtatttaacatgctgtagggcacctccagtttcacgatattacccaagttcctttataataataataataataaaaagcttcttagaagcctaactccccattagactgtgtgctgcatcatgggaattcagaggaccaggctctaaagaccttgacagtgcaataaattgctggacctcattcccattcattgtcccagagctgtgagaggcctgaggaaatgaatcttctcttgctctctaactttgggttatttatccttagatcctgcaaggccttgtcgatgtccgcatccctcataacaacttctaccgaaagtgtaagtagccctactttcagcttggagcttgttacaagtgaagctctgtggatggatggcttttatttcttaaatctctgacacttygaatgtctcyttgggcccctgaagagaggaagtggtggcctggatctggtgactatcccttgattctgcggtggtgccacaggcacagtccagcacatactcactttgttttccttttctgacaagtgtttttggaaatcgtcagtgagaagtccagatactctctccatcagaacatggacaagatcaaggttccgacgcagatcatctgggggaaacaagaccaggtatgtaacacatccccgcggcagtctgtgctggtcaccagggcctctgaggaaaaacgtccttgaggaagaacaagtggttatttatggagtgagctgatcgctgctgtcaggaagagggggaaggcacctgtgttgggtgccagtgttgacagtgggcagagttctgggagtggagagaaacaacatttggtctggtaaaaggaaagacaattttaaatcattttcaaaaattgtttttatcaaagccatgtagtcacatggtataaaaagatcttcaaagaacaccaaaaggtttataatgaaaacttttctttttcgcatcccaaattccattctccattaccatgaggcaactcttatcttactatcttgaatatatttcttttcttttttttgtttgagacggagtcttgctctgtcacccaggctggagtgcagtggcccaatcttggctcactgcaacttctgcctcccaggttcaagcgattctcctgcctcagcctcccaagtagctgggattacaggtgccctccaccatgctcacctaatttttgttttttgttcttttgttttttttttttagacgaagtcttgctctgttacccaggctggagtgcagtggcacaatctcggctcactgcaagctctgcctcctgggttcacaccattctcctgcctcagcctctcaagtagctgggactacaggcaccygccaccatgcccagctaattttttgtatttttagtagagacggggtttcaccatgttagccaggatggtctcgatctcctgaygtcatgatctgccggcctcagcctcccaaagtgttgggattacaggcgtgagccaccacacctggcaatttttgtattttttttagtagagacggggtttcaccattttggccaggctggtcttgagctcctgacttcaagcagtccaccttccttagcctcccaaagtgctgggattacaagcatgagccaccatgcttggcctaaattttttaagccagaagttagcaaatgttttctgtaaagggccagatggtaaacattttcagccttgtggtccagtctctgtcacacctggacacagttgagtaactgtgaccttatagtataaaagcagccataggcaatatgtaaacaaatggcatggctttttccagtgaacctttatttataaaaacgggcagtgagccattgtttgcctactcctattctaagcacacgtatagtgtatatatatgcatacctatacatatctgagctttcaaacatgctagatacactggcatctaagatgcatgtttgaaagcttagatatatataggtgtgcatataagatatataagatcatatatgtgtgtgtgtgtgtgtgtgtgtgtgtatatatatatatatatatatatatatgtatatataagtaggtatcttggaaatcattttataccagcccaaacaaatctattccttctattcttaaaaaaattttatcttgaaataatttcaaacttacagaaaatttgaaagaaggccaggcatggtggcttacgcctataatgccagcactttgggaggctaaggcaggaggattgcttgagcccaggagtttgagaccaacctgggcagcatagtgagatcccatctctataaaaaataaatttttaaaaaagtagccaagcatggtggtatgcatctgtagtcccagctactctggagggtgaggcaggaggatcacttgagtccaggacatggaggtggcagtgagccgtgattgcttcactgcacaccagcctgggccacagggcgggatcctatctcaaaaaaataaaaataaaaaagaatacagagtatacctgcataccctttacctaaatgcatcaatttttaactggcaggaggtcacactgtggccacaaagacccacaagtgcatgaatgacccaggcaggagagagtggggaggagcagccaggctgtgcccatggcgtgtacgcagaataagaggcaatggtgtcttagatgagccaggcatggtgaggattcacagcatggttttgtggacgtggagagaaggggatctcatgtgctctcttctgcagcgccaagggactgaaagaagctttgtttgtgccctgggctatgccagcagagagtcatttgatcaggaatcagagcctgagcagcgaaggccttctgttgttctaaaaaccccaaaggtgatttggggctctcaggagccaacagggagaggctgtaacccatcttcctgtggagacagcgcagaagcaagggcactggccttggattctgaaagtctatgttccagccctacttttgtccttggtcagcccatgcatgaccttgagcaagtaactcagcccctctaaattaagggtttctgaaacttctagtaccagggttattttgaggctcaaatgaaataatatgtatgaaaatgatcttccagttgcaaaaaagttaggttagctggtattagattagactgctcatgtcctttgcctctgttggtggcttcaatgcatggtccaaawttttttcccagactcagaagtccgtttcattccagaaaaagagcctaacattctatgggcttgctataaatatgatcagatccttcatgtgttttgtggactgtccctgggacagaggccaaatagcagaggcttcagggagtcttttatttcacagccttttgcctcccaagctcgctggctcttttcctgctctgtcatcaacatttggtgtcacagcacctgcccctaccaggccaaattcagcttccttcttctttggacccctgtaggctgactgctatactgcacagctgcagggggagccatgtgcattgtcatttttgtgaatgatggatttggtctgtatacaacctgtacacccaaacatggcagcccttcctgagagggtttctgcatgcttcatttcaagcatcgctcctctatgttcagtccatcaaaatgggagggccatctagagacagacaggctattattctttatgtcccttctccctgccagcaccgtgcctggtatgcaggagacccagagtacacagtgagtgagcaaacaagtgagaaattgagtgaacaaaccaactagtgaagggataaacccactaactgactgactacacatttaagccagttaacaggcatttattgagcacctagtatgtgcctaacactgtattaggccctgaggatacagtagggaccaagacagccaggatccctgccctccagcaatttatcgtctacctacccttatagtgcataacaggcccgagacaagggtgagatgagagagatgtgtcatgcaggtgcagggtcagatcctgtctgtatttatgattttgatattttgttcatcatgtgcctttttccattaatgttttttttaacatactgcactaaaatattttctcttaatttatgagttttttggcacttaaattttgtgccttaggcaaatgcctcatttgcctcaccatagttttagccctggtgtgaagcaatgcaggaaaaggttttgatttttgttttttgttgggcaggggggttgtttgtttgtttgttctgagactggttcttgctctgtcacccaggctagaatgcagtggctcaatcatagctcactgcagcctcaacctcctgagctcaagcaatgctcccacctcagcctcccaggcagctgggactacaggcatgtgccaccacacccgggtaattttttattttttttatttttttattttttttattgatcattcttgggtgtttctcacagagggggatttggcagggtcataggacaatagtggagggaaggtcaccagataaacaagtgaacaaaggtctctggttttcctaggcagaggaccctgaggccttccgcagtgtttgtgtccctgggtacttgagattagggagtggtgatgactcttaacgagcatgctgccttcargcatctgtttaacaaagcacatcttgcacygcccttaatccatttaaccctgagtggacacagcacatgtttcagagagcacagggttgcggggtaaggtcacagatcaacaggatcccaaggcagaagaatctttcttagtacagaacaaaatgaaaagtctcccatgtctacctctttctacacagacacggcaaccatccgatttctcaatcttttccccacctttcccccctttctattccacaaaaccaccattgtcatcatggcctattctcaatgagctgttgggcacacctcccagacggggtggtggctgggcagaggggctcctcacttcccagtaggggcggccaggcagaggcgcccctcaccacccggacggggcggctggccgggtagggggctgacccccccacctccctcccggacggggtggctggccrggcagaggggctcctcacttcccagtaggggcggccgggcagaggcgcccctcacctcccggacgaggcggctggccgggcggggggctgacccccccacctccctcccggacggggcggctggccgggcggggggctgacatccccacctccctcccggacggggcggctggccgggcagagaggctcctcacttcccagtaggggcggccgggcagaggcgcccctcacctcccggacggggcggctggccgggcggggggctgacccccccacctccctcccggacggggcggctggctgggcagaggggctcctcacttcccagtaggggcggctgggcagaggcgcccctcacctcccagacggggcggctggccgggcggggggctgaccccccccacctccctcccggacggggcggctggcctggcgggggctgaccccccaccttcctcccggatggagcggctggccgggcagaggggctcctcacttcccagtaggggcggctgggcagaggcgcccctcacctaccggatggggcggctggccgggcggggggctgacccccccacctccctcccggacggggcggctggcctggcaggggctgaccccccacctccctcccggacgggtcggctgccaggcggagaggctcctcacttcccagacggggtggctgccgggcggaggggctcctcacttctcagacgggcggtgccgggcggaggggctcctcacttctcagacagggcggttgccgggcggagggtctcctcccttctcagatggggcggctgggcagagacgcttctcacctcccagacggggtcgcggccgggcagaggcgctcctcacatcccagacgggccggcggggcaaaggcgctctccacatctcagacaatgggcggccgggcagagacgctcctcacttcctagatgggatggcggccgggaagaggcgctcctcacttcctagatgggatggcggccgggcagagacgctcctcactttccagactgggcagccaggcagaggggctcctcacatcccagacgatgggcggccaggcagagacgctcctygcttcctagatggggtggyggccgggcagaggctgcactctgggcactttgggaggccaaggcaggcggctgggaggtggaggttgtagcgagccgagatcacrccactgcactccagcctgggcaccattgagcactgagtgaaccagacaccgtctgcaatcccggcacctccggaggccgaggctggcggatcactcgcggttaggagctggagaccagcctggccaacacagtgaaacccgtctccaccaaaaaaatacgaaaaccagtcaggcgtggcagtgtgcacctgcaatcgcaggcactcggcaggctgaggcaggagaatcaggcagggaggttgcagtgagccgagatggcagcagtacagtccagcttcggctcggcatcagagggagaccctggaaagagagggagagggagaccgtggggagagggagagggagagggagagggagagcaattttttattttttgtagagatgaggtcttactatgttggccaggctggtctcgaactcctgggttcaagagatcttcccacctcggcctcccagagtgctgatattataggtgtgagccaccacacccagcccaggaaaagtttttgaccatttatatgaatattctatctaggaaatcgctgaaatggttcccacagatgtgcatatctcatcagggggtcgttcagtagttgcacatacctctgggtggccatggagaatgatggatttgtaacgctaaccagcaaacagtgccaaagccagcagctcatatgggtatttttgcctgtgagttgtggtttctgatmtctctccaggatagacactcagttttgcctgggcrtgatggtgcgtacctgtcatcccagctacctggggggcactgaggtgggaggatcacttgagcccgggaggtcaaggctgcagtgagccatgatcgtgccactgcactccagcctgtgcaayagagcgagaccctgtctcaaaaaaacaaaaaaagacactcagttgggagtttccactttttcrtgctgttttcacctattgactgcatctgcgtttcttctgagtgtttccacagtagctgggtgttattcctgctcagtgggttgccgtggcagccttagctgtgagtgagtgacaaggcagaggtttccatttccttggctggaattagctgttaagctccccattagctgttccttttcctggtccagggatgccctgcaggactcttttccttgactgaggcatcgtcttaccttaactccccagtgggcagaaaatcttggttttaataatttgagttggtgagaatagagcaaagacacagaaggtgcttgagtttgttggggcttttgcttttgccgttaaggatggggaggaggggccctcttgtctaggatgaattgaaggtaaaggcagctaagagaaggggagtgaatgcggatccacttctgagggaggatgttggggaaaaagatggaggtggattggcatagtagctgggaacccagaggaaaaggagaggaaatgagttgtttgaaaaggrtcagccctggaaaagttctggctttcatgttggaaaagcattccccatatctgcagaggttagagccaagaaacacacagctctggggatccccagaggaccttcaaagagacctccagctgggtgcggtggctcaggcctgtaatcctagcactttgggaggctgaggcaggtggatcacctgaggtcaggagttcgagacaagcctggccaacgtggtgaaaccccatctctactagaaatacaaaaattagctgggcatggtggcgggcayctataatcccagctactggggaggctgaggcagaagatcacttgaacctgggaggcggaggttgcagtgagytgagatcacgccacttcattccagcctgggcgaaagagtgaaactccttttcaacaaataaagagatacccccagcttgtgataattagccttcccctcttgcatccttcctacagcttgggctgccctaaccagccacagggccagcctgatcaagtcactcaccttaacacagcctgtggttccccatggtccgtgtggctgtaggagcagcgccctcctctctgccccttctccccaccatgccacccccactgcccatgtgcttggtgtctcagccgccgtgctccttggtggcccctgcactcgcyatgatctcccaccctgtgccattcccacatccgtgaatgctcctcccctgtcccctttctgctctcccgggactcaggaacgaggtcttccctcgaccctgctcatcccctgtgctctctgacttccccaccataccataacctcctcaagggcaaggaacgtttgttttctacctcagtattgctgacatcagcccaactcctggcacagagttgcagaataaaacaggaggcatcatggttacttccattcagacagccacaagccccaacaccaaagggacttggtcctaaaattcacatcctcctgccccactgacccctgccaggccttggtggaagttctgtccacagagtgcacacgtgggtgtctgaatctttgtgtatcatccagctccctttcttgcccagcaggtgctggatgtgtctggggcagacatgttggccaagtcaattgccaactgccaggtggagcttctggaaaactgtgggcactcagtagtgatggaaagacccaggaagacagccaagctcataatcgactttttagcttctgtgcacaacacagacaacaacaagaagctggactgaggccccgactgcagcctgcattctgcacacagcatctgctcccatcccccaagtctgacgcagccaccactctcagggatcctgccccaaatgcggtcggagcgccagtgaccctgaggaagcccgtcccttatccctggtatccacggttccccagagctttggggaccacgcgaaaayctccaagatatttttcacaaaatagaaactcatatggaacaaaataagaaaccccagccatgaaatctaccatgaagtcttcaagttcatgtcactgasaagcttgtgcaaagcagccaccttggaccataattaaatcaaggacattttctttgagacattccttatagttggagactcaagatatttttgttgcatcaggtgtattcccttgcatgggcagtggcttttataggagcattagtcctcattcgctgaaccctgttgtttaggtctaatttaagttttacatagagacccatgtatgactgcagcccattggctgcaagaccagggaggaaagtggcaagctgtagaaaatgtttacacgcatggaggggcattgctcyagccctcagagcgtccggagcagcaggrtacatgggtgggaggttcattcagcacccaccagtcaggtatgttctgagtgaacccacagcagtcgcagaatgagcacctggcagggtgggtttcctaggaataatttattatttttaaaaataggcctaataaagcaataatgttctagacatctgtctaagtaatcagactcaggttccacacacaagcaacaactcgtgggcctyttttctatttcartgtgctactaagaacccttggatgtaacatactagttagttaatgaattctgtgaattctgtgaagagtaatgtgattgaaaataagtctaaacrgctgtaaaagtgaccacaatgacatgaaataaatttaataagtctagatcagcaacatgcaggtggtttctatttctgaactcctaattaggtgcaatgttggcagattttctgttaactttaaaatgtgttttttaaaataaggcttgtttaacaggctttggaagtctttgcatggatgatttattaggtttaaggaatcatgtttgcaatttttatccagttgaaattgtatatcaaaggccaggtgcagtggctcatgcctgtaatcccagcacttgaggaggccgaggtgggtcgattgcttgaggccaggagttcaagaccaacctggccaacatggcaaaatcttatctctactaaaaatgcaaaaattatctgggcgtggtgggacacacctgtaatcccagctacctgggagcctgaggcatgagaatcgcttgaacccgggaggcggaggttacagtgagccgagattgtgccattgcactccagcctgggcaataagcgcaaaaatccatctcaaaataatataataataattcactggaaattgtatatcaaaaaaggcaagagtcatcaaaatattctttttgactctttctgtaggatttaggagccctaaactccccaggagcttcactctttccaattttttttttacagaaaatctacagccaagtcattctgggaataaagtgagataaactttacagtttaaatctgaattcaggactgtgtttgaatatttcagtttaccagagaagaatggaacttagagcttaaaaacaagaagaagatatgaaaatatgacatcaagctgggctgcagctaaagcagtgcctcagagggaaattcataggcttcaatacgtatattagaagggaagaggctaggtggagtagctcacacctgtagtttcaacaccttgggaggccaaggcgggaggactgcttgagcccaggagtttgagaccagcctgggcaacatggcaagaccccatctcttatataaaaagaaaaaaggaaagaaaaatcaataaattaagcttctagctcaagaaatgagaaaataaatagtatcaaagccagagcaaattagagggaagaaacacagacaaaaacaaaaatcaatgaagtagaaaagaaagtagatattagacattttatttgttccaatttcctatattcaccaagaattctgagcatagtgggagaggggttcagtgttggtgggcctaggtgatgagagatggtttcctcaggatcaatgaggaagccccagacctgggataagtacctcagatcagaaaccgtacaggatacaggaactcttatgctctgggttgaataccagctaaagatgacatcaaaagcagtccctgaactgtgcccaccatggggtcattcaggcggggtgtgtgccatccatccgaacccggaaggacagtaggcaggttctgcatctggacacagcttccatctcctctgctgtcaccagaaagcactgactacaagttgtgagcagagagtatgaaagagtcattttgaactataaggtgggttttcaggttctcgcttggtgctgcaattctgggtgcactcggaagacccttgtgcctcacttcctgcctctgtgactatagcgagcctgctggttactgccagctctgagtcccccttgccacacaccccctgggctctatggtgtgtgcctttgatgacagtcgggaagaagaaagtactcattcatcacagcaccccctgaaagactgccaggaacttctgaaataacaatggatagccccaggaatcacagctgcagctggtctctcgatctcactgcctggagttggggccttcagggccgctgtgggcagaccctcctggtcaggtgttgaagaaggacaagcagtggtgagaactcagtttgcagtcagtctgggctccttgtcctggacagaggtaacactaggagtgagtgatgtaacaaatgcatcaaactgatgagactgcctgtgtaagcctgtatcttccatttgagccccagtgagtattcttgttgctttgcccagaggaaattctcagaacgtatgttaggccaggctggaggactaaactatgtgccaggggctattctaagtgttttcacgcagccctgtacatatgacactgtgccagtttttcagcagaggtaccgaggcatggagtggtattttgtccaaggtcacacagcttatgaggagagggaagcctctcggtatataactaaaggtaatggtaacacgtgaaaacaatgcttttacctgttcaggcaggagctgtcccacataccttaccaatccacctggggctccattggctcacccagaccaggccagtgtgtggcagcttcagccgtagattgctggggccacccttcctggcttgagcccccattgaagaaggtcacccggttgttcattcatcatagttaaggacttccaactgcccagcctcctgctggacaggaaacagaacccacctgaattccgacatcattctgctaaggacatatccagggacagcttgccctctccactccagcctctttaacaaccaggactggtgtgtcatctactttggaagggctcgttcaccttgctgatatcctctccctgcccccatactctggatatgagtgttgtttgttcccaacaatattctcctttgggagaagtctcggctcagtctcattgcctctctggggtctggcatggaaagcagtcaagagatgtggcctggccaggtgcagtggctcacgcctgtaatcccagaattttgggaggctgaggcggctggatcacctgcagtcaggagtttaagaccagtctggccaacatggcaaaaccccttctttactaaaaatacaaaaagtttgccaggcatgttggtgcacacctgtagtcccaactactcaggaggctgaggcacaagaattgcttgaacccgggaggtggaggttgcagtgagccaagattgcgccactgcactccagcctgggcagcacagcaagactctgtctcaaaaaaaaaaaaaaaaaaaaaaagaaaaacaaatgtgactgctcctagctgctgcttcagaagccagccctgaagctctgctggggtctgcccaggcatcttttaaagggattgcttactggccaggggctatacctgccttcaaacacattttgggtctaatatttataataaatgctgaatgtaggcccccttatttactttccaagccctggatattgttcttaggaccatgggttgcttaggtaactaccaccgttctaaaatggtggctgcagattttaacacgtgcaggccccagccttctgctttggaggagccatcacctttcagctcttccagcatcacccttcaaccacagactggaccttctcatcagccttttctccctccccaaccccaaactgggtgctgttcttgcaatttctccatttcctgaaaggagacaaaaaagtagagggttttttttagagggacggggctggtcacagatagggcagtggagatatcctcaaattacctgccaggtgacagtcctggggctggctcttctggtgtccccagctgccgcagggctctggggcccagtatttgctccctggggctggtaccaaccagggtgtggacttggggttgcctgtgctggcagtgggaggagagtcttgtgaccatcatcagcctagtctggcagagggacagagggagaggacaggtgactgctcgggtctcctttcagcaacaggacagtccctctctcttggctcctggaggaaccttcccttcattggtttctggatcttagggtctttaaatcctcaaggcaatgaacaggcatctgaggccataccaggagctgcagcagggggtggaagaaggaagagttcgtaggggcagtaagggggtaacaattccaatgaccaaaggccaaagctggctgggtcgggggcaggtgacttcctgaaggacaactgtaaaggtggctgccaagacaacccctccccaaagctctcaggccagacgtgatttgaattcagaagcgtttcgacctggaaaggtatcacagtgtgtataccatgtatcatgtgatgccctctgcagggtctggggccaccacacatggtcaaataaatgcatttgtatttctgccatgcaatgtatgtgtagccacagtaagtgggacaaaagctgtaagcctcaccttagttcagattaagcattggcgctggatgaagatacttggtttccagttgtttttttttttaggatttcagataagggatgggagcctgctttctaggtccggctctcctgccttgggggtgggctgaggargcatttttttcttccagcatggaaggcgcagcatatagataggtccatagatccctcttgtgcctaactatgtaagtagcaggtcctgatttttatttaataattattagtgttaccaaaatgatgctctgtcactttaaaagaaatcaaacaaaaagattgcttaaaaaaggagagtctcctacaccctctgcacagccccacccttcccccatcagtcagtccattggggtttctgtgcatttgcacacatacatacgggtaagcagtgtaaaactggttggctttgtggattttttttttataacacaattggggctatgctagacattactgttgcccactcctcctgctcttttccctggagctcttctaggtccaaacccacagagccctcaggttcctataacagggatgcagagtcctccagagaaaacggggtacaaatctctttgtaaggacctctttgaacccccaggagaaggtctctgaatttgaagaaaggatttaaggcccctccagaaacgggctgctttattacagggtcgttatcccctccccaaaatctcccttcctggggccctggagccatttttttaggagggagatttctaagatcacttccaaggaaagtttcctccgtcatttaaatacagttcagaaatgctgggtgagacaaagttaaacagcatggctccagctataacccccagacaagcaggggaatgactgaaggagaaaagatgtcctccagtagctgctggcagaggggtgggtgctggggcaggggaccaggctgtcttgctgttccctgggtgatgggggtggttttgatggtctaggaaagggcttttagtcttttttaccattgtctggtgcactgcccccagagttcctgcccgaaacgggtgtgcttatgtccttcccaggtcccctttactgactgctgcatccaccccccacctgctgggttggctgcccagttgagccaccctcagatgactggaggtgcctgcgaagctataccttttctcctcttatgtccaagtgttgccagataaaatacaggatgcccagttaaatgttaatttcagataaacaacaaatacatttttagtataaagatgtcccactcattgtttatctgaaactcaaatttaactgggaattctgtatttttgcttgtttttgcagagaaaaaacaaacaagataggtgtggtccacagctccctcttgtgcctaactacgtaagtagcaggtcctgattttttatttaataattattagtgttaccaaaatgatgctgtcactttaaaagaaatcaaacagccgggcacggtggctcacacctgatcccagcactttgggaggccgaggcaggcagatcatctgaggtcgggagttaaagaccagcctgaccaacatggagaaaccctgtctctactaaaaatgcaaaattaggccaggcgcagtggctcactcctgtaatcccagcactttgggaggccgaggcaggcaggtcatctgaggttgggagttaaagaccagcctgaccaacatggagaaaccctgtctctactaaaaatgcaaaattagccaggcgtggtggcgcatgcctgtaatcccagctactctggaggctgaggcaggagaattgcttgaacc

SEQ ID NO: 95369 - DNA, 128175 bp, Homo sapiens
gttagacatctaccactttcagttcaacaggtccaatcagcatgttattatcaatgtagtggaccgtgtagtagccttagcataatgtactgatcaaggtcctcgtggaaaagttgtgacagatgaaaataaactgcttatgatcatctctgctcattgaaatgaacagacaagagttactttggaagaactgcatctggtgggaatgttcaaatgaattttgacatgaacctcaaagaatttgatagacgtggaacagcatgagcaaagacatagaaataatttgcaagtgcaggatatagaaagggattggttgactaattgatacatttaaaagtatgtatctaggctgcgtgcagaggctcgcacctgtaatcccagcactttgggaggctgaggggggaggatcatgaggtcaggagatcgagaccatcctggctaacacggtgaaaccctgtctctactaaaaatacaaaaaaaaaaaaaaaaaaaaaattagccgggcgtggtggcgggcgcctgtagtccggctactgggaaggctgaggcagcagaatggtgtgaacccaggaggtggagcttgcagtgagctgagatcgcaccactgcactccagcctgggcgacagagcgagactccatctcaaaaaaacaaaaaaacaaaaaaaacagtattgagcacctactaaatgccagtgacttacttggctgagtttgtaaaagacagcagtctgagccttaaatgacagagtaaggaaataattcacaaggcaattataaaccacttgaaggtttttaagctggagagtgatatggttagggtggttttcatgaagattaatctggcagcagaggctaatattccagccaggaagaagcaatatgttatgacctagagtctgaactagagctgaactagaggatctgaactagagtcatgacagtgaaaaaggaagagaaggatgggatggagaaatgctgtagaagaggaaaatgcatctgccctgatatggaggccagtaggagagatgagccaaaaacaactccaaggctttgagcttgagtaattgagatcaatgaaagaaataatgaaatcgagaggaggagttggtagtaggcaagagataataataaggctgatattattacactgaaacaccttgagggcagggactgtgattgttttgatcatacttttgtccgcagtgcttggcattagatgaacactcaataaatatttgtcatgtaaaatgtcttatgctcaatttcagtaaattgacacgtccacccttaacaaggaagtataatgatccctcatttttgctattaattctattttcattttgacctacctaaggcatgtataaaaatataggaaatactatgatgaatacccatatatatgccaactactcaacctgaggaacagattttttttttttacagatattatcgctacagatattatctgtcttagtccattcaggctgctgtaacaaaataccataagcagaatggcttataaagaataggaatttatttatcatggttctggaggctgggaagtccaaaatcaaggtgctggccaattcagtgtctgatgagagcctgcttctggattcatagacggctgtcttttcactgtagcttcacatggtggaagatgtaagaggtttttctcaggcctctttttagaagggcactcatctcattcatgagggcagtttagtgaatcccaaagaccccaccccccaaaggtctcatctcttaatatcatcatcttggcacttaacattttaacatttgcattttggggaaacacaaacactcagaccacggcatttttattgtccgcatccctcctgaaggttccacttcccaaaggtcccatctcctgataccatccacttggttgttaggatttcaacatacgcattttggggagacgcaaacatagcattatcattattccatcttataggcaagaagcttaaaactgagagtggttaaataacttggttcaggtcacacagctaacacgtgccagagtcgtgatttgaatataggtctttctgccttcagaacccatgtttttcactttatctggtttgtgacattagggttattgatgggacatccaagtagaggtactcagcaggtagacagaaatataatatggcttgtaggaagagaatccaggactggaaatactgatacaggaattatctgcatccaagtgatggttgaaaggatagaagtgggaagggaataagaaaataagtgtcctgggtgcatgtggtgactcacgcctgcaatcccagcactttgagaggccgaggtgggtggatcacttgaggtcagcagttcgagaccagcctggccaacatggtgtaaacctgtctctactaaaaaatacaaagattagctaggcatggtggcagatgcctgtaatccagctactcgggaagctgaggcacagaattgcttgaacctgagaggcagagtttgcagtaagatgacattgtgcccctgcactctagcctgggcaacagtgagattcatctcaaaaaaaaaaaaaaaaaaaaaaaaaaaaggaaatgaaataagtgttctgaagacacagtcttgaacttgagttgtatgccttcctgaaggcagaacaaaatacaggagactactttgctgttttaattatttttaaatgttaaaatattttattataaaaggttttattcttatatgtaatcaacatataattgcacatatttatgggatacagtgtgatattttgatacacgtatacactgtgtaatgagctaatcagggtaattagcatatccatcacctcaaacattgatcatttctttgtggtgagaacattcaaagtcctcttttctagttattttcagatatacaataaaatattgttaactatagtcaccatactatggaataaaacaccagaacttattctttccatctaactgtaattttgtactcactgacccatctcttcacatacccacctctccccgattttccctagcctctggtagccagtattttactctggacgcccatgagatcagctttttaagattccacaaatgagtgggatcacacggtatgggtctttctgtgccttgcttatttcacttataatgtcctcaaggttcatccatattgtcacaaatgacagggtttcattctttgtggctggatagtattacactatgtatctctacaaaatgttctttatctattcatccattgatggacagttaggttgatttcatatttggccattgtgaatagtgctgcaataaacatgggagtgcagatatttcttcaacatagtgatttcatttcctttggataaatacccactggtgagattgctggatcgtacggtagctctatttttcattttttgaggaagctctatactgttttctataatggctgtactaatttacagtcctgccaacagtgcataagggttcccatttctttgcctccttgccagcattagttattgttagtctttttgatcatagtcagtctaattggggtgaggtgatagctcactgtggttttgatttgcattttcctaatcattagtgatactgagtattttttcatagacctgttagtcatttgtaggtctcatattgagaaatctctgttcagttttttttgcccatttttaaatcagactatttggtttttctgctgttgagttgtttgaattccttttatattctggatattaaccccttggcaaatgcgtagtttgcaaatattttctccccttgtgtaggctgtctctttactctgtcgtttcctttattgtatagaagcttttaaatttaatgtaatcccatttgtctctttctgcctttgctgcctatgcttttgagttcttatcccaaaaatcctcgccaagaccaatgtcttgaagagtttcccctatgttttattccagcagtttcacagttttgggaggaggctattttaaagccttgactgttcacagagtaaacactcttttcatgctgccctagaatttcccttttggctgctagaaaaagggcagagctgactgcaatccactgagtgcttttcctccacatctttgttatagggcaaggccaacagagacattgatacattgcatcattgagttcataaaaatcctgaagagaggccgcttttactttttgccaggcagaaccccaaatgcagctctgaccctatcatactgagtgactccagatgaggctgagtttattcagagatgtgttccctcctccacttataatatggtccatttgggtttaattacgctgaataggatcgtattgagtttgtaataattagcaataccatccctaaggaaacagggtttggtctcactgccaaatcagaagtttgccttgcctcaagagaaatataagtattctggaaaaagtcttgcaagtgtttttgataagaattcaaatctcctcaggccattgaatatcacaggattttgggaaaatgcccagttaaaatcaagtttgtattttaaaattctgttagcaaaagtatttgcaactgaattatctatgtgataaaagttgcataagaagaattctctagaagacgtttggtaacttgcaatcaagtagtttaggtcttgcttatggttaggtgtccctagagatctttaaaggcattaccaactccctctttaaaaaaatcacaaacacaaaggtagagacagtgcattattttgactctcaaattccctttccacttcaacatagtataggctaggctcaattcagcgttaaagttcagtggctttatgtgacaacaacaacgaaagtgttcttttcacttccaaaagaatcagctgtggctttccagagtagttcttctaataatgtaaactaatggtaaacttgttctaattgcctcccaaagcagtaggaggatgaaatggtagaagacgtgtgaaagagggatctggaattttaaaaataaattcaacaccgtattaattatttgctggaaggctgcaatgtgtccaggtattagataaaaaaacggtaagcagagtctctacggaaaaaaaaaaaaaatcacaatccagcctgaaagatgagtaagagcgaggaaaaaattgaacagaactatgtagaattctataaaatttcacttatggtggagcattgtactcttagggctgcaagaaaaaaaaaatggagggcgttcttcctctctttggcttttcccaagaggcctaacactaacaatggcaccaactactgttaataccatcaatagggaaatggtaccgcataatggatgctttgtatctctatctctcagttcagttggagctaaataaagagggcaaatgagcacccaacactgtgccaggggagaagtgtcgcctgcaacagtgaagtcgcaggtggatgtgagatgcctgacttaggagcgcgcttaccaaggcgctaacactgctgctattatttccacccgcacccccagcgctatgccggccgcgcctgggatgaaacacacacatcgagcctacaagaccgtcctgggtctagagtgtctgtggcagccttcttttctgccccaccctgaaatcctacctatcccaggacgccctagaaggaagcccagggacggtgtggagcagcctgtactccccatctctcttccaggaggccacacccaaaacaaggccctctttgtgtctcggagaacagtggccgtatagtgctccgccggctgcccctgttaagagagagcgagcagccctcgccccggcaaccccaggcagaggcgcgtcgcggcggcggcgcaggtgggcgcaggcgcggaggtgggctctctagggccgcgcgggagccccgggtccgcacgccgcgcgcggaacacctgggggcggagccaagaccgcgtcccgcccactcccgggcgcgaagccccctccccgcgcccctcccatcgcgccgcagaggcgcgcaggtgcgtgaggcggcgcccgcccgggaccctgcagacgtgggccagccatggagcacatccgcacgcccaaggttggtgacaccagsgcgggcggaggagggacgggaggagatgggggaggaggaggagrgatgctgagcgcgcgggaggccgactgctttgaggggcaccggcggagcctggaccgcgggcgagggaggagcaggcattgcctgagcatcccggggtgcctgcgagcccggtcgttctcttgctgcctcccaggcctagccttagctgctgctgggtctgacctcttggttttgggggagcgcagtggacacaagggtgaacgggagggaacctcagttgtctgctagtaactgggtgtagatcaacccttctttctcctggcacgaggctttctcttttagctgttggccgctcagagtagttgaaagggaaataagcctttcggtgacaggtgcaaggaaaacgagctaaatgcagagggactcctgcgcttggaagcttgttaaatctagggtgtcaggcccacccggctcggccttcccagtcagcatcctcatcctgagcgtagcagctgcaaggggccttacacagaacggataatcaatattcattgtaggttgaatgatggtgtgttcttgccttttccagtccgttttgttcgttagagaaaaggatgcagcttacggattcgtcacgcactgttgtgttttaacaacaccagcttttgctaattaacaaaagcaaatggtccctgatcactccagtaaattaacattggaaacgttgatcgctgtaccaaatcttcctcctcagttgtactgataatctaatttagaatgaaaatgatgatcgacgttactgcatgataaaaaccctaaacgagtgaaagaatatgcttaaaaaccctattggctgtctgttgttactaccaccacagctccttgcgtttttgcaggatgaacttccattcaaaatgtaggcccctgacaggtcaaagctaggtcagagtggccatagctcaggtggttccagggatcccacacrtttaagaggggtgggggcaattgctttatggccagcaagaattgattcctaaattttggaatagttcctgagtacctttttgtaaaagcagattaaaatgatctcatgtcattggaagaagaaatcttttagtttgctggagaatgtcagttccgacagyaaatttaaattgtattgattttgcactagggaattaagttgtcgcttcacaatcatgaaattgtaaacttagaagacaatgctacaaaccacagaataggtggctcaaagctttcagagtttaagtggtactaaataatttattccagaagggtgaatttaactcatggactctgcccttgccaagggcattcttcctccttccatgatgaagggagccgtttgtaaaagtgatagctgttgtggatattgatagcaagaatgatacagtgacatggcagtggatgccactttgttagagaatatgaatttgggggagtcaaggccttttctgttctatatacaaagccacctggtacaaagtcacgtgtgaacctgagttgcaagcagtgttcttactcttaaaattggtgtttatggataccctctaagcagtgcagtacttgaagtcagaaatccttatttatctggaaatggaaagaaattgggggaaaatggaaaattgtctgaagtgttactgaattgggtgagtcattaacatttgggataaagctggtgaaaaaaataagaaattacagaggttggatggatcggattcatttattcatttattttattctacaagcatttagaacctttcatgtgccaggctctgtgttaagtgctggaagcrtccaggaactcacaatctctaaggggaggcagttgtaaatatgtcagtgtatgrtagagacatgtgcaaggtgcagtgggtagagagggagactgaagagaggatcagctctgccctcaaggtcaagggaagccttcttagaagagccgtcttaacatggaaggacttaaggaggactaggagcattttcaacagtggtcatgtacttgtataaatatatattgtaataaataattacaaccctaaagaaactgaaaacaataacaatggtcaaagataaatgattccttgaggttaaataacatcctccttttgttttacatttttaagggcaaaattaattttcacagtctaaatgaaaaagagaacaacattacttacagagcttgcagagttaaatatataattgttactggtcatattcatctttattatttgcttccattatacttggtgaaactataggtaaatttccttcgatttcatggtttcatgtcttgggtttgcaaggagtgtatacaaagtttgtttttctggcccactgtgggtttatagcaatatttactgtgtgggtagtagagttttaagaggaaaagaattgtatgcatgtataatgtacagttgcttttctgtyacaatggaagtcattcactcgctgtagactgtgtaatatccatgacagcctctgtgttctgctttagtctctggagtgcagtttaaggagacagatgcacgtgcataatctggaatgctttgcacatatttctttctaggggtgcatgtatgtttaactgaagcctttaacagagcatatgctaagcagagtgcttcccttccagaatggttcctctagaggggaaaaaaaagttccaaggacaggctggtttgcagttgggttaaagsggggacaccaagtattacctgtactcatcccagtgaacttctaggtttctacttcactgtctgggtttccttaccactctgaaaacttgctggaagcttaggcataatttgggttcaagtgctgcttaattaaatgaaaagacttcagggctcctggaagtagcttgaagtgtktgtaggatttagtttggtactagattgaggcawatgtgtccaggatcctggtaagtgatttctactttatatgctttggtctttctggaaggcatttttcccacatgtgtaaatttgagttatgaaatagaatacgtgataacctccaaaacagaccttgcaaatgtcttctcttccttggtacacctaccccctagtctgaccctgactggtctcctgatttatttatttttgctcttttctaatccctttctcacagaggggcctggatgatgcttttatgtctcaaattgatcatgctacttccctgctaartttcctaggtggcttccctttgtacccaggatataaagtgrgaatcctcagaactgctcgtaaggccctttgtagactgagcccttcctacttctccagcctcgttttgtgacaatcatcttcttatccacaaccctctgatcacaacttgtcttcacagagttctccagtgggaccagttcttttctgcctcgggacttttgcactgctgttccatctgggggacgttagttctcactcttcacctggctaaatacctcatctttctagtttcaaattgtgatttctcaggctgttgtccaactcccccatctaaatcagatctgcctgttgtattttatcataacaccttgtgttttccccttaggttcctcattacaattgttaaatttatttgagttatgttcatttaatgtcaagctcccctgcttgatggaagtcctgtaatggtagggattatattttgttcaccctttgtatctatagcacctaacacagtgcttgggaccaactaagcatgcagtaaataaattcagaattgaattagtgaagaatgcataattaattcattactttttgtttgtttgtttgtttttgaggccgagtcttgctctgtggcccaggctggagtgcactggtgtgatcttggctcactgaaacttgactccrtctcctgggttcaggtgattctcctgcctcagcctcccgagtagctggggctacaagcacgtgccgctacacctaggtaatttttagatttttagtagagacaggggtttcactatgttggccagactggtcttgaactcctgacctcaggtgatccacttgccttggcctcccaaagtgctgggattgcaggtktgagccactgtgcccagcctcattactttatttttaagaatttgctttattaatccaggcctcttgtgcattgtacagttgtatacaatactacttgacagtgttgtggatcttatagtattagtgtgaaatatttgtggatgtcagtgtatctgacataatatgtgagatatatatgaaacatattttgcaattatatatatttaatgagataaaattcaaataatgtaaaattcaccatttttattaaaatgcacaattcagtggttttagtatatttacatattgtgcagacatcaccaccatctggttctagaacacttttgtcacccccaaaagaaatccattagtagttagcccattagtagttaaacttgatgatgcccatcaagttacccattagtagttaggcttgatgataatatcttatacttctctacgttgaatattatctcattgaatttagacttttgctcatctcttactcttttttggatgctgatacacatctgctgttcctgtcagtttggtaccatccactatttaatcagcttgctttctattacctcattcattatcttayccaagagcagaagtgacttcttaagccacttgcccccatctctcaggatcttgatcctaatagcagattcagtagttctctcagtttgatgtcatctagcagttgataagtttgtccttcatcacgtcgccaaagagctcatcaaagaaagaaaggaagtcttctgaaataatgacggtgaatccatgatgttcttgctgattgatggtttccactttttaggttcatacaaaggtccattaaataactcattttagaaccctgccagaattagtgttgaactcaacaacttataattatacaattctgttttcaccgtgggcaaatagtgatctcattttcaagttctgtctgtgatagacggacatcagcagatccatgaggtttgccttctcttgatcattcactgtcagtatactgtcagctccaagggttatctcttcttttatcttcctttagcaaataataattttctggttataaaagtaatatggactacatgtagaaattagccacttttaatatttgggtacattttcttctggtgttttttttctttgcgtgcactaaacattgtttgcttagaaatttaggatcacccagttcaattttgtagtttgcttctttaaacgtaccatatttcagtgttcaaaacatacttttagaagrttaygtggggcttttttttttaatcctatggaaatgtcmttatatttaccacttccccattttagggctattataataatgtcctgatgaacatctcattattatctgcatgtgatttcttccctagaatagaaccctagatggaattactgtgtcaaagaagatgaatagttttatagttggtatatattaccaaatgactttccgaaaacgttatgtcatttaacactttcattaatagaatatagactatgtttcttactataccattccattgctttcttatttaaggttattttttgctaatttaaaggggagaatagcacttcattcttttagtgtatttttttttaccagcgaggttgaagtttttccaaaaatatgtttactgaccattttgttactttttgaattatctatttatattttccccattttaataatgggtgatttagtgtgtgtgtatagtgtgtgtatttcaatagctttattgaagtataatttacctagcataaaatttacctttctaaagtatgcaattttgtgattttttggtatattcacagagttgtaccaccatcatcattatctaatttcagaacattttcattactccaaagagaaacactatacccattggcattcagtctccatttctccctcaccccacccaaggtaaccactaaatatacattctgtctctatatatgtttgtttttctggacattttaaatttaatcatacaatatgtggccttttgtgacctcttcttttcacttaatgtttttaaggtttgtctaagttgtagcatgtatcagtacttcatttcgttttatctgttctgtggctaatcctgcattttgtttatacatttatcagttgagggagattttttggcaattatgaataatgctgctataaacttcggtgataagtttttgtgtggacgtatgtttgtatttctcttggatagaatttcatttctctgagaacagaatttggtgaatcgtatagcaactttgtggttatcattttaaggcactgccaaattgttttccaaagtggctgcactatttcagaaccccgacaataatgtgtaagggttccagtttttccatatcatcactgacacttgtcattgttttttattttagccattcaggtgggtgtgaagtggtatctcatcctggttttgatttgtgtttttctaatgactaatgatattgagcatgttttcgtgtgcttatcaaccattttcctgtcttttttggagaaatgcttattcarttcctttgtttctttcttgagttatttttattaaattattgggttgcaaaattatgtaatctggatacaaatccttagtcagttatatgacttgtaaatgtttcctcccgttctgtaggttttcttttcactgttttgatgtctcttgaagcacaagaagttttgaattttgatgaagtccaacttattttttcttttgtcacttgtgctttttgtgtcatatctatgtatattttctagaaagcctttttctgattataaaagtcatacattacagaaaatttagttcaaaggagcagaaagaaaatagtaattttgcataatttcagatatttgcataaatccagaaatatttgcataaatccagaaaaaatgctgtgtatatattaacatttttctttacatatataaaacagtktaatttaaaagaaaatcatgtccattttctctgtttgtgtgtgtgtgtgtgtgtgtgtgtgtgtgtgtgtatagttttggggaatgagaacctgttttttaatatgtcaaaatatttttctcattttattaaaccttctgaaaagtgattttttttataaccacatagtccacattrtgatgatgaccatacattatttagtgtctggaggcaattctccatggccttttgcagttttgcacttttgttctatactrtcttttcaaggatgattttatagtgaacagccttgaaagagaggaatagcttcttccttagtagcagagggcatatttatttgctgtcyggggtaataaagataatgtcatcctcacaaaggattacttgcatcctgtttatgtgatgggcatttcttaaactctgagtctctaaagttcctcatctaggactcagagccctgctctgtgcagcatccatatggactgctccatattgccccttagacttgggagggggagcgtggagagtcaatatgaagataaagcttctccctcctggtgtacaggaatacgaatgtcctttgtctctgacccagaagtcttgtgtcttctgccagcatatgaaacactgggaggctacttgttaggttgtaagcaggttcaaatttcaaacacttcctagttcttgacagtgaatcccctagtatttgatatttaatttatctctatattgtcactataataaataactgataggctgggcgcagtggctcacgcctgtaatcccaacactttgggaggccaaggcggacggatcgtttgaggtcagaagttcagggccagcctggccaacatggtgaaatcctgtctctactaatttacaaacctgtctctactaatataaaatacaaaaattagccagtcatagcggccagtgcttgtaatcctagctactctggaggctgaggcaggagaatcacttaaacctcggaggcagaggttgcagtgagctgagatcgcgccgctgcactccagcttgggccacagagcaagactccgtctcaacaaaacaaaacaaaaacaaaacaacaacaaaacaaaaccaaccaccaacaaaaaaacctgataaacatcaatgtatttaaattgttgggtaagtctctattacctgagattaagtttctcaggtatcttttctggtttcatttctatatatattttaaagatttttgatgctgtttgtatgttttcctctaggattgtgtctgctagtatggcagaggaataccctttaaaaaattcttgagaattgtagatgaagtatggtttctcatcaatttatgtttgtttactgttgagattgaatttattttttgcaattgtttgtaacaagagcaatacaataatagtactgatagtactgataagatccataatatctataagattcatagtacctggatcttattaagaaaataatttgtatatctaataggtacctcaatttcactatgtcccaaactgaactaattccctctcgcttcacacccaattttctcctcttgtactctttccaatctcggcgatccaccgttccagtgctggagccaataactttggagttatccttcaatcctctttttayctcctcccatatctattccaatagtaaatcctcaccttatccaggttatcccacctccgttcctaccaccctattctgaaatactgtcaactcttgcctggtcccctttccatttttgcsactcccccaccagtttatttttgccagagatactgttaaatataatttggagcttggacttctttcgtgggtctcctcacacmgaaagcatctaaactggaaaggaaacagtcaaattatccttgtttgcagatgatatgatcttatatttggaaaaacctaaagactccaccaaaaaaagattggaactgacaaagaattctgtcaagttgcaagatacgaaatcaaaatacaaaaagcagtagcgttcatgtatgccaacagtgaacaatgtgaaaaagaaatcaagagaccaatcctatttataatagctacaaataatataaaatacctaggaaacaatttaacctaagaagtaaaagatctataaaaggcaaactataaaacgctgatgaaagaaattgaagaggacacacaaaaactgaaaagatattccatgttcatggattggaagaataaatattgttaaaatgtccatacaacccaaagcaatctacaaatttacaatccttatcaaaatgccaatgccattcttgacagaaatagaaaaaatcataaaagttacatagagtaacaaaagacccagaatagccaaatgtattctgtgcaaaaagaacaaaactggaggaatcacatacctgacttcaaattatactacagagctaccgtaaccaaaacagtatggtattggcataaaaacagagacacagaccgctggaacagaaaaagaaacccagaaacaaatccacacacctacagtggacttgttttcgaaaatagtgccaatgacatatattgggaaaaagacagtctcttcaataaatggtgcttagaaaactggatatccatatgcagaagaatgaaactagacccatatatcttgccctaccaagttaaaaagcttcttcacagcaaaggaaacaaccaacaaagcaaagagacaacccacagaatgggagaaaatatttgtaaactatccatctgacaagggagtaataaccagaatatataaggggctcaaacaactctataggaaaaaaaatctaataatctgatttaaaaatagacaaaatttctaaatagacatttctcaaaggaagacatacaaatggcaggcaggtatatgaaaaggtgctcaacatcaggaaccatcagagaagtgaaaatcaaaagtacagtgagatactgtatcaccccagttaaaatggcttttatccagaagacaggcaataacaaatgctggcaaggataagaagaaaagggaactctcatgcactgttggtgggaatgtaaattagtacaatcactatggagaactgtttggaggttcctcaaaaaactaaaaacagagctaaaatacaatccagcaagcccactactggttatatatgagtatgtccaagagatacctgtgctcccatgcttatggcagcattattcacagaagtcgagatttggaagcaaactaagtggccatcaacagacgaatgtataaagaaaacgtagtacatatatacaatggagtactattcaggcataaaaaaggaggagatcccgtcatttgcagcaacatggatgggactgaaggtcattgtgctaagtgaaagaagccagctacagaaagacaaacttcacatattctcgcttatttgtgggagctaaaaattaaaacaattgaacacatggagacagagggtagaaggatggttatcagaggctggggaaggtagtggggtctggggcaggtgagggcggatagtggcaattgttaacggctacagaaagtagttagaaagaatgagtaagacctagtatttgatagcacaacagggtgaataataatttaataaataataataatttagcattttaaagtaactaaaagagtataactggattgtttgtaacacaaagaataaacgtttcaggagctagataccccatttaccatgatgtgattattacacaacgcatgcctgtatcaaagtatctcacatactccataaatatatagacctactatgtgctcagaaaagttaaaaaaatttttaaaaataattttccagaattttattgatagactgaatttattatgtcttgtttatatcagactactttcaaaagaatttgagacctttgtaaagtatacatgatttaaaaaataaccctataaaatatgttttgtattgtcattccatagttccttaagataaggaacttatccataagatccataatatgcataagattcatagtacctggatcttattaaaataatttgtatatctaataggtacctcaatttcactatgtcccaaactgagctgattccctctcgtctcacacccaattttctcctcttgtrctctttccaatcttggcatttcacccttccagtgctggagccaataactttggagttacccttcactcctctttttctctccttccatatctatkccaatagtaaatcctcagcactctacttttaaaatatatccaggttatcgcacctccattcctaccaccctgttctgaaatactatcaactctttcctggtccccttttcatttttgccgctcccccaccagtttatttttgccagagatactgttaaatataatttggagcttggacttctttcgtgggtctcctcacacccagagggaaattctatacctyatctgccccttctccctctcaaatctcatttcccacaactaccccactccctgttcttggayctcactgcttgaccactactccctggatacccaggcacactcctttttcaacacctttgcacgagatgtttcctgtgcctggaacttgctttccttagatgtgcagayggtttgctcccacacttttttagatctttgctcaaatgttattttatcaagaaagccaayttatcatcacatataaaakaacaatcctaactcacctcaaccaacatactttacctctttatatttttctccatagcattttttctgtaacatacatacacacctacacacatacacataccacacacatgcatacattccgtatcccccgaattgcaaaggtacctggcagctagctgcatttatatacaacactgaatgaatgaatatggattattaggttctataacagaccgtgtgttctgtacacccaagcctccatgcaagaccaccagacttcaacttttgctagacctgttaaaagtgaggatttcatgaaatgtgggcgatttttgaggaatgtttaatcacaacttctgtgattacttggcttagacaatctattcttacttggaaaacttaaaaaagaaatactgccacatctacacttttaagtggattgcttcattccagcaaacttatcttatcagccttgtcttttgagtaagagcgtatttgattacagtgactacctcctcaacagctgttaaatattgtgcaataaaagtctgacaattagataagaatccatctttaaaccggtctaaatcaaaacagtactgaggtttgttcttttgataaaatcaaattgcaacgacaagaaaaaccaagggtaacgcttgataatgtagaggtagcccattactctagaggcagggaagcacacaggactccagagggcctggagatagcattgtaaggccgctgggatcctaaactgcattttctttcctgttctcaacatcaaaacgcaaaatggtagagttgttaagaacacacactctggggccacaatgcctggttttgaatcctcactctgcctcttacagctcactaacttatttaactttagtttcctcatctgtgaaatggggataacaacagtactcacctcttagggtgattttgaggtctaagcgtcttaataaatgtgaatctagaatggtgcctakcacagtagctatagtgttatttcagrattttcttttatcagtactatcggtactattgttgtattgctcttgttataaataattgcaaaaaataaattcaatctcaacagtaaacaaataaacataaattgatgagaaaccatacttcatctataattctcaagaattttttaaagggtattcctctgccataatagcagatacaatcctagagaaaagcatacaaacagcatcaaaaatctttaaaatgtatatagaaatggaaccagaaaagatacctgagaaatttaatctcaggtgatagagatttacacaacaatttagatacatggatgtttatcagttttttggtttttttttttttgagacagagtcttgctccattgkatatatgtactatgttttctttatacatttgtctgktgatggccacttagtttgcttccaaatctcgactacwgtgaataatgctgccataagcatgggagtgcggatatctcttggccatactgatttcctttcaggtaatgtgattcctccagttttgttctttttgcacagaatacatttggctattctaggtcttttgttgttctatataactttcaggattttttctatttctgtcaagagtggcattggcattttgatagggattgtattgaatttgtagattactttgggttgtatgggcattttaacaatatttattcttccaatccttgaacagggaatatctttccatttttgtgtgtcctctttaatttctttcctcagcgttttatagtttgccttttatagatcttttacttaagttaaattgtttcctaggtattttatattatttgtagctattataaataggattgctttcttgatttctttttcacattgttcactgttggcatacatgaacgctactgtttttygtattttgatttcgtatcttgcaacttgacagaattctttgtcattttgaatcgttttttggtggagtctttaggtttttccaaatataagatcatatcatctgcaaacaaggataatttgactttttcctttccagtttggatgctctttattttttttttctcttgtctgattgatctagcttggacttctagtactatgttgaataattgtagtgacaatgagcatgcttcctgtgttccagatcgtagacaaaaggctttcagtttttccccattcagtatgatactagctgtgagtctgttgtatatgtcttttattatgttgaggtatgttccttctatcctcaaccctcggaagttaccagaggcttgcaaatactatcatccattattttaaattgatgatgccctagctctgattgcttgagcaaacagacgtgcaaaaggaaaactaataaaaactctacactttcacttcatatccccttctttttaacttttttgttgcatctmttgatgtcttattgtactatgccttgaaaagttgtagttaccattttttattggttcatttaatcttttattggttatttaatctttctacttaagagtagttcacacaccatagttctttaggttgggacgttctttgtggttatcgctttgaatacactttatattcccatttctttctctacctcctctttaaggccagtaactcttagatttgcccgtttgaggctttctggatcttgtaggcatgcctcattgttttttactcctttgtgttttgtcccctctgactgtgtgttttcaaatagcttgtcttcaagctcactaatttttttcttctacttggtcaattctgctattaagagattctgatgcattcttcaatatagcaattgcatttttcaactccagaatttctgcttgatgctttttaattatttgaatctatttgttaaawtcatcyggtagaattttgagttccttccctgtgttaacttgaatttctttgagtttcctcaacactgcaattttgaattgtctgtctgaagggtcacatacctctgtttctccaggattgtttcctggtgccttrgttcatttggtaaagtcatgttttcctggatggtcttgatgcttgtgsatgtttgttggtacctgggcattgaagagttaggtatttattgtagtctttgcagtgtgggcttgtttgttgtcatatttattggaaccttccaggtattcaagagccctcgggctttaagcgaacgtcggtggtggcctgcagaaaccccatgttttgcagactcayggaggtactgccttgatggttttatataagatcctgaagaattatttggattatcagagagatagtctttttctcttcctttattttctcccaaacaaatgtattctctctttgctgaactatctggagctgggagtggggtgacacaagtacccctgtggccaccaccactgggactacactgggtcagacttgaagccagcacagcactgggtcttgcccaggatccactgtaaccactacctggctacttccaaagttcacttaaggccctagggctccaccattagcaggtggagaagccagttaggcatgtgtccttcccttcagggtggcgagttcccccaggccctgggcaggtccagagatgttgtctgggagccaaggattggagtcaacatccttaaaaacgtacctcatgttatattctactgcaggaaagctggccctcaaaacacaagacaaagtctgtcctgctcttccctctcctttctgcaggcagaggagcctcttccagtagccaccactaccactggtccatggggtttctgcaggccaccaccgacgttcgcttaaagcccaagggctcttcagtcagcttgtggtgaattctgcgaggcttggagcccacccttcagggcattgagctcccctctagcctagggcaggtccagaaatgatgtcaagagccttggcctggaatcagggaccccaagggaccacgtgatactctatcccgctatggctgagctagtacctgaggtgcaagacaaagtgcccttaacttttccctctgtttttttcaagcacarggagtctctctccatagcctccacagctgcaaatgtgctgggctcccctgaagccagcacgcctcagtctcacccaaggcccastgtgtactacctgggtatcactgctcattattcagggcccgagctcttttgtcagcagatgatgaatgccgctaggactgggttcttctcttccattcggcaggtttccttctgtcccaaggtgtgtctagaaatgtcatctgggagctaaggcctggaatgggggcctcacaactaactctgcctggtatctgatccttttgtagctgagttgttaatgaaggtgcaagacagtcctttttactctttgctctcctctcctcaagcagaaggaaggagtcacttccagaggcactgcctggggttgtgagaggggtggcacaagcattcccttagccaccccagcttgtrtctccctaggccacacgctaccccagtccgctgactctaaagccagcccagcattaggacttgactaggagttgcagtcctgtgtcccggattgcctttcagatttaccgaggacctgggagcactttagcctgcagtagtgaggcttgccagaattcaagttctgaccactgggataggcaatttccctctagctaaggctggtccacatactccctgagcccaacacatctttgctttgctatggtagggcagcactgagttgaatgccaagtcctcaagtagctatgctctccttcccgcaagtgcacagattctttttccacgtaggagaaagaatctgtgaacttagtcactaccaggggatgggggacaggttgcctcggcaattcaagactgtctttgttacccttgtcagtgcctctttcagcaatacaaagttaaaagcaggtactttaatagctcacctgatttttggttcttatgatggtgcttttttgtgtgtagttgttaaaacttggtgttcttgcaggcaggatgatctgtggaggcttctatttggtcatctctctttccatccccatagtttgtctggaattttttttttttataaaccgtatgttggkatgatcagccatatctcctgatggatattattatattatttaacattgaatattttattctgtatcatgtacataaatatacttatttctggtagtttaatctttgttctttgtcaccttcccctatcatatctgttaagattgaggtcatagactctaaatacatttcccagtatgagaagaatgttgtatttaaaagtatactggatggctcctttgtaatgtgaaagattctgctttgctttttctggtttctatgcttaggtgtttacatctgtttaaaaaagcaaacaaatatacttgtatacttggatacttatgtgcaacaccacagccaacccagtttaaacagtgggcaaaggacttgaatagacatttctccaaagaagatatacaaatggccaataagtacatcaaaagatagccaacatcaccagccattagggaaatacaggtcagaaccacaataagataccactttatacccattaggatgactattacttaaaaagaaagaaagaaaacaacaagtgttggcaaaggttgtggagaaattggaacccttgtgcattgttggtgataatgtaaactggtactgctgctgtggaaaaccctttggtagtttctcaaaaagttaaatgtagaattatcatatgactcagcatttccactcctgrgtatataccccaaagaattaaaaacagggacacaaacagatactggtatgcccatgttcatagctgcattattcacaatagccaaatggtgggaacaatccaagagtccatcaacaaatgaacagataaacagaatatgatatgtacatgcaatggaatattattcagccttgaaaaggaatgaagttctgatacatgctacaatatgggtgaaccttgaagacaytgaagacaagtgaaataagccagacaaaaaaaggacagataatgtatgattccacttacatgaggtatatagaattcttagaaatgaaaagtaaaataaaagttatgaggaactgagggtaggggaaaataagggtttttgcttaatagttagagagtttttgtttcaggggttgagaaagttttggaaattgatagtggtgatggttacacaacagtgaatgtacttaacgccactgaattatacgcttaaaatgctttaaagtatatcttttatgtgtattttgtgacatttaaaaaaaatacatttcctggcacataaccactgctcagtaaatacttactgactgaatgaatttgtcraatgaactaatacttaatttggcaaatgtatatcaactattagcatgacagtgggtggcattgtgggtctgatgtcagacactcagttaaaattcttactctgccacgtatatatatttttgattttggcataattaaaaaactaacatatttacatattataaaattcatcatttaaaagtatacatttaagtagtttttgatgtattcacaacattatgtaaccatcactactctctatgtaatttytgaacattttcaccaccccaaaaagaaacctggtatttactagcagtcatccctcctttctctctccctacaccctggacaatctctagagatttgcctatccaggacattttatataaatggaatcatacaatttatggtccgttgtgactggcktctttcagttaagcgtaacttaagattttcaaggttcatccgtgttgtagcatatatcagtacttcattactttttattgctgaataatattccattgcatggatataccccacatttgtttatgcattcatcagttgatggatatttgagttgtttctactttttattgggaatagtgctgctatgaacatttatgtataaatttctttgtgtgtgaaaatatgttatcagttctcttgggtatatactcaggagtgaaattgttacatcatatgttaatgcatgcttaatctgttgagaggctaacagttttccaaagaggctgcagcattttatatacctaacagtgatgtatgagggttccagtatctccatatcctcaccaacacttgttgttatctcttgattatagctatcctaatgggtgtgaagcggtatcttgtggtagtttgagttgtatgyacctggtagctaattatgttgagcatctttttatgtgcttattagctattcatatgtcttctttggagaaatatctgttaagattctttgttcattttttattttattatcttcaacgtttgtgttaagtcccaggttacatgtgcaaaatgtgcaggtttgttacattaataaacgtgtcagagtggtttgttgtacagatcatctcgtcatctaggtatgaagtccagcatccattagcttttatttctgatgttctccctcccctcgcaacccctctgacaggccccagtgtgtgttgttccccatgatgtgtccacgtgttctcatsgttcagcttccacttacaagtgaaaacatgcaatgtttggttttctgttcctgcatttgtttgctgaggatgacagcttctagctcctgtttgttttttaaattgggttatctgtctttttaatgttgagctgtaaatgttctttatggatttggggtactaaataattcgatwtgtgacttgcaaatattttctttcattctgtaaggtgtctttctcattgttatctttgaaatacaggtttttaatactaatgaagtacaatttatctattttcctktggttgctcatactttaggtgccatatctaagaaattacctaatccaaggtcacagagatttacactgtttaggtctttgatctatgttgagttaatttttgtatatggtgtgagatagaggtccaaatgcattgttttgcatgtggaagtccagttgtcgcagcagcatttattgaaagtaattttcctactccatttaattgtcttcatacccttgttgaaaattgattctttatagatgcttggatttatttctggactctcagttctattcctttaatatctttgtctatccttagccaataccacacaatcttgattattatagctaggtatatgatcttgaaagctttggttttctcacgtatagcttgttagagactaaacagaatacacttaaagcactaaataacatggcacatagtacattttagctgttttcaagttatttttataatcatcctcattgcaaaaggatgtggccacaagtttgtatgctgaaagaacttccatgaaatttgagaataaaaagaattttctaaatccaaacatttcatttgacctactcattcacctccctgctgcacaatgagtttcaatattttttcctctggaggaactctgcaaagaatgcctccctgtaacccaactctagttcacacccagactttggagcatattgttctttaataaaaacattgatctcgtcaaacacatggattttaggaaaggtgtcaagtttcgctcaggaagcctctgcagtggcctatgaggcaaagcctyagtgacatcgccctagattcctgaaagagagtctttttggaatgaaagtatggagaagaaagtgggaaacacactttggctttttagtggaggaaagtaagagggttacatttgtgctgccatgaaagctttaaaaagggatgcaattttaaggcactgtacaccttgaaacatttatatgcttgtgaggaatgataaagacatgaaactgtaacctcctatgtaagtctacttgagccattatttatttatttattagtaaattttgacatttccctattgaactcacattattaactgattaggtttggttatcacttctgtcttacatctggaggaaaaacagcatttggaatgcttgttttcacagatgtacatatattttctcatccttatttaaagcttatttttattgctttttttcccattctgaacaggacaagctgtgaagtaygcttgaaattaaacctcttgaccagacacccaagattccgtgactttgtccgtgtgatggttcagttttatattctcatactgcactcagagggagtccaagaagctcattttgtaccatatttcttaggccaggaaaagtctaaactatttttcctagtgccctttcccctggtggacagctagttgaagcctctgggagtaaaagtacttcccaggacataaacccaacccttcctcccacaaccatttaaaatggtttaaaaataacccccacttaatgttttgtggcaggctatgacaactttataaaaattgtatgtttacttttctcctctttttcatttattaaaacactgcttatcatagattcccggagaaataaatttattgccaagctgtgaaagtaaattttactccttagggcctgtagcaaagcacacattacttagaacaaggtacagttgatctgtgcaagttgcggtgaactgttcacccagtttgagtagtggtagtttaaggaagggattctgccttttaagctaaacggatacatttaaagaccctattgatgcatatatcctttcacttgtacattctggaagtattccttgagtgctttctctatgccagttttaggccctggagatccagtggtaaataagacagacagtggccctagtttcatggaacttacagtgtagtaaagaatttgtaaaaattctttagtaaaaaaataatattgcagttctttaaaacaatatatatgtcatcactgtaagctaagattttggaaaatctcccatttttaaaagattttttcccagatcctgccaccctccccctgtaaaccttccagttgcttcctaccctactcagagtgaaagtcaaagtcataacgttgtcccggcaggccctacaaggtttgtccatctactgggcacctcatctcctacttgtttcccctcacagatgctgatccagaagtcctcacgtcctcgtagacccttgaccacatctacctgttcctgcccaggstcttgtcatttgttgttccctctgcctggaatgctctccccagatacccccatggctggctttctcactcattctggttctctactgaaatatctaattatgttattagagaagacttccctgggcacctgatatggtctggctctgtgcccccacccaaatcccatcttggattgtaatctgaattgtaatccccacgtgttgggggagggacctcacgggaggtgactggatcacaggggtggtttccccttactactctggtaagcggtagtgagttctcatgagagctgatgatttcataaggggctcttcccctttcattctgtacttctctctcctgctcccttgtgaagaacgatgtgtttgcttcctcgtctgccatgattgtaagtttcctgaggcctccccagccatgcagaactgtgagtcaattaaacctctttcctttataaattacccagtcttgggtactatctttatagcagtatgagaagggactaatacagtatcctgctggccctcctcactcaactgcttatcctgctttaatttcctctctaggaatcttctggcacacatacgtggtgatacagttccaccatatcttatrccaaattgtaatccccaatgttagcggttgggcctggtgggagatggttgcatgatgggggtggatttcatatgaatggtttagcaccatcgccttggtgctgctcttgtgatagtgagttcttttgagatctggttgtctaaaagagtgtggcacctcctccctcactctttcttgttcctgctcccaccatgtgagaagcttcactccccctttgccttacaccatgattggaagcttcctgaggcctccccagaagcaaaagccgctctgcttcctgtacagcctgcagaaccacgagccgattaaacctcttctctttataaattacccagtgtcagttatttctttatagcagtataagaacaggctaatacatgagggatttcttttttttttttttaacatattccctgtttccatgctttcccaccttcaagcagaaggtacaaactccatgtgagcagtgactttatcttcccaattcatgtgcccccagcactcagaacactctatgtctggtacagagtaaaggtgcacaataaatatttgttgtatgaatggataaaggaaacggtttaatgtgacttggtgtcgaagcttcagtatctttcaatatctttcaacaaacatgtttttttttctcctccagtattctccattttagttatatgtccctacttttcacatttgcagatgaagttttgttttattttttccccgtctctgctctgtttcctgtatgtgcaacatcttccacagctgaatctttcctaacttcctgtctgaaaagtcaaattcaataataaagcattctgggttaatcatacttaattctacctataagccatcacataatttatttttaccatagtactgttaattttcattcattgaacaaatacttagcatctgtgcttggcatcaggctacaaagataggcaaaaacattagtgccaatcttcaaggatcctgccaccgagggttgctgtgatgttctgaagtgtgatcattgttgtttcaggaagccagtaagccaaggaccgtgtgtctcttttcctttcttcccacagttctagtgtgagtgtttgcctagcattgttcattgtgctgcagggaatattaggaataaaataacttgggttcccatgagaatatgattktggtaatggttagagtgtacagtaaagatagcgtgtaatgaagtagtgtaggataagtagaaaccaagtagtgatcagagaggtcacagcaattcagaggacagtgaatgatcccagtggactggggtagttgaggaaaggtgttattaaggaggtggatcttgggtgtcaggctggaggtgagtatgttgcacttggtgagtggcagtgtccttttcttactgttcttggtgacctcagagtgcactgtgrcaggcaatyatgcagctttgcttattgggcctcagaagaggcctccacatcattgggtctgcaaggcattctgctttatactcatttcccagagtgggaatgatggacactttagggccggactgtaagaggagaaagagaaaaatatggtgccaattatgcagtctgtccttgggggcttcgaagccgaggagtgaggcatgggaatgtgtaaatgagctggaacctggccttggcctgggtggacagagtgtacccctttgtcctctggcactggtacttgccaggggttggtgggagggagagcatgagacttgggyctctgtgcctgggctttctcctccctttggttagtaagttctatttggcacaacttgcccttggaaaaatatttccccatagttcccaaagagctatataagtagatggtttcgtcctttgctgttagtgcctttgtcaaaaataggtcaaattcagaatcattttagaattttagaaatatcgttaaaggaaaatcataatcaaatgagcctctgacttcctgtattgcttcaaagcaaggtcttgttctccctatactagtatatgtttttaaaatgactttattgttttgaacccaactatctttagtaggtcattccatacatttactctttgggatacaaagcatcatgtattcactgagttacaaagaaccagcatctgtcctgaatttatttttcttttaacctcttttttcttcttttcctcttctttatgcttgttgaaaatggtatttttggttggggttattttaaggtggtgttgaaataaatcctgggactttgctcttgttcaacagtgcatgttcttttaagcctacatatccagggtcatcctaccaaaataaattatatgggccctttgcaaaattctcaagtgcctgaatttttatttatgagcgttggctgctggcataatgtttgtaatttctcctgagcaaaaatgggcacttttttcttgttctgccttttctaagaatttctatcactcttacttcttacgtagcttggctgtgtcactattttagcttgtatattcccttaggagaatttttaaaatttccttaaacgtcagtcaaatctgctgttttaacaaatgtataggtagatggaactcaacaacctgcccatttataaacactcagscttatccaaaatcatcaagaattttttttaccttgacctaaactagatacaataatccttatctgaataggaagtttgggtgatttatttttctccttttaaatggaaatttctcaaagcatatttttctctgatcagtataattttacgtataggaattagagattttaggtggctccaaaatctgtagaaatgtgtgtatcaagtaccccaagtacctcccatgtggaggaaggacttaaattttctgtcaaattgggaaatagatacattcttcacttgggacaccgatatactaacaatccttctgacatgcttagaattacaagatctttattcatttttaatgtctttctctgcaaccaacataacaaaacagtctagatatattcatttatcctttcccccttactttacaaagttgtatcaagattactggggtgaatttttctaccagtagctcccctggktctgtctaaacttcttggattgtgagtctatttgaaactgggtcttagtcttcaaatctgtacctccgtacttcacgtaacctggctgaaactggctctgtccagagtttgaagtatgatgatatgggctctccaggctaaatagatattggtagaggaagaaacagatgctggtacatcagaatacctgggwtatctgggatatcggaatacctgggatatcttcacatgcatagatgctggtacatcagaatacctgggaagaatgatcagtgatatctatcatatgagactggtgactgctttgggaatgaaaggaggaacctgtttagccggtaaggtggggctaggttgtggaaggcccggttagcagcagtggggagatactgtagctctgaacrgagagtgacatgatcagggtgtatctagagtgactactgtttgagtgccatcctggggactagactgtgtggcaggatgtgctgggctttggtcacccatcatccactctcccaggctccctctgaggagccatgcctgctctatgctcagtttgtatgtttttttggtktgtggcgtactgccaatccagctacccaaatcatgtcatttcatgaccacactgaatggtttaggggtaagcgtgtgaccaagtgagatgcartgatacttggcttgggctccaagaagggcagctggcgcttttcttcatggccatggatgtggcaggagatgggacagggtcaactggagccatcatgagcagagcctgctgagagccagcaatgagggcccagccaagagtttgagggtgaggagctgagtgttttcagcccatctccccttctgaagccagccctatcactgacctttgtagacgtatgatccaataaaagcccttttggctcaagccatatgaggttgagatttctgtctsttgctcctgtaagagtcctaggagatagaggtggaatcagatcatctgtgggcagtattaccagttaggaactttttgttttgtttttgagacaaggtctcactctgctgcccagcctgcaatgcagtggcatgatcacggcccactgcagccttgacctccctggctcaagtgatctgccctctttagccctctgattagctgggactataggcatgtgccaccatgcttggctaatttttaaatttttttggtagagacagggtctcactgcatgatctggactggtctctaactcctgggctcaagcagtcctcctgcctcaggctcccaaagtgctgggattacaagtgtgagccactgctcctggccaggagagtctgataaatagtctgggtgcctggcacagagcaggcactccacaatttagcagatttaattaattaaattaaaagggcttaaattgatgggcagcagctgtctaattttcacaaggttctttcacaagtagcttgctttgtattgtattgactattaggccattctcacattggtataaataaatatctgagaccgggtaatttatgaagaaaagaggtttaattggctcatggttccaaagtttgtactggaggcatggtggcatctgctgccgggaggccacaggaaacacaatcatggtggaaggttaagagggagcagatacttcttacacggtaggagcaggagcaagacagagacagggtaggtgccgtacccttttaaacaaccacatctcctgagaatgaactcaccatcgtgaggacagyactatattagtgtgttctcatgctgctaattaagacatacccgcgattgggtaatttataaagggaagaggcttaatggactcacagttctacatggctgggaaggcctcacaatcatggcggaagacgaaggcagagcaaagagacttcttacgtggtggtgggcaagagagaaggcttatgcagggaagctccctttataaaaccatcagatgtcgtgaggcgtattcactatcacgagaacagtccaggaatgacccagccccatgattcagttacctcccaccaggtccctcccacggcatgcggggattgggagagctacaattgaagatgagatttgcgtggggacacagccaaaccatatcaagtaccaagagggatggtgccgagccattcaggagaaactgccccatgatcaaatcacctcccaccaggccccacctccaacactgggggttacaatttgacgtgaaatttggatggggacacagatccaaacgatatcaactatattaactatgtttttgaaataacttagtttcacagcagaatgcagtttttgaagaattaattgttttaggcagcttgagaataggattctttgcatgcctcccagatatatccctgtgtgtgcatcccaccagcattttttcttcattataccagaggtatctaagggatttcrtgaaaggtagagtctctgttacttctggttatgtgtcatatattttcttggattatgctcaattcttctctaatctctgatgtttgaataaaatagtcctgggaaaagactttcaatggttttttagctgtagaaagattaaatactcsttttggaaaaacagttgacgttctttatttctctgtcaaaaggctgaatttaaaaactcctgaagcttcatggwtaccaccttttgtttcagtaactttatgtarataggaaaaaagtgctttctttttaaattggaaaaaccaaatgccctttttctgtaattataagagatcatggcaattctacattgtttggagaatttgctatagcttcagtttttcttcttgtatgtcagagtactttgccagctataattgggtagtttatattttttgcatactctattgtttctgtgagtttcacacaggagaaatgaagttgtggacatgaggtgggagcaagaagtaaaactctgaagtctgtgttatggatatgtttgttaataattatttatttatttattttttagagttagggtctcactctgtcatccaggctggaaggcagtggcacgatcatgtctgactataacctcaaactcctggsctcaaaccatctgcccacttcagcctcctaagtagctgggcctacaggtgcctgccactatgcctagataytattttattttgtgtagagatggggatctcatcttgttgcccaggctggtctcgaactgtcggcctcaagtgatcttcctgcctcagcctcctaaagttctgggattatgggtatgagccactatgcccagccaataacaattattttttaataactagtgagatgtatgcttttttcccctctctcacacatgcagttagttacasatgggatcatttgtccaggaactctgaactccaacttgaaacatctttttttagsaaccattatacagacagtgacacctgtcataaataaaaatgacttgagaatttctatatggtagatgtttctataattactgcattgctggttagaagtggggcttggttcctgcatggttcctccaaagctgcaggaggcctttgaacctttcgatttgaaacatgctggtgcacacttcagagctccgcccagagaatccctcgaccaccgggagaaccgagtctttcggggatttgcccctccagacaagagaaatgagcaagcagggaggtcacatggccagccaagctggtctgtaccagataccaaatcttttagctgtagctagagcatttaacttgttaaacatattcctctctaactgaaatctcagggacgatggaggagagactgttgagccaggatgtttttccttaatttgcaatattagacccagactgaagtggtcaggtatgggagagatccagggaagtggacacttctggtttgaaatctggctctgccactttctagatgcgaggcttgggcagttgattgatttttcatgcccttcatgtctttgtctcagctaaggttagaagtagcatgtggataatacctagcacagtatctgatgcgcagtagttgtgtggtcagtggtaaaagtattttcgttgttgttattacccttcctcctcttgctccctctgcttgagggaagggttaaaaggaacgcaccacagttacgctgcctcctttgccataagcttttctgaaaaattcatcctggattgcctggatttggcatcaacacttagttaagtagggactgagagggtgggcactgtttaaaggtaaaactgatgcccagaaccatcctcccaaccttggtatctaagagcggctcccttccctgggaccttccacaccccccaggtggtggatgtgtcttatctgagctgccaacaggccctgggatcccggcccccccatatctcggaggaacaccagccgctctcaagacattctgtcctgacagtttggtgccctgtgagtgcttcttacagccaatgccctgcaccctcactacattctcctaatcactgtgctaattactgcacaatgtaatagaactacattaactgttgtgtattttaaagtgcaatattaatgttcatttttgtgcttgacacctgcacattttgtggctcatataacatttctactcacagtggaagaacattgagaaaaaaaggactctgtctgaatttttagcttctcattactgtagtggtctcaaattttgtttctgcacaaggtctccttatcactcaggcactttctgaccaaggggtgggtatttcatttgagacactaagattgttctgcatgccgtgtagcgtgaatatcaacattaaagattgcaaaaagaaaagaagatggatggacggatggatgtgctaaatagattttaaaataaagtcaaatgaaagtctttatttttgagtacagcaagacgcttcatcaattcagttttaaatccaaatgatacttaattatgagagacagaaataactcaggaaatgttaccaagtgctctagggtttctagccagtgatttcctaactccccaagagaagcaaaaaagaagaagagctcgagatggggaaggaatctggaaaatgaaaaagagccactgtggctgggcagcttgttcctccaggctggtgggcttggtgccctcggccttgggatgcttatcacagtcctttgggaccagaacactggatatcagtgcagcctctgggccagcttcagaggctgttagagcatcattgctgctgtggctgatgcttcctttcctcagtaagtcacaaaagtcgtgttggccatccaggttaccgagtgacttaatttccagaaaatttaatattgagtcattattgtatgcattttcactgttgccattttgtatcctcgtaggtagtctatgaagtaccactgggtcacagctgcagtctgctagaaaggagagagacattaaagaccctttagatcccttatagaagtcaaaatgcagggataatgtctaaactgcctgctcccagcagttcaatttcagaaccagaaccagagcccaggcctcttgactcacaaatacttttcttttcatgttggtagagttagaaaatgtcatgataccaattttagcacaacaaactatttatctagctgcttttcttagattagaacataaacttgtctttggttttggctgctgcagagattttgatttctctctgttaaacagtccctggatctcttcccccagatgactgacagtgatctggagcctgatttatatggttttgaggacttggtctttggcctgagaaaagccggtagccagtgccactgctttctgtccttttcaatgactggcaccccggccctgcactttggattcctcatcctacggagcaactttacttacccaaatagtctgagatgattctggaaccctgaatgttcagcacttcaatatttgacctgcaggatagaaagacccacattctactaagattgaaattcgaaggtggcacaatagaggatcactgaagaaaggctctgactctcggtgatttatgaggtcttcctgacgcccaggcagtgaagggaaggccaaggaggacctatgttgggccgccagtgtggcctcctcagacctggaagtgcggtggtggggcccagggttttgactgagcgttttcagccttggcctagaaaagatgatgaaacccttttttcccctcagtctaaccccaacagaggaagaacaggaattcaaaaaagccwttaaactggggcatagtmttttccattgaatctataagattcttgaagatagacaaagatgctaccttgttcacccttttgcttttttttgcggaacctgacacagtgccacacataggcatctttttgaatggaattagatgtttagtgttctgtctctttcattagttctgagaatacccgaagtctgctagtgtcaatctttgggctcttgtatccattgccaagctttttgtttttgggtttatctaaaagaataatattgtgatagtggtttgtgaatatagttttacagtataattttgtcttaaagcattctattttcaagtactaatttcatgtataagatttcttacmataattattaactgtctatgctaaacatattaattttgaataacaattctacaatgacctcaaaggcatttacaagtgctcaccacagccatggtgaaggatgaacgtggctttgaagttagacagaccttagctctagcacgggtgtcctgccctttgaatttgaggatgtttttgcctgtctgtggtggtggatatcatgaaaattatgcatggtccttttttttttttaagctcatcagctgttgttagtgtattttacgtgtgtggtatggcccaatacagttcgtcttcttccagtgtggctcagggaagccgaaaggttggagacccatgctggccgggccacgccacctgttccctgcaggatctgggaaagtttgtcaagtctcaagttcaacagaactatgaaatggggattatgcaagaacctataattcagggggttactgtggggattaacttgagctcaggtatatagagtgattgtgcagtgcatggatgtcgaatatcaaaaaatatttgttattgtttttattgttatttggtgatttttcataaacaaactgacaactggggttggcctgattcatgagatattggtggagttctttgaaatgccccagttctcttaccttcagaagtccaaagctttccacagaatttctgccagttcccatggaggtttgcattttcacagtcccttctggcataatcatttgctgctgaattagttcacgttgcagatcgactcaccatccgtttatgtgtcattgtcttgtggcacagctcttccttaattacctagctcttccttaattactctcccctcctccaaaccctcagtgcgttatggtatatagccaactgttctgaagattttggcaaaggaagggttgatactgcaatgaaacggtgccttcagacagtttagattagatttgttcactccatccctggagattatttcctgtggtgcttcactacctaattaaaaaaacaaaaacaaaaacaaacaatcaaaaaaccccaaaaacacttaacatgaggtataggcatttttcccaaaagactaacagtgcttgtgttggattatggtcctaggggtgattttcttctcttcctgttatatttccaaatctttaaacattaagtaaataagtacatgtttcctagttttaaaaaggcaagttctaaaagctgggggcgaaagtttgttaggattggagaagcaatacaagcaggataaacaaatctttgctcagcgatccccatctccttctaatcctttaaaatgtatttctcaatccggcctaatggagtcattttatttcccgtgtgtatcacaagtgcagatgccccggttggtagcactaacaggcatctttccttcaaatgtcttgacgtgccagttgcttctgaaaagctaacgtggctcttgctgctcyggggtggagttcgcgtggtcagactatctgcttctgcccrctcaaaccccactttggcaaagagtggtatctactttctsagtgcctgggagttgacacctcaagctgctctttcatgggttatgatcctcatgcttccaggacccctcctgctaagaccaccagtgcccccatgttcctgaatgtagtgggccacttacagttcttgccttactccatctcagcagcatttgacatagacactccctctctcttaaaatattatctctgctmtcctcttgacagcagaatctcctgattgtcctcctgcctgtccatttctttgtttctgtgcttttctgattcctcttcttcatgtagacctttaaacattgggctttcctcagatctcttctcactctgcctgctcgccctgggtaaccttttttagtcccatggcttcaattattatcttttatgtgctaaagactaaatttatcacatttcaacaaatctaagacatcagtgatgctaagaggcagcaagattttatgaaccacaaaagaagaaagaagcactgccaatgaaatgacacaatagctttttacacatcagtcatcagatgtgtcccatttttagaaataccagaatgtaaaaaatgtacatccaagaattaataatatagtgtaatatcttttgcatagatttccatagcctttttcagagtatgaatacctcgtatgtcttaagcatagtgctcctgggagcaggcaaatgagttgcaacaattttgttttgagaagctggttgtttccttagtcttagctctccctaagtataaaactggccttattactttgtagtatgtacagcatatatgtatagatgagacagaattaagttagcccaacagtaaggctgaattactgagtcagtgggtcttcaagatggtgcccaaactctgaaatttatttcattttagatcgttttcaacgtcttagtataaactgtgaggtggtccctgaacagtgctttctgacttcataacgtttctaagacaactgaattttaatttttataattcatttttaattgttagtatctctgggaaatcatactgttggtgttcccctccttatttcttttttccctctctgtatcttcaaaattacttttgacagctctgggacctgtaggaactattrccaaattttggaatgtgactttcctgcagcagcatccaaagttaacaaaaagacatggaaaaatcccatctcaatggtagyattctaatctctcaacatctgcataccttattstgctccactgagcttttctaaaaataatttaagtgatacagcttcctctacttctgtagggagaataatccatatcaaatatttttgcctcaaagtattatcttatgctcaatatgattatctcaataaagtttctatccccttatttttctcctcccatactttcataatatctttatcgtagttactttaaaatagaatgtttaatgacaaaagtttaagtaaaatatcccaaccatatgagaatttggaaaatgcttcccttaaaaactttcaggtcaaagaagaaataaaaagtgcaattatagaccatctagaaagaagaatgaggatactatgaataatattcacaggataaaacctgagatatacttggaggaaaatgattgaatttaaaaacttttgttattaaacaaaaagaatgacagttaacaaactgactgtgaaatctgaaaatttagaaacagacagacaaaaaccacatggcatgcccaagcaaagcaagttaaaacatttattaaggaaccagaaattaacaaagtagaaaagaaaaataaagttgatatatccaacacctgttactttaaagaaaaacctttgcctgtctaatcacaaagaggtaaaaagaaaacaattcacagtattaggaatgagggaagggataagaagagaggggtttacccacagataagaattaaaagattgtaaaaatttgaaaatctgcagtaagataatttgtaaaggtattataatattaaaatgggatttagtaaaaattggaaacagtgaacggatctgtaaccacataagaagttgaaaccattactaaagatttctgtgtaaagaagtastatacttgtttcaactaataaatactttgtatgttgaaagcttcctgattaattgatgtaatcataaccatggttaattcacttgataacagcagcatgaataggctagggcatggaggttctctcttaaaagtatagatgcaaaagaaaaaaaacaaatcaaaataacaattatggcgggaaaaatacaaggaattaaaatatcaatatataatgactgtgtatgaattacgtagtcgtgatttcaagttggccatatagcaggaacacaagactcctttaaagattaggaaatctattactattattgatamtttaggrctagagttaaaaaaacaaatatttatccaaatacatatcaaaaaggcataacwttcacttctgattttaaaaaatcaaaaytcttagtaaactaggattaggtcactttcacgatgygataataaatatcagcatgaaactcaatggtaaaagataataagtgttccattaaaaatgggtgcacataaagagatgctcaatattgttagctatcagggaagtgcaaatcaaaaccacaatgagatcgcatattaggatgactataatcaaaaaaagagattataataagtgttatcaaggatgtggagaarttggaacccttgtatattggtggtaggaatattaaatggcacagctgctttggaaaatagtccagaagctcttcaaaagccttactatatgacttaccaaatgacccagcaattctgctcctaagtatagccaagataaatgaaagcatatgtccatacaaaaacttatgctcaaaagtacatagcagcattattcctggtagtcaaaaggtagatgcaactgaaatgtctatcaactgatgaattggtaaatgaaatatgatatgtccctataatggtatatyatggggcaacaaaaagtaaagcactggtacattctatgaatagatgaacttggattgaaacgtagattgagaacatgattgctaagtgaaagaaaccactatcaaagtatgacatgttgtatgattctgtttatacaaaatgttcagaataggcaaatctatagagacagagggtaaattgatttttttagggccggagtggttgggggaataactgggatgtgactggtagtgggtrcaggatttctttttgcggtgatgaaaatgttttaaaatagtgcgttaatgtttgcacagtggcagtgtatacagtgttgtgaatgtgctaaaaaccattgaatagtacatttaaatgggtgaaccgtatggtatatgagttatatctcaacagagctgtcattcaacaaaggaaaaacaatgcaagagtgactgtagtctccatgctatttatagttactctgaagtttctaattaatgctattatacaaggaaaaaagataaatattggaaaggaagcaacacattattacagaaaatatttggctactcagaacattcaagagattcatactagaattaatttttaaaagtttggtaaggacgcagttataaaaactcattgggccttgggctactagccttactgtataaacaggtcttataaatatgtaagaaatgctgatcacccagtagcaaagtaaaccagtgatatgaagaccattcacaaaaaatacaccatgatggataaccatacaaaagaatgtgcagcatatcagtaacaaaagaattcttgtaaaaaaaaaaaaaaaacataagctagtaggtgaagggcactgttgtygaatgtatgcctttaacatacatagactttcacaagtcctcaggaatttcacaatgctccagagtaaattgtataactacagatatttataatacctaattctttattgacctcagtagatstctgaaaactgggaggaagtgagatgggaccctctagagctactcctagagggctggcttggctctaagggcttagaggagactgaggcaatgggaggtcttgggtcctgtttgctcttggtgttttgaggaatgttcacgaggtctgctactcccctggctctcccttggagtagatgggaagtctgagactcccaaactagatcaggaccacasctcctattatttattcatttttgagaaggagttttgctcttgttgcccagactggggtgcagtggtgcgatctcggctcactgcaacctctgccttccagttgtaagcagttatcctgccgcagccttccgagtggatgggattataggtgccgggcaccacgcctggctaatttttgtatttttagtagagacggggtttcaccatgttggccaggctggtcttgaactcccgacctcatgatcaaagtgctgggattacaggcgtgagccaccgtgcctggcctatttattttttttgagatggagtctcactctgtcacccaggctggagttcagtggcacgatcttggctcactgcaacctctgcctccagggttcaagtgattttcctgcctcagcctcccgagtagctgggattgcaggcacctgctaccaccccaggctartttttatgcttttattttattttatttatttatttatttattttgagatggagtctcactctgtcgccaggctacggtacggtggcgcaatctcagcgcactgcaacctccgcctcctgggttcaagcgattctcctgcctcatactcctgagtagctgggactacaggcacccaccaacacacccggctaatttctgtatttttagtagatacagggtttcaccatgttggccaggatggtctcgatctctttayctcgtgatccacctgcctcggcctcccaaagtgctgggattacaggcgtgagccaccgctcccggccaatttttgtatttttagtagagacgtgggatttcaccacgttggccaggctggtcttgaactcctcacctcaggtgatccactcgcctcggcttcccaaagtgctgggattacagatgtgaggcactgcaccggcccacagcttctatttaaactgaagaatggagcgaatacaatgcgttagttcctaagctgcatggaagcaaataccattttggcttgagggatgagtcagtgtttctctgcaggtggttgatccttggcagtggtaggattgctgtgcgctgtggtcattacaggaatgttcctctggtggttatggtggctgtgtcttactagaattaccattgcttcagttttctctcgctctgtagagattgtcttgtcatttccattacatttcatgttaggatgatctcagtgcacatgtccttaaaattggtctgcatatgagagaggtatgctttgtaaaaattgtttccagaaatctcttctagcagtttggattttagctgagtggtgataatgccattcattaggaagattttgttataaatgaatgtaaggatcttgagatggtatgttttccacatttctctgatacttttttctcccgtatgtatgtttatacttgctactagtttgtatggaagcaaasagccttaaggccatttctacaagctagaaacacataggaaaatgtgctkttttctttttcatagaatgtaattgatacatagtgtaaactcagaacattaacacatacactttctgctttaaattagaaatgtaatataattataatgaaatgaaagcgttgaccattgtaaaacccagagagggtattcttaataggatctacacatcttttgtggtacctttaaactcatattttcgtaactggtgaatgttcatcttttaatatacasaatcctactctgagatccgattaacttaaggggaagtttttggtttttattattgggggaattctcaaaaaattgtattttggagtaagtgtgagtttaccctgttatcatttatttcgtgaattgctcttctgctttacggtaactcttttcatcatgccgatttctctaggttgaaaatgtccgcttggtagatcgagtgtctcctaaaaaagcagctctaggtactttgtatttgacggctacccatgtcatattcgtggaaaattcacctgacscaagaaaagaaacatgggtatgctttctttatttttagctttccttgttttgcgttgtttgaagyaaaaagtgtttgccctccattcatttttcctcagggtgagatgggtgggcttttgtgcctggatgttggggaactgtttctggaatgtgtgtttggactttttctgtgcagtcgtatctacttgatcgactattcattttaaacatgaattatttgaacatcagtgaagagagacttagaactagccagaagatacaagtgcttcctgtcacagctgtcaaggagagattcaataatgtcagtaggccagattcagcattgtcatcctccagtgctccatttgcaatastctctatttgcagggtcctgtaatgcagccatttggtcattttattacgttgcctctacttttctgataattttaaaaagaaagaaaatctagaggagcttcatcatcaggtatttctcctacttattaatgaaaccattagatatttgaacatcactaaataataataattattattattaatattatttttgagatggagtcttactctgttgcccaggctggagkgcagtgatgcgatctcagctcactgcagcctctgcctcctgggttcaagtgattctcctgcctcagcctcctgagtagctgggactacagtcacgcgccaccacgcctggctgacttttttgtgtttttagtagaggcagggtttcactatgttgtccaggctggcctcaaactcctgacctgacctcaagtgatctgcccaccttggccttccaaagtactgggattacaggcatgagccaccgtgtgtggccttattattctttcagcaacccaatcatgacatccctgaattgtagatttccctttkctgtatttcgtgcacagtggtacatttttagcagaaggtggcaggcasttcttagtggaggggaaasttaaagattaaaatgctgctattgaagactgagcatagaccctcctgtaacaccagagatgcacttcagtatgatttcctttaaagttaatctcctctttagagagtagaatgatggttttaccagaggctgggagtgcagaggagggggagggaatgaggagatattgattgaagggcacaaagtttccaaaagacaggaggaaaagtctggaaatctattgcacagcaaggtgaccatactcaatagtaatgtatatttcaaaataattmtgagagtaaatttcaagggtctcactgtaaaaaaaaaaaaaaaaaaaaaaactataggtaagtgatggccatgctcattagcttgatttaatcattccgtatgatgtacatatatcacagcatcacactgtagcccataaatgtgtacaactatgatttgcaataaaaatattaatttaaaaaataaaaagataaaataaatcccttcttttgcagcctgcccgaccaccaacagcttagaaaacaacaatcccatgttratacagaactcgaacattccatgtggaattaaggagcatggtggcacctcccagcggagccatctctaacttgtgttgactgcagaagtttattttactaacttctcatgaccttatttaattttagctattaagcgcattcaatatttgactaccaaaatgtttccatacctggacttgtgcaaatttatatgctgaatggtttacttcaaaataactgtcctggatatcaggaagcttggtattgaaaaataaaattataaatttaggaagttggttcttacctggaacatctcagtgcttgtcatctgaacgcaagggttgagctagctggaggttggggagcgtttcttgtctttctttgagccacaaagaaatgttagtccttgtcgtattcattagttatttgtgcttagcttatgcacattaacatttggttctagattcttcacagtcagatttccaccattgagaaacaggcaacaaccgctaccggatgccctctgctgattcgctgcaagaactttcagataatacagctcatcatacctcaggaaagagattgccacgacgtgtacatctccctgatacgccttgcaaggccaggtagggcagaggaactcggcatttaatatggaacctctcttaaaaatttgcaaatcagattcaagaatttgtatggtgcttaggaatgataggggttcagggattatgtgtcagtctcgttctcaggagaggataagcccgaatgatcatctgatacagagtttcttgtttttttagagtctcccccgagttatttattatgtgagtctctttcatgaatcttagtattaacttaatcttggtggggttataggatgctttccttttggggtgaaattgcctttaagttatgcacttcttatattgtggtaatcgagccaccttgaatggggccagtgacagaactaatcagttgttttgtgtggaaaatgttatcagacagttctagcgcagttttctccctcttgatgcttttaaggtttggtctccattgcttttttgtttcttggggttttggtttttttttttttttttttttttgaggcactttttctccgtcgcccaggctggaagtgcagtggtgcaatctcagctcactgcaacctctgcctcctggtgcaatctcagctcactgcaacctctgcctcctgggttcaagcgattctcatgccttagcctcccaagtagctggactacaggtgcccaccaccacaccctgctaatttttgtatttttagtagaggtggggttttgccaygttggccaggctggtcttgaactcgtggcctcaagtaatctacctgcytcggcctcaagtgctcggattacaggagtgaactaccatgcctgcacctccattgctttttgataataatttattttttccaaggttgatacaactagactagcatcagtgactattcagggtatggatctgctgattctcctggaaaaaaaaaaaaaaacttaatgtggtaggaagaacatttggatttgaaaaatatgttcttgccattgctatcttgttccagccgtcatcttgggctcttcggatttatagcttactgttcgcttctacagaagtgtttcttgcctctctgtgtggcttgtgtgagttgtggtgttgttttccttaaaagaaatatactcggcctgacgcggtggctcacatctgtaatcccagcactttgggaggccgaggcaggcggattgcaaagtcaggagactgagaccatcctggctaagacggcgaaaccccgtctctactaaaaatacaaaaaattagctgggcgtggcagtgtgcgcctgtagtcccagctacttgggaggctgaggcaggaggatggcgtgaacctgggaggtgaaggttgcagagagctgagatcttgccactgcactccagcctgggcgacagaacgagactctgtttcaaaaaaaaaaaaaaaaaaaaaagaaaaaaagaaatatactctactatactctaagtttcttggaagaatacagtgaaaagagatcatttatatagaagttgtgctacacagaagtagttaataaaggaaataagatatgtgctgataattactttgccaaatgctttttgattcaggacaagaagttcaattatraacttttcaaggcatttggttggatcctaagtttcttatgatttgtccatattctttgtaggtagctaagagctaaagttactaaatggaaatgacgccagggagctgtcaamatctggtartttttactttgcactgttactctttaaaggcagttggttgaggctttttcatccaagtgtgttaaaagaaaggcagagtaaggcagaaaagcagttgaactttttggagggtgcactaaaattggmacagaagttctgggaagatgtacattaggttgcacgcagcagataatgtgaggagaattctgtgctaacagtttctgtgtcactgattaatggaagtactagkcgataaatgtgctctgagcggattaatgggatttaggaatagcccagcgaactgggaaagggctgagcagctggtgatgagtgaatcacagggaccaggagggtcatggcccagagatagcgagtgccaggactctcgccgtgaggatccctgagggggaaattactgtgttccctcattttcgaaaagagatactttttccttaaaagatgaagggagttaggtattagatgtagacagagatctgactggctaccttttctaaaagaaatcatagtcattcactgaatcaaagccatcacctaagaggagttaaaaagaatcaccagcattttgaaacatgggcattagaaatgccagtttgcctaaaatgtagtgctttaataagtgtggaaggtgaaacagatcacaagcagttcacagtgtaatgttaaaggcawtgctaacattagggcatattataggctgtaactttggaagcaggactttgactctggagggagatggggaaatgtggaaggggttagacatgaaacagttgccttcaactgggggatggggtggtctttcagaaccatctgaagatattttayaaaagacaccgtccactgcctttarrggcatgrgaataakggtgtgtgtgtagttggtgagggargtgtactttgaattctagtagtaaaatgtagctctctcgatattctggttagtcaccaacaaagttcacatattttcagtttatttatggacacccagctaactgtaaggttctgtagagcaggggtccccaaccsctgggccgcagacaggtaccagtctatggcgggttaggaagcgggcggcacagcacagcaggaggtgagtggcgggcgtgcaagcgtgagctctacctcctgtgagatcactcgtggcattaattctcttaggagcatgaactctattgtgaaccgtacatgcgagggatctaggttgtgtgctcctgatgatctgaggtggaagagtttcatcytgaaactatcccccaaccccacacccccatccacagaaaaattgtcttccacaaagctggtccctggtaccgaaaaggttgtggaccgctgctacagaggacaaaacagttgttttttacataagaagaaatgtttgggaattcatttaagtcaaggtctctgaaggagatattttcaaagctgtcgtaatttaatattaaaatcaaaagtactttaaaaatagaaaaaaaaaaaaaaaaccccaaaccttagcatcagcagaatgcgaagggtggggaagggaagagaaaagtttccagctgttagcagagggacacagaggtgtgaggtgttttagaaccggtgtaactattgaaagggaaattgcttcagacattctgctgaattcaggcaacttaaaataaatgtcgagattatctctttactgagttaggatttctggtataaggtaaatcaaattattaaaaaattagagactttattggtttgctttttgtgtgaataaagattgataacaatttggtcacagactgtagaagatctcaggcaaaacataacatgcccaaatgcaggaagctgtttcattcttggtaaagaactaagttaggttaaaataagggttgtgggtcaaatgagatcagttaaccttgtagatctaatgtattaataaggattgaacttttctgatgaaaagacccgtttctcagaggccttcagcttttcccatgtcctctctcctctcttccctccaatttgcctcctgctgtttatttttgtatcaattatcttcccctccttagtgtttgtgggtacttcaacacttaaataatttcttttgtttgttttcccccttttcctaaactagtttctttttagtattttagtccccagttcttttggatattttttattttagaaaaaatctcatgattgaagtagtctcatttgctttattggtaactttttatattccttatataagtcattgatgtttaagcaatctttgcagtggtaatttcttttttatcagagcgtagcagcccttttccactgtgttagctttaacagtcctaatatttaatttcaacacttgtttgcttaaaacagacagataaggtgaggcaccctcatttttattttaaatatgcaaaatccagtaatagctgtattatcttctcaccccactctaaatggtttttcagctacagtttttttttttttttttttttttttgagatggagtctcgctctgtcatccaggctggagtgcagtggcgcgatctcggctcactgcaagctccacctctcaggttcatgccattcttctgcctcaacctccckagtagctgggactacaggcacccgccaccacgcccggttaattttttgtatttttagtagagacagggtttcaccgtgttcaccaggatggtctcgacctcctgacctcatgatccgcccgcctcggcctcccaaagtgctgggattacaggcgtgagccaccgcgccyggcctcaactacagttattttaagttgcctgaattcagcataatgtttgatgcaatttagctttcagtagttactttggttattwaaaaaaatgctcacatctctgtgtcctgatgactgttggtaagttttcccttccctttcccacccttcccattctgctgatgctgattcatgtttgttttttcttttcatttttaaaatacttttgattttaatattacattatttattgcttctcccagttagtctgtaatgagaggcaattactccatatatttatcctaaataytctgtttttataacctttaacttgatacctagggaacaagctaggttattttccttccttccctaatgttttgttgtaccctcatctctcccttatttggcagaaggagcaccctttcctttatatgggagagaaggagcaaaggttgtatacggatgcagccccatttattcacctggtggttccaagttgagagtttgtacctgatgtcttgcattttctatgggaagtaggaagtggggttatctgagagtgaaggagccgaggagagcaatagagactgagctgcactgtagtgccctaggcttccctaggttaaggggagcacaatgaacaccggtgctagaataagatcagccaaaacatggatctctgtgtttgggttgagctcatgctttcaactgaaacactgatttggtcttcctakaaacagccaaactgttactcatccttaatttcgtgtagtattttagaaattatcattttgctttctgggtagaaaaacattaaagctggactcctgtttcattagttatatgatttaattagataatatatgatactgtaaataccaagatttccacttaactttttctgaatgttttttaaaaattaaaggtgcacattcagtttactcccacagtccaaaggcattttgagtatttgcttcttattggaggagctcttgtgtaatggggccccttagggtgaggccttcgttgcacttcctgctgaaagctgctggtcactaacagcaaaagatgttttagttggatatgctggcttagactgtgatgggaaaagccagaggagcttttaacatgcctgttttaagagtgggtagaaaatcaggtgagggatatgaccttcctagagtgggcaaatattttmtctctgttcagattctgtaaatattaaagatttgyctaaaatataagaagcttctgcataacaaaggaaattgaagaaaagacttggaagccatatacctgataaaggattaatacccaaaatatgtcaggaactcaaacaactctataggaaaaaaaacaagtactctgattaagaaaaggacaagggacctcaagagacattactcaaaagaagacatagatggctaacagatacatgaacaaacgctcaacctcaataatcattagggagatgcaaattaaaaccacagtgaggtatcgcctcacaactgttagaatgacctttaccaaaaagatggaagayaacaaagctttggcaagggtggggaggaaagagaatgcttatgcactgttggtgggaatgtaaattagtacaagccattatggaaaacagatggaggttccacaacaaacaaaaaatagaattatcgtatgattccacaatcccacttttgagtgcttactggaaagattgaaatcggtragttaaagaaacgtctgctctcacattttcgttgcagcactattcacagtagccamgttgtggaatcaacttaagtatccatcattggatgaagagataaagaaaacatggtatatacaaataatggaatgctattcagccttaaaaaggaagacattgtgttatttgtgacaacatggatggaattagagagcattatgctgagtgaaaaaagccaaacataacaaataccatatgttctcacttacatgtgggatctatgacagttaaactcatagaagcagagagtagaatggtggttaccagaggctgggggtgggggacgtggggagatgatggtcaaaggctgcaaagcctcaggcaggaggaataagtctcattattttgaaatctgttgcacagtgtgttgagtataggtaatagttcagtagtgtacatttcgaaacgctaagagtaaatttcagatgttctcgttacaaaaaatgttaaatacttgaggcaatgtatatgttaattagcttgaattaatcattccacattgtagtcaaaaatcataacatcactttttgaccgggcgcggtggctcacgcctgtgatcccagcactttgggaagccgaggcgggcagatcacaaggtcaggagatcgagaccatcttggytaacacagtgaaaacccgtctctactaaaaaaaaatgcaaaaaattasccgggcgtggtggcgggctcctgtagtcccagctactccggaggctgaggcaggagaatggcgtgaacccgggaggcggagcttgcagtgagccgagatcgcgccactgcactccagcctgggcgacagagcgagactcygtctgaaaaaaaaaaaaaaaaaaaaaaaaatmatagcaacactttttaccccagaaatatatgaaactgtaattcatcaatatattattaaaaagtctgtaagcaaaaaaaaaaaggattgtcaagccctaggtttttttttttttaagcttgcctcccagctaattgctaaacattctgctaaatatttggtaaaagtagagaacgaaaagaacagaaaattatgacatgggaacaattcagtaaaactttcatctgtgctagtggcgcttttcgatttcttagagtaggcagagtctgcaggctgtatctgggcttgcctgtgggtaagaagcttgcccatattgacatgactgttggctgacaaaaatgggcttttcctggccctcgtgtacaattttccttaaattgggcataaggattggttgatcacccttttccttaaaaaagggaaaatttcataatttcagtgtcaacccatcctaaggtctcctagttcaacagtgatctgcttaatgtctgttataaattattcttgctgtaatttatggataatttcrttgcctcttcccagtggaaacaggtatcagcccacacgcagaaaactgtcagtagtcataggatgtttttcttcttctacctttaaagctatttgtaaatatttaacaaagagaacttaactgccattattaccccatattcagtagctcttctttcactcagggaactgaggctttctcaagagattcctttggcatcctaaacaacttgcatttgtggttaacattatggtagcagaagcctgagtcatgaaaatggtacttagagatggaaaagatgtgtcaatgttgagccaactgttcccagaacaggatctgaggtttcacatgctgtcagcaacattagctaagatgataagaaattgattttacggaacgcgtctgctctggtttgtgtgtgagcacgcctggatgtgcgtattttgttatttgtccaaatagtccgtactctaagttttgaagtttagaaacatgacatggagaaagactgaamtagaatataatttatctcactgacatacagcagttgcttcttactctcaagaaaaatgaagaaatctggtgcttaaaatatgacccttatctttcctcttccatgcagatgagtcatctcaagtttgaaacctgagttttcatgtcaggctgcctgtgtgttgctgcagcctcttgctggtggcaagattctataaagggctacacatacatgtatttaggaaacttaaattgttcacactgaatactatcactatgctaaggacataggaggacctaggaaagctatgagaaagaagtatattggagaaaaacaggaagattaggggcctggaacgaggaaggaagaagaagagagaaggatctgcgtttggggagggtgtgttacaattaggagcaggccttctgcagccagatgtctcatttaaacctggactctccggtaactggctgtgtgactctgagggagggagtgtgcctcccgtttgcgtcagakttctcgtcggtaaaatgaggaccatcaatgttgcctactaactggattaatgcacttaattgcgacagaatctggaacaaaacaaggtctgagtatcagttatcctttattatcatcagaaatgcttagatctgcactgtccaaggtggtagccactggccacagatagctgttcagcgctactgcaaactgaggtatgcggttaagtgccaaatacatgtgaaatttcaaagacagcacaaaacaaaatgtatcaaatattagtaagttttatatcatgcacatgttgaagtgataatgattttggatatattgggctaaataaaatagattgttaaattaatttaacttttttttaatgtggctacaaggacatttaaaatgacatacatagctcacattatatttctgttggatagcgctggtctctacacttcccttaaatggcaagagcagagcaagaaaatcaaatcctagattttagtggagagagggaaacagtggggctattgggcttcacaagcatcaaaggcagtatataaagacagagataacacgacaggattgaaagaaaccacatcatgatgcagccttcaattcgcatcccacgagcacagcgctgtgcagtatgaattgattttttttatgaatcttatgcaaatgagcagcacaattacgatatttatgtagttgtttaaagttcagatgtttccaatgcaaacgtttagtatattccagagttttttcaactttattatttttttcttttttaaccctgtgagcatcaaaatgtgcaattggcctgggccttgtgtctgcctctgagaggccatcccaaatccaagcttgataggcattaaaaaaatggaatcttcatgcctaatgaatgcatatgttcttaatttttatgttccatatttgatgtggtctggaaaatatatttgcttttaaagcaacaacaaaaaaagcacaaaatggagatgtccctgtgttctaaaaggaaagaaggtactgccaagttgagttcaggtaccccaaggtcatcttgtcattggtgggaggaagtgggggaccctatccactgcacacaggttactcccaagagtgtgctgggggtgggggttgggatggcctctctgggcactccaggtgggacagaatgttttcggggagatttggctctggttttgactaagcttgatttaactttatcctaccttttcttgcagtgaaatatgaggagttatactgcttttcattcaaccccatgctggataaagaagaaagagagcaaggctgggtgctgatcgatcttagtgaagaatacacgcggatgggcctccctaatcattactggcagctcagcgatgtgaatagagactayagagtgagtgcgtgaaacccaaacactgaagccgcatgaaattagggtttcagccagcttagcatccctttatttttatctccttcaggttttatagctctttgtagatatccatatgtggatttccaggtctctcttggttagtgccagctgtatttacaacctggacctagaatcaaaacgtttgaacctgctatacagatcaccccttccagacccttcatctcacggttgcagaacttgaaaccyagagaggccrggtggcaggccttgtggacagscagttggtgggagagctggcctggatctcattctcccatcaggtctttttatagtrtagtgagtgattagtgggcaagtcagggagactctgaaggcagtttggcaccggctcctctatgtactcactgagtccttgcttggtacacaaggtcaccaagaggcttccctagagaaacatgtctacactcacaggaaggaatatggagaggcagggaagctagagtggcagaattaatcccatcttctccttaatgacaggcttacagatcaggggtggtttcactataattttaaaaatatttgagtaacaaaagtaatgtgagaacatcctagatagtttacaaaaggaaaaaaaaaaaccccaaacccaccatcccatttttaaaacattcttctgttttaaaattttccttcagttgttttctcatctgtatagtttgataacttttttcatatgtaagtaatgcatattcattattgaaaattggaaaacatagagcaaaagggtattaaatcacctaaaactgccatcattcagagatagccactgttattatatctggccaatagtcttctgggattttaatgtgtatattaattttttatgtttgcacacacaaacctatttaaacatatataacaaaaatggaatcattacatgtgccttatattctgcttttcttcacatacatattgtgacatttttctgtcaataattatatttktaaaacactgcatagtattacctaagtatggctgtatcaaataatatctacctgctctctaatttttagacatttagatcgtcattactcatcactattttaaataatggagaacatcctggtaactatacctttgcccatattttaatttttttaaaagatagcattttaatataatttttatgtcaaaacacctacacaaagttttgtacatgttgtcaaaaataattgtggaaaggttgtaccaatgtctatgaattctcaattgtgaatgcttgattccttataccctcaccagtaaagagttagtttttaaaaatcttttgataccttgatggtataatgagtgatttcttattttaatttaatcttcatatcttgatttcttgagttgtagctttttctatattgattgaccatttgtattttatctcctgataaatgaccatttccagttgcatattttgaattctgggtattttcttgaccttgtcacagggattttctttcaggttttttttttttttttttaaggaaacagggtttcactctgttacccaggctagagtacagtgcagtatagctcactgcagtctcaaactccagatccaaagcaatccacctgagtagctaagattacaggcacatgctaccataattgcttaatttttcaaagtttttgtaggaataagttctccctatgttgctcaggctggtctcgaattcctgggctcaagcagtcctcctcccttggcctcccaaattgctataattatgtgtgagtcatctcgcccagtctcacgaggatttgctacattgctatatggtacttaaacaatcaatgaaatgattgtacagtagtccgtcaaatgaatgtactgtaaagtactaaagtatttctttattaatacgcatttaagccaggcatggtggctcatgcctgtaatcccaacagttcgtgaagccatggcgaggggactgcttgagccctggagtttgagaccagcctgggcaacatagggagaaccccattcccacaaaagcaatttaaaaaattagctggacatggaggtgtgcacctgtagtcccagctgcttgggagatcgaggctggaggattgcttgagcctgcgaggttgaggcagcagtgagccatgatcgcgccatgcactctagcttgggcaacaaaatgaaaccttgtctcaaattttttaaaaagggcttttagattatttagacttttttttgccatatgaataattcttgatatagtatccttatgtgtataatttcccccaacttwaaattattttataagaaaaatctttcctgaatctaccaaaaggcataaagggcctaattgttttaaaaattacagacaggtaggatactgatgtttttgtttttgatcagtatttgttagtttctagtcccttatattgcattcagtgcacatggcctatagaattcatatttggggaatgttttgaagacgtatgtcatcataaaacacagtattctatttttaataagtattttgagtctggaaaaatgtgtattctctattatttaggtgtgaaatttcgcatttatctaaattgaatttcttattattttggtctctttgctcaattgattctgacagaggtatgtgaaaatattcctgttatgattgtgattggacattttctccttaagtcctaacatgtttgcattatatattttaaagttactctgcttagcacgtaatgattaaggacatctgcttggtgtattctttttgtcagtttcacatatcccttttcctgtgaattatttaaactttgaattctattttatatgattatatttccactgtttctttctctttgtcagagtttgcttggtggagctctgtttaaccccttctttttaaccttcttatgtaaatgttttgtctttttaagctgagtttggttagatttttttactcaatctgaaaatcttttttgcggtaaaatactatctgtgatattgttctagatatcttgtattgtatgttttgtcaattatgctttttcctttttcatgtctatgactggatggtttttccctgtatttgcttgtaattatttcagaagtatataccctattgcttttcctccactgagtatctttcatttagaataaaagttacttaaatcatcctacaaagtagagaaggaaaaaaagaaaaaaagttatttatttcttatggcacacttatggcatacacaggactttgaagaataacggaatgaatgccagggatccatgtgctgtataagaatgaacatcaccagtgctagttaatttcccagatgttccttccaaattgtctcttgctccagcatcaatgtctgcagtttggcattgctattcctttgcctttattatagcatgtctacatttctaaatataggaaggcctcacttaatgtcagtaggttcttggaaactgcgactttgagtgaaacgatgtacaggatattctcaaataacatcattttgctcgacatcattttgtgatagctatgagggaaaaaaaaggtgttttatgttcttttgcttaaagttgcaattgcctacaacctgagggcattgttgagcaaggacttactgtagtagtatgtggyattgttttgcatgtttttatactgtctgtacttggtctgcatatgctgtatatagttttctgaagtttgacttttcactcaacatggtaacatttgtatttgtsatccatttcgtttaagaaacatgtatatagttactacatgccaggtactgttctaaaaacttgataaatrttagcaaatattagttctgtgtatagtagtattattatttctactttacaaatggagaaagtatgacagagagattaagtaattgtctaaggcatagagagattagtaactgttgatactgatagctctgattccttcatttttcactactgtgttgtattccatttcacaaatataacatagttttaaaaattactcatccttccctctttctttctttttttcttttgttggttgtgttttgttgtcatgaataaagctgttaagtgggctgtatatgtcttgtagtatattgtgtttctacttaggagtagagtttatgagctagagagtatatagatttgagctttactaaattctggaaaattcttttctaaagtgtttgcrtggacatattggcctgcttgcaagatatgagttctcattacggcacagactccccgacggttggtattgatgtgatattcgctggtattcttctttgttgatcccacagtgccacttctgagaatttattctgtggatttaatagcatacacacacactgatacccaaggttattattttattttattttattgagacagggcctcactctgttgcccaagctagagtacagtggggcgatctcagctcactgtaacctctgcctcctgggttcaagcaattttcctgcctcagcctcccaagtagctgggattacagacacccaccaccacaaccagataatgtttgtattattattattagtagtagtagtagagatggtatttcaccatgttggccaggctggtcttgaactcctgacctcaagtgatctgcccgcctctgcctcccaaaatgttgggattacaggcaagccaccatgcctggaccccaaggttatttttttgaagcgttgttcataatagtaaatattagaagaaacccaaatatctttaattagtttcttggaaactgtgactttccaagaacctaattcttggaatgggggccagctaaataatttttgctctatccgtatgattaagttagtttrtaaccattaaaggaaatgtggaaggttcctatgtactgataaarattgctaaaatatattgttaggttagaaaaagcaagacacaatatggtgaatatagtataataccttttggcttaacaaaggagggagaataataacacgtttgcccaaaagtgataacctagagtggtgttggtaatggggtggataggacacaaggatgaaagtgggatttcttctcctgctccagcaccactggatgcagtttagcattgttgttcctttgcttttatttgtagcattttatgcaccttttggtattgtttcatttatataaccatgtggatttattaactggtcttaactttgagccaaactgattggtatgaattggatctcgatgtggtttttgcattgacctgatcgactagtgaggttaagcttgtgtttcttggctgttcatgttgactcttctgtgaattatctactcacatttttgctcttttttctataagattatttgttgttttcttgttgatttgtagttctttatataatgtagccaataatttgttataatttatagctcttgcagatatcttgtctcaggagattctgatacactgttccaagtttcttcagaagttttgagttgtcratctttcttaccatgttttgtcttttagcatactgtttttttttttaattttttaatcctggtctgtttgctaaactttgtcccaatttgacgctgtataaatcccacaattatatttttaccagttatgattattatggctttataatcttgatacttaaaagtcagttctttgacataattcatcaggatatcttgmatttatggattatttgggctagaatggacacttccatgacactgaatcttcctcttaattacacttaaatttaacaamcataaagttaattattataaagtatctgactcatgtaatcagactaatttgttctcatactaaagctaacttttgcagtgaatttttagccttgaaagaaaggaaaatccaagtttagtaaagaaaattggatactctttttgttaatatgacacatccttgggcaaggaagaaaatgagactgaaccacatcttgtggaataacgtctccttggaaatacaggttcttctgtttttgatgagatttccttctagaattagcgcataaacatgactcatatatagtcacttaagtcctacgttgcacagcctgcaaaacatgagttactcagcatttcttttcagaagcaacacacagcaaaacaaaactaacagcaaaacaaaactaacaaggaacaaactgttttgaagcagaaaaggtaaaaacctaggggattttctgattttgcaaatatcaccgaaatgggaggaagatgatgtatcctgatttgtcactaacttagcaagagaacacaagttgtcttatttcagaaaatttttgactaataatccatggagagagagatatccaaatccattccttttgcttttgaccccatggctgagaaaacgtttactttttcctctcttgtttgacaacttatcttatttcttctcacaaatcctttgaggtcggtgggtcaggaagtgtcatttgatggaaaagaaacaattgtcgrtggtggaaataacagcagacgtagaatacaaaacttagattctagaaccaattctgctattttctttggccttgggcaggctaattattactattatctgtatcatcttaccaccatcgctatttataagacacttgcttatggtagtctaagtctctaagctcagatttctttttttacctaacccttgaaattgtctttatttaaataaagtaatttgtattcattgctaggttaaagttttaatctaactctcttggaataaaatataaaatacaacccaaaccagtcagtttattaaagctcatttatttcagttctccacagctatattttatgtatcatgcattattttgttttattcacatatatgtcattttatcctgttcataacctcctccttctccctgttcatcataaattccttgaaataaattttagcactgaaatgtttaagaagattgtctgtatagatatctctcagtttctgacaactcttaccctacagtgctcagatgaatgattggtccttggagggctgagtgacacttttggattgcatcttagatggctagtagcctgcagtgataaatatatttactggaagattctaacttggttaacaaagatcagctgtcctgggagtgtgaaatcttcaaggccaaaaactcttactcatttctgctcttgcagctgagagtaatgcctggcgtatagtaagtactcagtaaaagcttgttgaatgagtgaaagagttaccaaaagattccccttgccaggacagcaccaagggatgtgggcactccaggaaggtcaattaatttagtggagcacaaagaaaatcggtttccttattcattttaaaaaatggcaaagtgattaactgactaatccactttcattaactaaggcagagtgcatgtaaagaaaattcaggagaaaaacattttccattcctctgaacttctcatattctctctgaattttgtcaggtggttttccaaaccagacaaaatcctgagaggcatactgaggtgtttgaaaattagcgacatatgttgcatcattgtgcgcattatgtattgtcagagttttgactacaactctgtgagcttgttgcaaaaatggcagcagtcaatgctaagattgttttcccttttcttttttcattgtgatttaaaaaatgcataacgtaaagtttgccatcttagtcatttttaaggtatagtttaggagtgttaagtagattgacattcttgtactataatagatctctggaacttttcaactccagaactgatactctatacccattaaacaactccccattcccacctaccacagcccctggcaaccatcattctactttttgtttctatgaatttgactactttagatacctcatataagtggaatcatacagtattttctttttgtgacaggcttatgtcatttaatgtcctcaaggttcatctgtgttatagcatgtaacaggatttccttcctttttagggctgaataatatttcattgtaatgatataccacattttgcttatccattcatcacttgatggacatctgggttgcttccacctcttggctgtgaataatgctctgcggatatggttgtgcaagtatctcttggagattctgctttcaagtcctttgggcatacatccagaagtgagattgctggatcatgtaggaattctatttttaaattcctgaagagcctccatgctgttgtccatagtggttacataattttatatccccatccacagtgcastagggtttcaatttatctgagtgctcaccagtactagttttattatgttttcattctttcattttgtaatagtggccatcctaacaattgtgagttagcatctcattgtggttttgattttgatttccctaagatacgcaatttactaatagcttctcacattctgtaggttgctttttcacttttgattgtgtcctttgatgtataaaagtttttaagtttgatatggttccatttgtctagtattttcttttgttgtctctgcttttgctgtcatacataataaatcagtgccaactccaatgtcataaagcttgtcccttatgttcttttctaggagtttaatacttttgggtcttatgtttaggtctttagtccattttgagttaatttttttatatagtacaagatatgacccatckttattttattttacttttgcatgtgggtatctagttttcccagtaccatctgttgaagagactaatcttaccccattgagtagtcttggcacccatgctatggatcatatgaccatatacatgagggtttacttctgggttctctattccattggcctatttgtctgtctttattccagtaccacactgtttgattgctgcaaaatagatatggctttgtactatattttgaaattatgaagtgtaagtcctctttgttctttttcaaaatcgttttttgctatttggggtccctggagaatccatgtaaattttaggatgaatttttctacttctgcacaaaatgsccttgagattttgatagggattgccttgtggttgctttgtgtaggatggacatcttcacaatattaagtcttccagtgcatgaacacaggtatcttaccatttacttgtgtctttaattcctttcagtggtgttttatattttcaaggtaggattgttattttaatttccacttgagagtgctgtctactttgatgaaagcaggacaaatatccatgcttctagcttggtaagaggttgtatcttcccgtgttaactgacaccctaaatctgcttttctcaaakgcattctagcttcttagagttccccgagcaagtactcatcagaatgccttataacttaagctgtgacccatggagctttttcccctagacccagtgctctggggaaggcagaaatcctcataactggtattgtgttcatagaggggaggcctccacatctgatgcaagcctggccattggtgactgggcgcaggttgttgagctctttgtcctggcacatgccaagccatcaaaatctacatacctctactctgcagagtgagagctctggtgctcttagagggcaggaggtggtcttcttgctcctttgtgaatcaagagggccctgagttggggccaaggagagtgggcctctgggtgttgattttctctgtttggtctcattccagctatggtgcacacagggccttgatgccagtgaacctaggtgtttatttagccttagaagaccataaaagggcctagcaggagcttatctcttgctcttcaaagaggctgtgtgaaataagcatgttgacaaatcttgcatgttactgttatttaatcatgaaactttgcagttccttagtgttgttacaaggaagaatgtaggtaattcccaacttgctgaaaacctactcatttccttttaaaaactgttattttaggaaaatgttgttggtctggtgcaatgactacatgtctcttgaacctcaaacaaacaggtgtggtccacgtcatagtcttctagctggctgacttcatggaggttcagacrccagattggcaagggggagggagtgccgtgttttatggcagtcttcccagctaaagctctctgagtccaagttggttgagccttctgttcttggcagattttcctttagagtgtcagtgccacaggccatgttaaactctttggtaatcttctttcctaaaatgtctggtagaaccctgaaattagactttgggcctgtgaacatctcttctgtggcccttttattccctgctctatgtagttttctattctgctaacaaagacagtggaggtcagcaagggaggcatcatcacagaagactttataagaggcttggatttcagttgtgggttttcmacccctacaamcccatcttccagagtgataaaggtgggtggagatggacacagggcctgcagataaagtatttccccttgatgtgggtttctgtgtccccacccaaatctcatcttaratcgtagctcccataakcccaacatgtcatgggagggacccggtgggaggtaattggatcatgggagctggtctttcccatggtgttctcatgatagtgaataagtctcacaagatctaatgctttataaagggcagttcccctacacacgctgtcttgcctgctaccacgtaagacgtgcctctgctcctccttcaccttttgccatgcttatgaggcctcccagccatgtggaactgtgagtccattaaaccttttcctttataaattacccagtctcaagtgtttctttataaccgtatgaaaatggactagtacacccctgttgttagacgtacttgaggactcccttgagatgacgaggaagatgtttgacatccaggaagtaaagaggtgcctgacatatcccaggacacttccatgtgggtgatcttcacattgcgaaaagactgatggactgaagtgaaagcaaaatgtgttgagcaacagtagcctcaactgctatcactgttgctaccactaacatttgttttggatttagtggtttataaagtgctttgccatgggtgttgccggatttgatccatctgtcaaccccatgagatattgttgctgcagtatcacttctagagattagcaaaccacagtgcaccgtgtagtttggcttccccagggtcatgaagttgctcagtcagagccaggtcctaaactgctgatttctggttcttaattgcaagatccttccaaggcacccttccactgtggtagtcactctcaggaatgcgtagaaagagtacatcgatccttaccacttatcaactcaacacataagaaacaaaaatcaagctgttacattgcgcggtaatctgtggcacattaggaaatctgcatgggctgaaaggtcaaggaagaagcttcccgaaggaggtggaacttcgattggcccttgaagaacggatgggatttgggaaggtggagggcaggagtgtccggggaggcatcagcttgtgtgatgtgtcagggtcaggaatgcacactgggcgtgtcagagccacagaggtaacctgctggcttaaccagtgtgcttatgttttaggaaaactrtctcctggtgtcattctgtctttcaagcaaatcctggcagytcagattttctcagccagggtgcaaaatggcagtttgtctctttytgatgaaaggaaggcttcattgtcactggtcttgcacaaagagcccttggagagaggggacagtgcacggggacagaacactaagggtagcttgcgttccytcagaatgattacatagaatcagyggcacttccttcctctgaagtggctttgagtttcctcgaaatagcctcctytgtaacatggttaagggaacttaaggatgtacctgtaagcgtggtgaagtggaatttctgggggcagttcgcagggcattactagatggcctaaaaatctctttgtattttctggtgacaggtytgtgactcttatcctactgaactgtacgttcccaaatcggccacggcacacatcatagtggggagttccaaattccggagtagacggcgatttcctgtcctttcttactattataaagataaccacgtaagtctcgaggcgtgtttttgttttacactttgcttttctagtttatcataagcaggcattttctagctgccttctgctgtgcgtgtgtgtgtgtttgaattcttcagaaggtatgtggatattcctgtgcatggtatgacatgatacaactatgctaagtccttatctcatgtagacttcctatgtttatttgacagtaatgtaatgattcagaaaatgactcaatagattcagaaaacccctaaagctaatcatgcaagtgaatactgtcctaagtgggcaccttgggaatctctttgcttattcagtgctggagatctgtggcatgcctattttagaaaagcccccgaagtccatggcccattctttttctctattatgttttttttttttttttttgagacagagtctcactctgtcacctgggctagagtgcagtggtgcaatctcggctcactgcaacctctgcctcccaggttcaagcaattctcctgcctcagcctcttttgtagctgggattacaggcacctgccaacatgcccagctaattttgggttttttttttgtatttttagtaaagaaggggtttcaccatgttggccagggtggtcttgaactcccgaccacaggtgacccacctgcctcggcctcacaaagtgctgggattacaggcgtgagccactgtgcccggccttattacctgtttttaaatttcatgttcttttgagtatcttcagtataagaaatctttggttatagagagcatgggttttatttttaaaatattatttataaaagccagaattgggtttgtctgtaatagagactctaagtaacagtggctctaagagtatacaatttttttctgttgcgtaaaattaccagggtgcgcagtcctagcctggtagcctggccccaccccacttagccttcaggtactcaagctccttctacctttctgctctaccaccacctggatttggccatggcctgcctggtgcaagaggtcacttcagtacagtcaccacccacacactgcaggtggcaggtgacggagggctaatgttgtgtgcccagctttttaaggaaggcttccaaaaactgccacgtgacacctccctttcatcagaattgcacagggcaggtgtggaagtacagtgttatgggtggccattaaaayagctaaaacttagagttccatttctgcggaggataggaaaacaaattcggatgagcaagaatggtctttggcacccacttttaaaaggtagcaaaaaaccacctttaaaaaaggtggtttaaaaaaayaaaatgttctttggttctagcaaggtgagagagaaactttagtttttaagctagataatatacttctggattcaaagccgagtgaggctataaacacaggagattgtgtgagtgtgtatccacatgcctgcacctacagccggggggtagagcagggtctcagtcagattctagaagcttccaaaaatatctggagcaatkccagcttcatcagagtgagcacatagccctctctgttgctactttgaaggaaaatattaatttggtggtgaaagttctgtgaattggataaaaattatttttagttatactcattgctcttcttcttttcctagccttgaattagggtctaaagtattttattaactctgaatgtatttcagcttgcacagagctggagcactggttagaggcaaaggaagatgtgatttttttttttttttttcggaaacaagatctcacttgtcgcccaggctggagtgcagtggcacaatcttggctcactgcagccttgacctccccagactcaagtgatcttcccatctcagcctcccgagtcactgggaccacgcgtgtgccaccyggcccagctaattgttttgcattttttgtagagacgaggaaagccatgttgcccaggctggtcttgagctcctgtgctcaagtgatctgcctgcctyggcctcccaaagtgctgggattacaggtgtgaggcgccgccccttgcctcttttttttttttttttttttttttttttattaagataggataaatagagataggaagtttcatgatgttgcacttgaaattaggttgctggtaacatgcacattttttttttttgtagcatccattgattaaagaagagagaagatgaatccaggagagggagaaacgatcttttattgttgtttcagaggtgttttattgttgtctgtagaatatttaaaaagtgagcacagtgtgcctagcaactccctttttatattcttgagacaagggacattttactttttgtcaatgtgagtagtatcaggattaaatatgtattgtctcagaaagagaatttttagcagttagacctcagaggcagcttcttccccggctgacctcagacccacatggctccacgcctgctcccccaagtgctattttactgaacctccaggcctgaaaatgaactcacacagcatagttagagcttaagagtattcattgcccatatttaagattttaaagcagaaacaacctgaagctctagctcttcttccaaggtacagaacagagatgtgtctcgaagcagcgctgcgtgatcgggttaccccagggaagtccygagtgagcacacacctgcccgcccactctcccaccccatgaactgaaatctattttgcaggtggaataatgatcaaatttgtgttttataacaatgtttacattttaatatcaaggttaattatataaatgcttctgatttgactagggcttttcctaaagggaagtattattaccaaaggtggatttctgtgcttaatggaagacactgaaataccagagtagttatctgtgctgtcattgctcatcgatggccgtatagaaaacaggcagtctcccacaaaaagtaaacaggtacacattccataaatttgctgatctgtctttcttctctttggttatttgagacattttaggcttaaagagtatgtattcctacccccaaagaatttatgcttatgaataaggatactacattttatagtgaaaatactgtttcccacgtatgctaccaaagggacacttttgattttggtggtgagatgacttggctaattttgggcactgggaactggtgatcagattaggagaagcttgaagtgcacgagattttatgaacctgaagttctgttcaatataaaggcccctgtggagggtccatctttccctttgtatcagctgttaccacatgtastgttaggttggtgcaaaagtaatttcagtttttgccattacttttaatggatgtaatcacattctttcacccctgtggtgagggagggattcctgctctaggttacagggacagccagacacacagcacttgacactgggcaggtgagatgaacagtcacatatactcactgccaaggggaggaggacaccacagcccatgaaggggcacatgaggttgcgctgaggagcagagtgacagccaggggctgtgagaggcaggctgtgtagtatcaggagcgtggggtcacccttggttcccacaggaggatgygattagcttgcgtgcatcattccatgactggcagggaactaaaacctgcttctgggggacgggcaggaactgcacctggtctgttggataagaattgtttcacttgggaaccttacctgcaggagcagagcgtgrcagggaacttgcagtgaggccatttgaggccctctcggttttaccagatgtcgaagcaacacataatattaattttaggccttacgcacatgggttatgtagagccacgtgggctccctttgaatatccagctattaacagctttatagatcatggttagagatgcttagtcatgtgcgttcggaattctgtgcatctttctttgagagttcttagaattgctatagcctttgttctttattacgctaggattttttttttaaagtttcactttaagatggtgcacagcatggtctcccaaatttacagtacacatttcgaggaaacaaaactctagaagatttccagtgaggcaactttccttaggaaaaatacagaccttcatggtctcttttcataatgaatacttattgaaacttcctatgtgttaggcacagtgccaggagttttacagtgttatgccccttctcacactctgtagttttaatattttacccattttatagatgagaaaactgaggatcagagaagatacataaattacccaacatcatacagtgagtgagagcacaactggtactggaagccaggtctttctgctgcatctttatgttttgagatggagtctcgctctgtcacccaggctggagtgcagtggcatgatctcagctcactgcagcctctacctcccatgttcaagcgattctcctgcctcagcctcccaagcagctgggattacaggcgtgcaccaccactcctggctaatttttgtatttttggtagagacaggtttcaccatgttggccaggctggtctcgaactgctgacctcaggtgatgcacctgccttggcctcccgaagtgctgggattacaggcatgagccactgtgcctggctttatgctgtatcttaataaggtattgtgctgcctgacctatttcctcccattggggcttgaattactttgttaagaattcaggatcaggaaatactctgtctggattcaaatcttggcttccctatttactaactgtgtgactttgagtatgttacttaacctctctgtgctttggtcacttcatgtatcaagtggagccaataataggtcttattgtatatgataattaggctaattaaataaaaatatgcaaagttcttataatagtgcctatcatataaacactcaaaaacagtagtaagccatcaaaaawgttgaataktttaattattagtagcattgtaaatgagcgctatcccttccggtttacaactgaagagtttttaatctgtgctctgacatcagtaagaaatgctgccaagtaatagtaatactctttggataatctgtctagggcatgtataggtgcacaaaagcactgagactacttactgttctgcacacaattgaaaaccacatgttagcaattactgattcaakgaaaaattccatttagatcatatctttagtttattaagaaaatctaactacaaaataccaaaaatgtagtctgtttaatatgcgtgttttaatttatcgaccacattccacagtatataacagttccagtatagttcctcatttaaaactagctgttctaaaccagaagataatttgaaatagttgttgtccctaaattgcttcattttgtagttggtgtctcactgctttagtgaggtctggtgtgtgtgttctcaaattctcgtcatttaaatgtgttaccatccccatctaacccttctgatggaatctaagattgtctggtggcagctgtccttaactaatatttcttttttttttcgagatggagtttcactgtcgcccgggctggagtgcagtggtgtaatctcagtgcactgcaaactctgcctgtcgggttcaagtgattctcctgcctcagccccctgggtatctgggattgcatgtgtgtaccaccatgcccacctaatgtttgttgtatttttagtagtgatggggtttcaccatgttggacaggctggtctcgaactcctgacctcaagttatccccccgcctcggcctcccaaagtgctgggattacaggcgtgagccaccacactgggctaactaatatttctttaacccggataaagtatcatctaaagccaactcagaattattctctttccaggaagaattccctctgagcaggtggcagaccctgaccccttaaagattaaaggaaacaggacccctgtgaaagccatctgtgtcatttgmtttctggtcttcggacatagcttgccttctgcttgccaagtccctcttgatccccatcttcacttccccttgctcctggccttgccgtcgcttgccattctgtctgccgtgcccataccctttgatctttttctcctccccaccagtcaggaatgagccaccctggagtgactctgctgctgcccctttgctttgcttcccacgcccacaccttgtccccctggattctcaatctggctgtaggcctcaggcttcctttaaccccctcagtgattgtccgtctctgcagaatggtgttggcgccctcagacaatggcccctgtaatatgtccagccattctgtggttctccaacttcagagctagtgagaaatgtccccaccttctccaacaaggagcacccaagccctttggagagatccaaacccatgttcagttgtcctgggttgggmttcaaagacaattaagctatggttggactaagagttggggtgccccttcatggatggaaccctgcaatacaagcacgctgaacaggctgtgacatgacaggactatttgcagtgaaactttcccctccatattatcctgcatggaggggttctgtcactgcctgcattctttcacactgtggacttacagtctcaatgtagatgctttgagtcattcaggcattttattgggtgttttgtgtttaagtgttaaaacctaaatccatgaaagtactttgccacaaaagccgaagttttatagctgcaaggtaggatctgtactacctactcataactcagggaaatgtttctgctcttctagatgtcatctgacagtgcaatctactctgtcagaattgcagggtacgggacttggggcagagaatgcagattgattcmaaaaaaaaatcccccttgttctaagtagacttgagtcagcacaggtatgtgcctgctgtccttcggtttcaaacctagcagcaacctgggctcttgtcacygtgaaagtttcccgtttagaattagaattggtttttggtatttgtgatgtttctagatgggctagtttaaaaaaaaaaaaaggttggaaarcattaaaaaataatttctattttattaatgtcaccattaatcgtatcctatgcatttgagaacggttatttattttgtattttttctttcagcaggaaaatgaagcaatatcagtgaaaaggaaagtagattatttaaatggttttgaatatcataacttagaccctatckaaacatctctacacattcctaatattttgcacagacaggttctttgtattgcttgcccattagtggtttgacttgaattttaataaacaaggcttgatttccagaaagctgtatcacgttttcataagccgaggtggactatcagtgagccaagggctctttgttctggagacacacgtagagtgtctctcatgggtacagttacctgatggtgytgtgttgctgtgacctctccccctaggcctccatctgccggagcagccagcccctgtccggcttcagtgcccggtgcctrgaggacgagcagatgctccaggccattaggaaagccaatccaggaagtgacttcgtttatgtcgttgacacccggcctaaagtaagtgtcaccgttgcgatgcatgtctttgcacctgagttgtgaaactggagacaggcaaaggctagccgactgccatctcttgtgcaggttgcttcatctgcaaaggggcggttcctcttggcatagtcagtgtctgggyaccctgctggctacttcctggaggtctagtgcacctgaagcctccaactatacaagtacatttcatatttcccctgcccctagcattgtgctgggcacacaggggcacccaaatgaatgtggcttcattttggagattgtgctcctaagtataccgtattagtacttggtttctttctaaaacagccctttctgctctgacaataaaattcactctggagctccagcagttcaattgttgcgaagtactcagctattatttttcaaattcaacttgtagtaatctatacctmtgacttggaaagaactataaaatataaggtaaattaaaaaatatttttttcataaaaagttctaggtgtgtaaaaaggtgtagaaaaagatctgaaaggttaaaccctgaactctaaaaattccatggagaagggagtaggatttgcggacgtagagggctttctacttgttgattgttagaaaagtattagtttacaattatgtatgtattaatttattagttttctaatttaagaaaacgaataggaaataatatatctagacatcaaggagtgagccacattgatcttacacttacctcccactcagccttaacttttttgtttttaaggagaatcagtgttaagtccaataaaattccagtttttctccttagacccaagtcttctaaaacttcaacaagtgaagtccccagagggatggacacaaagtcacctacaagtgcattgactacagcagacagaatgagatgacagaatgaaacgtcccttagtcagcttatttgcaattgcactttcctagccactaatgaaaatgtgcctggacctrtgactgaggagaaagatgaacgtccagttctgtctccttgtatggtaagcagaggagtccaggatgtcctgttaggcaacaagagtgggatagagaaattatgtttaatcttgttaaaagaattggggctgggcgcagtggcttgtgcctgtaatcccagcactttgggaggcgaaggcaggtggatcatctgaggtcgggagtttgagacaagcctgaccaacatggtgaaacctcatctctattaaaaataacaaaaattagctgggcatcatggtgcatgcctgtaatcccagttactggggaggctgaggcgggagaatcgcttgaacacgggaggcggaggttgcggtgagccgagatcgtgccattgcactccagcctgggcaacaagagcgaaactccatctcaaaaacaaaaaacaaaaaattgagagaatgtataccacactgtttacagtggtttttcctgtggggtgagaagttcattttaggaaacttttcacttcgtaagttagagtttgaaattttttttcactatagaaaaggtaaaagagcgtaaggactttaaatttagttaaaaatagagttaccatatgaatcagctgttccttcctaggtatataaccaagagaaatgaaaacttatgtccacataaaaacttgtatgtgaatatttgttcattattagtaatagcctaaaatgtaaataaccaaatgttcataaatggagaatggatttacaaaatatggtatgtccattcagtggaatattattcagctataaaaaggaatggactatggatacatactgcaacatggaggaaccttgaaagtgtcatactaagaggaagaagtctgtcacaaaggaatcatgaaatgctttcaacaggcaatttcagagctattgaaagtaaactgatggttgccgagggctgggggaagggagagaaatggtgagtgaccgctaatgggtagtggatgtctctttagggtgatggaaatattctaaaatgagatcatggtgatggttgcacaactctgtgggtataccaaacaccattgagtcgtatgctttaaatgggtgaatagtatgacatgtgaattacatgtcagtgaaggtattaaaaaaagaacataggaaataaacattacaacaggaagggtaaaatagaaccagcagctcaagtcatttaaaagtgtacactgtggggaagaggtaattatagacacggtctacactcattggtgatcccagaaatcacgagaactgcatcctatcctttgtgtggatactcaggccttggtgattttcacggattctctgaacttcatgtcaccaagtattatgatttgtgtccaggataatggaatgtgatgttttcctagagtgagatcagtgccctactcgtcccctcatctcagaaccatccagtcttcttcggagcaaagcacacagcgggagagaagtgtgtggagttactactcacggatgccagatgagcgaatcagtcctggagatcagtgatgaaaccgataccacagctagatcacattcacattctactagattataagtaaagggtcccttccttttaaattctcagagcaygacacacagataaaagtttcaaactgaaaaaaaaaaatagctcctttgctggaagattttcactgaaacataccagaaaatctctggcttttactgttctctgtcaatttgtgcccttctctctggctcattgtgtttaaacccttccttctaatgtgactgccttcccacctcttcttcgtaccctttgttgaagcaaggtggggctgttttgaatttcctaatagttacagatgatttaatgattagctgcttagatatactgaagacaagataagaaaaggaagagaaaagacgggggctttactgaggagagattgggaagcctgtttcttaccctgtttttttcagatttaaataaagccagacagattcacctactaattttaggaccagtgatccagatatgtactgtgttgtgtaaaccttctaggaaacgtggcagctgtagagccaggcatattccagatttaaaataagttaatccaaaggatttgatttgaagggtatatttagtgctaagtgtgtttactctcagcgatgagtttgacactgatccattaaagaaaactggggtttcrtacaagccatgccctcttctcatatttatccatgyacgcacacttcacgtgagttttaaactgtttrcttagagctttcattcttttaaagactgtgtatgttgatttttgttccagagtgtgttaggcctccttggtagccaggagactgagtttgctctagaaggtgtggaccctggcaagcaggcacttctcaggtytgctcacaggtttcattaaaaagaaaaaggattaggagctgacctgaatcgttcctggcctttgagcaaggctagccccacatragaacttccagagctgcctgttcagatgaaagcctcagaattacttgttgacattttttgggagacaccagcctgggcaacgtagtgagacccccatctctacaaaaaacagaaaaaaatgagctggatgtggtggcatgggcytgtagtcccagctatttgggaggctgaggtgggaggattgcttaagcccaggagtttgaggctgcactgacctgtgattgtgccactgcactgcagcttgggcaacagagtgagaccctgtctcgaaagaaaaagaaaaaattgggagacaaagycaatgaagtcttcaagcatgtattgaatgtcaattccaaaaaaaaattatactcttcagggcacgtattagtgctagggtgtggcgctttaagaacatatgaaggtgttgtcgcagtcttcgctgaattttcaaatgarggctaactcactgcagccttgttcatgactttgtcattaatttgttctgggactttgctgagcttgtaaaaatggcaggcactttttttttttttttttttggggacggagttttactcgcccccaggctggagctcagtggcacgatctcggatcactgcaacctccatctcccgggttcaagtgattctcctgcctcagcctcccgagtagctgggtttacaggtgcccgccwccacgcccggctaatttttttgtatttttagtagagacggggtttcaccaggctggtctcgaactcctgacctcaggtgatccgcccttctcggcctcccaaagtgctaggattacaggcgtgagccacggtgcccagccaaggtactttctcatttagttcttttaagaatcctggcaagttaggagggttttgttttgttttgtttcttttcatggataagggctagaacttaaagaggttaagtaatttgcccagggtctcacagtttacattccaggattcacatccaggcttatctaaccccagagcccacactcgctccgtttgaccatggtgttttttctgtttacaaaaattctccagcagagcctcgtttccacgtggaagctctgtggggttaccacctctgagcacacgcctgacgaggccagagaacctcccagcagctcctctgacgcagccagggccagcggagggggtgctgaggcatgaagagaagggccgagggcgagrcagcgcttgcctccgtgacgcctggccttttgtccttgctccttctccagagactttgctgtggttctgccccgtgatttcaccaggtcagcgaggttttagttgtgtaacaggatgtcacgtgggatgtttttctttttctctggaattagtgagtaggtggttcctactcgctgagtcctgggaggggtcacctaggaaagtcagtggtagagatgaggggtgcttgagagaggggaatcgggggtctcacacttgctggtggccgtcatggcagcaaccagagtgaagagaactggggcgagggcagtgtccagtggccgtggagcaatctgtgctccctccttttggcagggcaaggatggagaaatttcctgtgggtccagtggagcctgaggaaggaagttgagcatgagccatcttgcttcagcattcctaaaagggctcagccgccgggtgtcttcagctgtaggtgactggggtgggtgtgctggtgagggaagttgagcgtactggaatagactcaagccaaggcgcatctcctttttcagtgagatgtgtactccctacctccaaaaacctgcatctataccttgggagattgagcacttggacgctatgccagagagggaagtggtgaccaactcatgtcaaccgatgaagagagaattggaaccctgccgagctttccaaagagaaatttacctcttctcttctccctcctctgcacccatcctcccagtacacagatagggcctacaataaagaggagagggagggtgggccggagcaaacccctmascagtccacacagcctgtaaggcggcggggaagagctaattttgcgtcacatacgggactggaattctaagttaggccggatggagattttctatctgaatgtaagtaaacctgatgctattaaatctgcccaagaggtccttagcgkgtagaaaggaggattttgactagcacagttgtagagaatagttgcaaggaataaaatcaactcacatgtttgtgtctgcaccacaagtgaagtttcttcctgtaaccagttatataggagggagagagaaagaccgtcatttgaccacctgtgttagggcaagaccaagtccccctcctgccaagatcagcttgtacggtcatttcccaaccatgtcagcgtaggcactgtcattcttcaggcattaaatgtagctgtggaartggtagacttgaggactaaggcagtgaccaggctgacctttaacctgataccaagatgaacacagactgagtttttctacatttgattgattcagggttagggtgagaatctcatgctgtttcttcacagtcttggcctgctctccccgggcctcattctgttatccagtcatttatgcagttgctcagccggtcagtaaatcttccttgagtgcctgttccatgccggtttgaaggatacggatgtggccatcaatgagacactcagggcccctcgtggagcctgcgttctccgtccctcctctctgtsagcgctgaggttttccgtgcccatccctctctgctcgctccttattcctgtgcatcttctctgttgtggacactaaatcagtctccagtttttcagttagacttgctcaaaatcctggagttgctctccgctgccacaggtggagcctcagttccttggctgggcctgttgtagtggaccctcagtgctttctagccttccctcttgctgtagctgccacacaggaaccttcgtcttcacctggagtggttcgctcattggttatgtagaatgccctcccctctctctccatccttacagattgtgttaaagtccagctctagctttctctcttaaacaaaacgttacccctgatccccaggccgacagagtttccttagatttcaactcctgtcattgtcactgtctctcccgttgctcagctcttgcccagtcctggtggatgtcatctgggaccactgggtgccatgtgctttcctttccattgtcagttctaagctgaaggcaacaggaacagcttcttttgattccacttaacgcctggccatagtaggtgtctatacagtgttgactttgcttcatttattaacttctctgcacccaaagacactgatattatcaaacagcaaawgaaccttgtgttaggaaacagggtatttttgcagtcctacttttcacctatctgttgtgtgtttcttaaacatgaattggaactgaagtgactacctttattgctttatctacttgagaacttttaggacctgaaatgcatagcttttctttagttgtgaaatggagttctcagtcaaagggacagaggaccgtatttgatgtagtaatagcgatttgtttatgtaagggatgccgtatcttactgcgcacacatacacgtaaaatgtccaagataacattgaatttttattaattgtaaaaccgtatctcctgctttgagggttcagcttttgctacattatcaggataggtcctgtaaaaaaggtggagatcctaagaaattacacttcagctggtagatgaaatattgccaccttctgttcattctgagaagtgcacattgatgttcaggaggttatttgtgttgctgctttgcttttaagggagattaccaatcagttctcccagatcaaggataatcagctatttcataatgtgtacatggagtcttaattataggttaaaataatattttaatttttgtttatgtttaaaaaatctattctacattctaacttttgtagactgtgtagtctgtctctctttttttttgtatctctgcctgggataaccctcctgtcccttgtgggtgaaggaggagaatgatcagtaacatggggtcttgctctgtcacctaggctggagtacagtggcacgatcacagctcactgcagcgttgacctcccaggctcaagcagtcctcccacctctgcctcccaagtaggtgggactagtcacatgccaccatgtctggctaatttttgcatttttttgtagaaatggggatttgccatgttgcgcaggctgatcttgaactcctgagctcaagagatctccccacctctgcctcccagaatgctggaattacaggcatgagccactgtgcctggctggtttttctttcttatgctttttaaaagagtatctctgtggtatgtggtgaawaggcttcacttgaattagtcaagatacagcataaacgtaaggttcatgtcacgtaaggatactttcaaatctcctattaattttatttatgaygcttgttataaaggataaaccaacatctttgaaaaataattatacaaagcagtgatattttattagttttggaagaacaatgtctataggtaattttacaaaagttttccctataaaatatttatacttcttaaagtgtgaacataagttgtcttaaaatgcattattttaatatttttttcttgattaaggccaaactctttattctcgtagcatgcctgggagaaagatgacacccttttgtggatgggaacagtgtcctgaggggctgatgtggcccagctgatgtcacataagccacgtcatggagcagggctgctattgaaatgtgaggtgtctgccagcctgggctcctatggcaatggcttatcctctgctgtttttttcacttctaatatactttatttctattatttcaattacaaacttcatatatgctctcggtatcaatgaaagattacaggggcatccaaagtagtactgatggcattctcctgtcgcctgccatgctgtctttctgctgtaattgctgccaaattggtaccgttttctatacatttttattctgcttgataaacacgcaaaaacttaaatacatatctataagttggttttataaaaatggatgattgtatgaatattattctgtagcttactcttttcacttgtcatgggccaatgccaagtctatgcacagagggtctctgacttaatggttcgacctatatgattttgtggctttttacaatggtgcaaaagcaatagacattcagaaagtgtacttctcttgtgatgctgggcagcagcagcggcagcagctcccagtttgccatgcactttwcacttacggcattttcaacttccaatgggctcatcatgatataaccccatcgtaagcctcagagcatctgtctgtctgctgtgtgatctgtgccctccttcttggtcactgctcgcaggtcagggcatgataaaccattgtgtatcctgtcattgtcctattgagatagtcatgggttttcagcttttttcaataaacattcttgggcatctatttttatgtgctggtacttttaattttgtcagacttttaggagatctgtgtcaaagaacatatgtgtctttaactttaaacttagctcttttagcttttaaaaagtactattgtgcactgtgcttttaaaagcagatatttttttctggtggtgagttctcagygtaggttctctgcctgggttagccctcctgtccttggtgggtggaggaggagaatggtcagcgaatgctgttttctaggatgtgatgacctgcttaataaaatagcaagaatgtttacacattctagaaaccgatgcatttcccagctaaagtaggacttgtccccttcttgattttagccacgcaggctaggacagtgtttggatttaataaacttcttcagataccactgtgacttaacctagtttgcacttggagaccccaacttctcatatgcaaaattataataatgaaagygatcaaaaagcccaatagatctctagatttaaataaggcggctggtggaaatgtctctggagacttggttgcattccctctcttcattttattcagtaattcctgctcaaggtttaactgggcatctgagggatcttgtgggcaaattagaatgatgcaaccattcctatttgataacrtgtttattggcaatctaatactagaagatataataatgtatagagccttattttgacagctgtttctgctgatattcttctgccaacctaccggttatgtgtggtattaaattggactacttggttccatcacagaattccacattcagtttggcatctctgacggggactgcaagtgacatctccagaagggtttatcagtagactgctttccagctaagaaaatgtgacccacactgacaaattcatgctgttgaatataagctcagcaggagtccctgaagctatgtagttcagtacaaggttgcagtgattcaaataagcgyattatgtttccgtacmtcattctgaatgctttgattgggtatccatgaaatgttttggttgtttcatcattgtttcatcaatgtaattgatgactgttctgttttgctgaccactgcagcttaatgcaatggcaaatcgtgctgcagggaaaggctatgagaatgaagacaattattccaatatcaagtttcagtttatcgggatagagaacatccatgtcatgaggaacagtctgcagaaaatgctggaaggtaaaccatttccttatgcacagcattaaaatgcagttaagtattttgatgccaaaagggaataagatrgtcttgattttaaaatgtttttacataggtgtgataatttgggaagaatatcatgttacagtggctttttaaacacttaagaacgtttctcttatttgtaagcatcactgtgatgtggttttgtcgcttggtggttagcagtcagggactctacaatkgtactgaacatctaaggtcaaagtgcacagggatgtttttgtttcttcctcataatgttagtttgatccccattcaaggccatttaggaataaggcaatcctacatttaaagcaataaccaaccattcttgtatggagatcaggctcaaaaactgatccttgctgaatggccattcgaagggagaatatcggaggagctgaccctcatttctaaacagcagccaccacaatacacatgcatgtaacctcccgccacctccacacacactttgacatatatggcgaacaygacaagacacgtacccacagacttatatactcgtgtggacaggaaattaaagagatggattatgtaatagagaagagttattcatgtggccaaccagccatatgctgatgagcagaaattctgcatttcaagcaaaaccagcttagtccgctgcttctgctccttgtgatcacagtgaccccaagaggaatctgtcgctgtagtctaccacttccggctctgcgaactgggaaaagacagaggatgcagaaaccatggccttgtgccttggctgtccatgcactgtctgcgcttctggggaaagccctggagagctggagctgggagcccgggaagtgggctgtcttgatgggaaatgcaggctctggaatgaagagggacaaataaggtgctgaattattttttccaggaatccacgtttgctctcagttacttaagccgttcttcgtttaatcagaacaccctaacgttggggttggagaaatctgagtgtcacaaacaggcctaatttccattctgtttcctggactttctggttcatctcagtcattatgaaactttgaacacatcagttaacttgtttggggctgcattacctgctgcagaatgacaggattaggccaatactttctatgggtcttccagctgtgacagtttgatgcccctctgtagcagaaatcccttcctacatctgaaaacatctcagccccagagccatttccatcttctgtacataattggcagtcagtctctcaggtcacagtgacaatacctgacattgtctcaggtcacagtgatcataccctgggcatgattatttgagcagcttcaacttttggagattatcatgcagagtttggctgttcctgctacaaactatgttttttatgtgttgaaaaattggactmcttggtactgttattggaaaggcagtctgactttagtctgaagactgttcatcatttatcaggacccttaagttatttaaattttttatttagtcatttcataagatgacctggagaacataaatattcttctttgcagaaaattgctcctaccagtgctgatagcatacacatttggcttttgtttttaaatgggtaatctttggtttctcgtcaggaaccatttctcctgcccttatgcctgtggtctgacactactgttttctraagaacatgcaaactgaccaagttctggagggcagctgtctgtttcataagggaacatggtgcttgcacgtaacttttccagctacgtgcagtgcagtaggctaggatatctttctggatgccygtacgtggtcttgaccaatgtttgactatctgtttttaccgagtaaattataaaccattgcggaggctgagctgatgatgaagtgttgcaatcagacccaccttctaaggcttttcctccttcaaacagctatccttggcatcaaagagatatgaaggctcatactactggtcacttggtaggcagaggaatgaatgatgcgtttcattcaygattattattttctgaattattttttactactgttatggatataatcagaatagattctgaataacagaaaagtaaaattgtttgcgttctggtttcaaacagctgtctgtgagcaagagctgcaaggtatttcatcagaaactgaaatctaggaccaagttcacatcctgtgtaggtcctctatagagatgatctaattttaacttccatttgtaagtctcaaccaaactatttttgtgggatctgtatttcgtaaggagagaaaatgatgcctttcagtcacatagcaagcaattttgttatttaatgaagtgattttcacgatagtttcccttttgataatatagatactggcttttccctcaagtaataagaggataccctgtattttctttttttatttaaaatttttaagttctggggtatgtgcaggatgtacataagtgaacgtgtgccatgatggtttgctgcacctgtcaacccatcatctaactgttaagcctagcaggcattagctatttttccttatgctctccctccactcccccacccccgccaacaggccccaatgtgtgttattcccctacgtgtggccatgtgttctcattgttcagctcccacttttaagtgagaacatgtggtgcttggttttctattcctgagttagtttactgaggataatggcttccagctccatccattaaaacagtccgtagaagagcctggaatagtccctttcaaggccagcctattattatcagcagaggtggagcttttacctcttaggcatcctgggtgttggggaggaagtggtgaagaggaaggtggaaaggtgyatggagttacttgcatctctccacttgttgaggktgtgccccactgggacacccttcatatctgccctgaaggtcagcaggcactgataggaaagaagcaacagggacatcttcctcctctgccaatcaacttgccatcttttggaggtcacctagaaaatttcactttctccccacgagtagctttgtgcctgcctaccttccacgtgactgttagattaatactgttggtcattgtttcactgaccacttattcatcaatgtattcattaaactaaaaattgagcaactgctctttgccacacttcataagtattttcatttaaatgattgtatgagattttcacaacaattgtgtgcagtatgtggtattatctgtactgtatagatgaaaaagcataattttttaaaagagtaaacagtaagttgaaataaacatgtagataaacatgtaaatttgctctggtaattagagaaatgtaagttaaaacctcaaagtaccatttgccwcccaattttttacaaattaagatattcaatactcaaaagaatgtggtaaaactagtgctctaaatatttatcgtattatttaaattggcttagacagacataatrtatttggtttagagatagttttttttttwaccaggtttcttcctcttagggactaatccaaaatacgtttttaaaaaataaagatacaggaagggcatggaggctcatgcctataatcccagcactttgggaggctgagacattgaggattacttgagccacaggagtttgagaccagcctgggcaacacagtgagaccctgtctctacagaaaatttaaaaaataaaaaaaatcaaccaggcgtggtggtgtgtgcctgtagtcccagctgctcaggaagctgatgtgggaggatcacttgggcctgggaggttgaggctgcagtaagccatgatcgtgccactggactccagcctgggtgacagagagttaggcyctgtctcaaaaataaaataagatatagacatgcctatgttgatagtagtgttttatttatmatagtagaatattggaagccgaatgaatgtctaacagtagtagactgattaattttacttcaccttcttgatagaaaagtttgcatccatgaaaaatactaaatgtgaagactatatgtactaacatgggagaatatgtataatgtaagcaaaaaattcaggtcgtaaaattgcttgcatattcttattcactatacagtaaatcatatgtctgaagaaagactaggagagcatgtgcagaatggtcactgcattaccaaggaaagataagactgatgttattccctttttccctctttatttacaaaatacttgctatggtcggtatattccttttttaaaaaatgatatttattatctcatggtttctgtagggcaggagtctggatgtttctcaagcataaattggaactcagggaccctcttagcatctttcaaggctgcagtcaaagtggcagctgggctgcsttcycatcaggaagtttgaacagggaagaacctacttccaagcacttatggttgttggcagaattcagctgagggccccacatgttggctgttcacagcatggcagcctgtttcttcaaggccagtgggagtgcctctctccagttacagagtctggtgtattacactttkaaattgtcttttaraaacatcctttccagtatcacgttacaaagcagtattttaacctagcactttttatcatattacagtgatcgttgttgagtagtgattctgatgtaagacaagctcacagcttgtgaccacamggatcattatatgaactgcaaggatcattataaccacctcacatcgtaatgaagatacgtttatggaaggcttactatgtattggacacggttcagattttttaagctgtatttactcaagtaaacctcattgaagttgttgttgccactcttatcttcattttacggatgaggaaattgaggcacagagcctgagaaacytgtttcagctcaaaatagtaagtggtagaaccaccatttttacctacttamtgtgagtgcagatgcctcactcttaaccaccaggcttttctgcctctcgaggtagtgggttggaatggaaggtgccctggcctcagtgtgtgaagtcctaggtttgggttcttgattgagtctctgcgtaaacttgaacaaatctcattttctgtatttgtaaagcaatgtaagcaacatatcttccccactttaattcatgatcattaaaaggatttcttgcaaactataaagtgctttccagtgtaaggtgggtatgctttctcttgggaagcaataatgtatttgaaaataagcactcaatgaaatggatacgttgatgggctgtaggtgaattcagtcagccaggcaagtatttggtaggccccatgccttcctatgggtacatttgctgaatttctttattcaaaagacatgaagtaagagcacagtttcagaagtgtttgtctcgtgatagggtctgtgtgcaatcagcgcacgttcatcaaaaatgatttaataaacaagacataggcctttgggtattttctcagcaagttgttctgtggacttgcaaatcttagcctgacagtggagcaggggaagtgagcccagagcatgtgggacgcaggccccgcgtcagctcaggcatgtgggcgatcgtacggtcagggactgaatgaaagggggccaagcagatccattctaaaagactggaatctttttagcaggcctcaaaatagaaccacttaaaaaaatgttccctgacrtgatgggcattgactgtggagaatgttttgtggcaaagtcaggtggccctagagatgatacccgatctgttcttccacgcaaaggttttgaggcctgatggattgaaatcttcaktcggtgtggaaaggatggttggaggcagagcacttggagttgtcgtgggaggcaccatcgtggtgggtatgacggtcacatgttggatgcctgctctagtctccctgccaaggtgccttggaggcagtctaaagggaagagccccggacacacccagctccagtggtttctctgaaatagttctctctgcttggagaggagaggytgtggctgtcggttccgatgtcccttttgctcgacacattcttccgtacctcatgtctttatggagtgctggctaattcaaccttgaggaaatggaagatggaytcagccctttgtagatattgcaaatttaagcttttcatttaaaagtatttcttttrtcacattacctgcaaatttatgctgtgaaattctaccagatgtgagctaatgaaaagctgtaaaggttggtccttctccagctttctgtagtctcagtttttaaccattattaatttcctcagattacttagctattggaggagataaccaataataacctgaaaatctagtcatttctttctcaaaatttggcaccttggcctaggtttccacatagaaaacccattttcccattaaagtggaaataggtcgctctacatggaaatagcagtttgtatggcctattaacaagtgttctgctagaccagcagcctgttaggcttcactggctatcgacatggtcatttagaagaaggaaatggatcaagtatgtgtgcttttgcctctctggtgttgtatgaggatttcaaacacagctgctcaggtgctggatgggatctgcccatctggaccgtccaacactaagcgcagaggcagaggctagaggaagagcatggatgcatgtgcggtggaatggattccagctcagttatttactggctatgtaaccatggatggcctgggaaacctcttgaagccactgtttccaatctgaagatggagagtgcatctaccctgtagggtagattatgcagagcctcaggcacaatacctgcttgtagtaagtacttaacacacaggagccgggacatttatcgcagacgctcatctattcatcagacagttactgagagtgttctatatgccaggcattggatagacaagtgcttccttcatttattctgaaagaagtaaccaattttgacctagagcagaaatcatggcaggaaggaaagatcttgcttgtttattagtgatgtcactgagggccttccctgggtaagtcacattgaatgttttaactggatgtcaaagccaaagcgtttgacattatcaaagggacaaaagaaaagaaggttatttaatgagagaatagtagttatatttctctcagcgatgttttattttgcagtgcactgagacagttcaaagattaattttaaaatgttcaccttcagaattattgttctgttaaccaagatggcagattttcagagaactaggagagcttcaaaatgagtgcttgtagaagaaagtgtagcccatcaaactcaagacagttgtggctaatgttagtgataaaaggagctttctccataaggctctaggtggggtttggcagttcgatatttgcttgccagtgacaatacagtctcaaagttcataggagtgttggtcctggaagctttctcagctggcrtgaggtgtgtggaatgaccccccacccctgcggcctctgctgcaagtgctgctcattttaccacttgagttactggcagccaccatctcagtcttccgggattcctggcctcctctctagtgcctaccactttacatccacgccggactttccagcctctcaacaccccatcttttcccagtgtcgacttctcttgtgccatttgcttggagttccctgttagattttagcatcccttaaaccctaccttcagtttgrttcctgttcatcctggctccgtttgtatattgacttttaattattctctattttttagtgaaaataatatggaaagtggagtcaagggatgtagatttcgaccccagtgtatttgctgtgttgctagcatctgagcccattactcyttaataaatcaagataattctgttggctgggtgtggtggctcatacctgtaatctcagcactgtgggaggctgaggcaggtggataacctgaggtcaggagtttgagacctgctgtccgacatggkgaaaccccatctctactgaaaatacaaaaattagctgggcgtggtggtgtatgcctgtagtcccagctactcaggaggctgaggcaggagaattgcttgaatccgggaggtggaggttacagtgagccgagatcacaccactgcactccagcctgggcgacagagcaagactgtctcaaaaaaaaaaaaaaaaaagataattcwatccactctagatgggaggttgtgaaggttcattaagatgaaagcaccaagccccattatttacatatggcagatgtaacagaaatgggcacacacatacatatatttttaaaataagagagaggggtctccctgtgttgtccaggctgaagtgcagtgatgcaactgtagctcacagcaacctctgactcctggtctcaagtgatcctcgtgcctcaccctcctgagtatctgggcctacaggcgtgcacctccacacccagctaattttttatttttattttttgtagagatggggtcttgctacattacccaggttgatcttgaactcctgggctcaagcaatcctactgccttggcctcccaaagttctgggattacaggcacgacccaatgtgcccagccacatgttttttatttgttgcaaagttttacacacctctgcagttaatattcacttttccttaccacgtgttaaacctaggatagtacaggttaccatgatacactgtgaatttgtctttagacacaaaaattcacattcatawatactaatagcacattattctatgaacttgctgcttgattttctttaggccattggtaaatagtattctggaacacatggtgatgagcttgtgtagcctaaacacttcgctcgtacaggccataataaagtcctctttgaatggcttcacctggtggatgttcagtggagggacattatcatcattttgccagttctctgaagactgtyttatggatcttggcttcatgactccaaaatgggaagaggacagagccaacaggcagaactcagacaagtgctgggctggtaatcaagggagggctgtatatgtttcaacttcagatctcagggtacaagaaagaccaaccccacagggttcaaatggagactttttctgcaccctcactgaccccaccagcaattgcwtaggagaaaataagagtrgtayaggaaatacctaaggcagattatctgaggcttattttcttctaagtaaattccacatttgcagaggtcctaaaattatatctkttgtctttgcttttttatttttttactgtagtttatatatgtttgtgacatgtagttgtccttttatataaaacaaatatcactagacctgggcatgaaactcaggattagtaagccccattctctgcaatttgtggcatatgtctctgatgtcagctgaaatgaactttgttcagcaaaatggtttgtaaatattggtttgggtttggcaacaagagtgaacaaataagtatttctgccttatcctgagtttatccaaacaaacccaacagttttatatttaaaaatccaggcgctaatcgctttggtctcaagtgtatccccatctgcccatgtctattaatcatctgcagacctctttgcttttcacactgccactcagcacacaggggaagaaaacaccctctcagtggttaactttgcttgagaaactggtggggttattttacttagcacacgcaatgttaatgctcctgaaagcagaaatgttgaacaagaagccttgttagtgctgacatggtgagagccacagcagcctgtcccattgctgagagctaactggacagagaagcgtggggacattctctctggcaggacattctagggcctggtcctgtggccatccattcctctcttgcttttggcacaggccatttccaggttagctggcaagcccagtgtctttatttttaaacttgcagtcatttccatgccttgtgggaagagaaggtggtgaaaaggatcttttgttcctgggctaagcrtcagagcttagatgccaaggtattcctcaggccccctgaacttataatcaacgagaatgctaactagccctaagccctataataacaactggaaagtttggcctgttcagtaaaaaaaaagactgcaagagaatgttatctatggaaggcttggaggaatcaattgcatcctgagacttcacgcagtggaatgtgtgtattttaggattaagttgaacactttggggcatggcctggggttggacagaaagcccaaacagcaggcgcccagggagtggtgagagctcatggagggtgctggaatttgccatgctttccactgggccgtgtttcagggccgcgtgcataggcagaagtgagcctgatgcttggagggcctgtctggtattgytgggcactgtcacaaggcatcagatctccagaagggcygagcttgctcagttttaactcggggctggcacttggcctttgcatcagattgtgctgtcttccaattgggtccatgcacccctgaattcacaggaagactttttgaattgcaccctgggtacattactttatggaaattggcttctagwtcatcagcttctgtatgtcctccttactacgattacatgacctgcctctcagaatgctcctggggccagctttaagccagctctcccttctcagctcccttcccaattgccttgtygccaccttacaaaaaaaaacataccctttaycacaccctccgtcttgctatcatgcatcatctcagggtgtgtgagggaatatgtagtttcatattttattttagaggtacatgtgcaaaaatgtttgaagacttttgatcagattcagcttccttgagcagtctaagtcaatactgtgcatagaagtaaaatgcaagacacaagtgcagaaaacatttggaattttaaactttctggtggccacattaaaagtaaaaagaaaatctcatatgttatgtaaatatatatatttatattattaattttcataatgtattttatttaaccccrtctatcccaaatgttatttcaacattatcagtataaaaagctagtaatgaagtgtttttgcattttttgtgtgtagcatgcctttaaaatttgattcatattttacacttacagcatatctatctcaatcctgatcagacatatttcaagtgtttcgtagccacatgtgactagtgagtcctgtattagggcagcactgttgtaagtgatagaaagcacaacctttaagctgatggtatttgggaaccaagattggttcctgctgaattatgaaaaaaaaccaacctgaggttgagaggcattaattaagagccagactggagccagactggagcctcgtctcaccacrtatccatcagctgggagatgctggacaagcacttagcctctgtttgcattggtttccacaatcaagaatgagaataataagtgccttcctcagaatgattgtttgaggattgaaaagctaaagctaatctatataaagcatagtgtctggtacctggtatgtaagtgtcactattattattattatttctggtaaaacccaccaaggtagccatgatgtggtggcaaaaactcgaggtttgtctctcagaagacttgcatttgagatgtctttctgctgttgatcacttcgtgccttaacttttcggagcttcagcgttgacatgtttgagtgagtctaacagctccttcctcccaggacacccctgctggaggcacagataatacaatgtgtatcatagctaccattttcgggaatcttctttatgccagtgtaatgcttattggtattatttcatcttcacaactgtttgaggaaggtgtttttatccccattttatatttgaagacagcgaggctcagtaactagcccaggttaccatgttgagcatgggcagagctggagtttgagtgcagctgtgtctgcctctgaagcccttaaacattgctaygtgctattgcccatgcgtatatcatgattattactcagacgtatggttcagttcacataatactaaaatctaagttaaacaaggaggccctcctatttccccaagatggcagagtaagctaatgtgaaatccctgctgttaaaaacatctggaagtgtcggtgagttcgatcagggaagcaggacaatgagcagtgctcttgttttcaggagacgttggagatgtgagggtgtagggctgggtgcctggaagagcagaggacaagtcactggtgaaggcctgcagcaggggctggagaggatgcctgtggaggctgcttctcctgtgtcagctgtccctggggggcacagaactggccatcagaggcaggggagtgaggacagattggagtgggcagggacagcttcatcagctgccacttcacgtcaccttccaaacatgcacaatacctgtagcagaccctaacctggaaccatccagacaagagaatctcaggaaacctggctgtgaattagccgacatgatgcggtaggaccccactgcagtggccaacagcgattcctcctggaaccacaggaagagcgagtccagacccatygggaacactatcygttatgtttgtgggagccgtccatcctcctgctgcagttccagtaacctaaagcctgttccagatgactgttctatcatatcggggtcttggggtgctcatcctgtaccttttttcctctgcctgctagccattatcatgaacgctgttcactggtgtgctgtaaacttgtcttcagcccagctttttctgtggactccacagaactgtggaagygctgctcctaagcagcatttggtgtacgtctgctgggtgtctgtgagattcccagcccgagcatgataattccttatcttgggggcttccgtgcataaggaaggtgtgttcrgatcccaaacatgtgtgagactaggcccagggtttcagcatctcaggagagatttttgttttcctcatgcagggtccaggcagagactggcttcccatcatcatcctgagtgcatgagtggattttttttaacagctcagtttgatgtagggagtctcagttccagcttctgccttgcacagacccaaaggaatttcttgtttctgttccagttaaacacaacatataataacttacccacctcctcctgacttcccactgaaatgagaatgaagtggaaaaaaaggcaaaaatacagaaggacgggagattgaaagaggaggtcatggaaacaaaaatataaaagctgcaaaataaatggatgagtgataagtaatgccacagactagaaaaaaaagctgcaatttatggcggaagtatgagaaaccccaaagtaagctaaatagaagtgcagatccttagacaatctctggaattcgagccatcaggtatctctgaaacgagtagtagccgaatgtttgcacgagaagcagttcattgggtcccagcctccttcctcccctgcactgcctagtgaagcctctttccacacttccacaagagaagatggtgatacactttctggaaagtcaacctttctggaaacgttgaccgcagggactctgggatcaggagtaccaggcaaagctggaagaggggatggggaattccrggccaaaaacaggggttaagtgaaagtgtaagtatggaagaatgagacccatggttactgccccagctgtcctcttaggacactggcatccaacgtgatgcactcaggtgttcagaagattccatgccggggcctacaaacatcgaagacaaaggactcgcagatgttacattggccaaatcccccatagcaaagcttggcagctaagaaagcctgcccatgcacacggcacacggcactgccagccagcatcctgtgtcttgctcttacatgtgaatggataggcaaaaattagcagaaaactgaggaaagctcaacatgcaggacagagaccacacccccacaacacacacacatataagcaagcaaattctaaaaagtctggaaaacaacattcagagaagaaaacaaaaactgccattaatattcttagagaaatattataagattggcaaaactkaaagcatcagcattaccaagtattagttgggatatgggaaaaggaactttcccaacctactggtgagagcataaaccactgcagcccttttcaagagcaatttggcagtagagtcatccctcagtatccaaggagaattgtttccagcacccccaccccagcccccatagattctcaaatccacacacgcrgaagtcccttacataataacatggtgtatttgcatatagcctatgcacatcctcccatayatttaaaatcatctctagattacttgcaatacttaatacaatgtaggtgctgtgtaaatagtcrttacactggattggttttctattaccattattttttgttgtattgttatttttatttttttcaaatatttgtgctctgtggttggttgactccaaggatgtggaacccgagaatacagagggccaactgtgcatgatagagctgaagacttaggaactctatgacccagcccatttcacttatagaaatccaggtacagggagactttccacaaggagactgtagaaaggtttttttttttttttactgtactgtttgtaaatattgaaaaggagggaacaactgtcaacagtagggggatggataaataatttaagatatagagtggaatattatatagctgttaaaattaatgaaatttatttacataatatggatatctaaaaaaagttggataaaaattgcagactataatatatatgtaaattttagtacctataaaatatatatattatttgagaataatagtaataagggctaacataaataataacagtttgatacagaggctattattaccattttacagttgaggaaactgaaggacagagaggctaagtaatctgcccaagcccacatagctagtatgtaagtagtgaaaggacaaaaagttcttgggaatattaacaatcttcataggaaagaagcaggatgacacgaaaacacgagactttatttgtaactttattttttagagataggatctggctctgtcatcacccaggatggagtgcagtggcaagatcatagctcactgcagcctcaaactcctgggttgaagtgatcctctcaactcagcctcccaagtagctgggacagtaggcatgtgccactcagtctcgctcattttttctcttttttgtagagcctgagtctcactactttatataggctgttcttgaactccttgactcaaatgatccttctgacttggcctctcaaagtgctgggattacaggtgtgaggcactgtgcccagccttttttctgttttgtttttttttcttaagagacatctggagcagttgtggccaatctggatgtctgttacattatcatgtttttaaagactttttctttttaagagcagttttagattcacagcaaaattgagcagaaggtacggagagtcccagctagccctgcctgcacacatgcacagccacctgcattattcacatccccgacggagtggtacattgttgtgatcagtgcacctacattggcacatcggtatcactcaaagtccactgtacggttccctcttgctgttggacattctgtgggttttgacacgtttartaaatgtaaccactgtcrtagttttctgccctaaacattcttgtgccccacctatttatttccctcacaaccctaacccctggcagccgctgatttttttactgtctccgtagttttgccttttctaggaggtcatatagttgacatcatataatatgtagccttttcaaggaaaagttggcttctttcccttagcactgtgcatttaacttccctctgtgtcttttcatagctcatctccttttatcactgaacagtatttcattgtcaggacatactacattttaaacttcatatgtttaaatattgtataacttttaatgattaaaactgtaagcttgggaactctcagcccacggctgactacccaagggccacagggctaatatatagccatagattctgtgaatcattgtgtgtatttttcactggccttccactaagcaccctctcatttaccgttctgcatgtactttatcagacacatagtgtcttcctgcctgtgatgctgggcctgaggtgtgcaaggggcaacactgtgaccttagaaaggtagtgctctgaaccagagcgaattcaaagggctgtcccttcaccgactgcatatcaggtcttcagagctgtgcttctagctcagggcaggcatttggaaggaagattttggaatcttgcctgaacatattcataatatgtttttcttagsttgggtgttttgctgggaattttggtgttatttccttcaacactgttgtcatctatgactcagaatttaactacttgtgcttttttgtgtgtggcttttatgctgcaggaaatcacagtgaatcctcttatctgcattcttggaggcagggcatctgataaattaatatttttgttaatgctgctatgtgacccatatgcacagtgctttcaaagagttcacaaagttgaatctgggggtttacagttggaaggatataatttatacaccttccccattttaaaaatgaagaaattgaggctcagagactggaataacatgtgcaagactacacagctcattgcccatggagttgggggtagaaaaatgggctcccttttccctatgtgtgtttactgcatcacagagaacaataaaataaaaagaaatctatgatttcttgattgaatttcattggtggattgataagactcctcartagggctttataggtctaaacctccactttggattgccgtatttgtgatatgtactcagaacactagctctgaagctttttaatgctttacgttaaataaaagaagctcctgaggtgaaagttggtggtttataataytatagaggtgtttatacacctgccttagttgtgtaaatatagataccactgggatcctaggttttcttcattttcactcaaagggaaagcctctaccctgatgctctagaattggatcagaggcatatgtgttatttttaagcttacaggccttactcccattgggtgggggttattggcaagaggagtttgatcattttcatttaagaaatttaggatcgctctgtcttgtgtttttacaacagtcctaatctgaagtggttgggtgacggaaacttctaagtgggtaggtgctacacttagttatatgatttttttcctcatagcactcccaattcatattccttagtggcccatttttaattactttgctggaaaggcaaatcgatattttctgccagaactcttaatgattttcattaatattaggatttcaaccttacatatatataatacttgtaaacaagtgcagcattccctgtgaccagagaaggtagaaaagccttacttgaaatggttccatagaatcaagtttagtaaacgtgggtatttattttgacttaaggcttgcttccagaaaatacctaatacaacaaaggaatcattaacaaactacctataaaacatgatcatatgtaaaatgagagagtaccttaattttgcttttataacatgatttatcttgcagtgtgtgaacttaaatctccctccatgagtgatttcctgtggggtctggagaactctggctggttaaggcacattaaagccataatggatgcaggaatcttcattgcaaaggtatgcaattgcagagaaaataaattaagggacagatgagcaaaccactgacttcaaaatgggtatccctctgccatgggcttccctgtcttaagctgcactgcactgactggrtagccagctttgtagagctccgtagtctgtgcgctgaagatwtgattttgcgaaagaatacaatgcttagctgatagtgtgtcagcactgtgatcaaatggtaaaatatttccagagtattctcttccattaggcttaatcctggatggaggaaagaattttctgtagaatacaaccaaatgtgagttacttcagtgatggggcttggggcttacatccagtagagccttctttttagtcatggcataagcaaaagtcatgttcctgtagctggaaggtagagtccattccgccataggaaaatgtcgctgcagctttcacataagctgttttagaatgcaatgtcttttgtgttgttcagttttttttaaagaaataaatwccttggatttatacctaaagagaaccatatcttccctgatgccatggtatgttccctgttttgaggtaatcatttattcaakaaatctttatttagtgccaggtactattctagattttacagatgtgatgtgaataaggcagatcaagtctcttccctcacagagcttatattctgctgggggagacagagaattttttttttttttttttttttttttgagaggkagtctcgctctgtcacccaggctggagtgcagtggcacgatctcagcttgctgcaacctctgcctcccaggttcaagcgattcttctgtctcagcctcccaagtagctggaattactggcacgcgccactatgcctggctaatttttgtatttttagtagagacggggtttcaccatgttggtcaggctggtcacggactcctgacctcaggtgatccacccgccacggcctcccaaagtgctgggattacatgcgtgagccactgcctccagctgagacagagtattaataaactaataaaactagaattttaggtagtgataaatgctatgatgaaatctctcccatgtttcccagcgtatgttaactgccaagatatttagtaaaaaatgatgtgcatttgcaatagcaaatagatattcttttcttactggagattttctggtgtcatttttacttttgttttttcctttcctcaaccttacatccattacttgackcttaccttttatttataacttcataggtctgtaatttataacttttttgccttttcctttttggaaatggctggggccagtagcaactccagaatttcagtaaggcttaatgtggaaactcagaggggagggaagagggttgaaggtccgtttgcataggacgaatgcttatgtttagtaagtacatgcgcttattggaggtgacttgagtggtggcttctggatagaatgggaagggaaagctttagctgccagcaccaggccactctggctctgccctaattagggggggccctaaacagacgaatggacaggtgtttcgttttggctgtttctttctgtaaatatacagtcaaacctggctgtgatgagaggttctgcctttttacagccattctttgtgactctttgcggatcgtgtgttttctaggcagtgtcagaggaaggggcaagtgtgcttgttcactgttctgatggctgggacaggaccgctcaggtgtgctcggtggcaagcctgctgctggaccctcactaccggactctgaagggcttcatggtgagtgtggccactgggcgattcccacaggcggtgccttgaccaggaatggacccctgtttttacaactactggcaactgctgttttcttgccagcattatttttcttttagtagctcagcaagattaaaggggaagagatcaagattaatttaatcagcaagattaaaggggaaggcttggaataaagagatgaatttctgggatattgaaaccatttcaagtcaatgctactgaatgagttttggggcaaatataaaatatatttggtagtttgtaagccaattttatatatcatttgctcataagtatttcaagtttgaggtaacrtgaatatgtaacagaagactttttagaaaaaatattttgggaagaaattttctatattgtgtatgccaaaagtccttggtaggaaaaactgttttcacttccagggtatgttttttaagtagtccttcacacccctggatgagaatgctgaaaatttcacagccttttgttgttgttctttgctgaaatgacgagtatatcctgtagagtttgagctttttaggtgggcatcaaatgtaacgttgctttcaactacagagtattgtatatagttgcctgggatggtgaagttttcactaatctggtataagttccttaaaatgaattcacctcttaaccatgatttggtagacagtgcttcagtgaatcatgaatccgtgctacasaagatgctgacaaaggagtcctaatggaatatctttactgctgggtctccattattgagtaatatcagcaacaccctcggacaagagcgaagaggcaggctccctctctgggatgtttttctttttttggaagtgtctgagaacttccaattacctgtgatagcattgacacctcaaagtgatacccttgcttcagatccctgctggactgaagtcaggagggctggattgcttcatttgcatttggagagtaaagaggttgccagtcacacactgccyttaggctcttctcctgcacacatgcgtttccatcatcaacttgttctcattgtgccccattaaacttasaacccaaagaaaatgtctcgagttgtcaagaacagacttccactagttcatatttctttgtaaggggaaatctctggccactktaaagcattggggatattgatsagactatccatattacttgactgaacactttttaaaatccaggctgggtgtggtagctcacacctgtaatcccagcattttgggaggttaaggagggaggcttgctggagccccagagtttgagaccagcctgggcaacatggcgagacctcgtctctataaaaaattaaaaaaaaattagccaggtgtggtggagcccacctgtggtcccagctacttgggctgaggtgggaggatcgctcgagctcaggaggtcaagggtgtagtgagccatgatctcatcactgcactccagcctacgtggctgagtgagatcctgtctcaaaaataaattttaaaatataaaacaatataaaatacaaaaccaaaataaatacttaaaaataataatctggactgcctcagacttagaaattcatgttaaccctaatttcaaagcagggctgaagctttgaatataccccaaacaccatcattttagaattcttataatgtgtagaaaagatcactgaaaaacttcccagttgtttttgtaaagaggttggtaatttacattacactgagaggcagcatcacacattggttgagatagggtttgaagtggagagacctgggctgtgaagtggggtctccttcctagtagcatgatcttgggcgaatatgaaacctctttccttcggtttccccttctaaaagagtgagaatacctatcctacagttagagatcatacgtaaagcaatgtgaacagtgcctggcacataggaagcattcagcgggtggggttcctgcatttttatacatccatttccactcactgttcccatggatgaccttcaactttgcctttgccatgtgcatctctatatgggtggataatgcctgttcatgcatttgcaggttactcgaggatggggacttctgcaagtgcctctgaattcctcaacattattggttgtgtggtctcttatttttcgtttgcttctctccaagatatttgtattctttcttgtgtaggtattaattgaaaaggactggatttcctttggtcataagtttaatcaccggtaagtaatatttaagactgytttgaatgtttagaataaaagcactgtttctgaaaatttcaattgaatatttaggggaaaatcgtcttgttttttgagtttgtgtctcttattcagaaagcttaaattttgttgtatatgtcatatcatagataaatgaagttataactgattccttttggtaacagttgggcagaactaactaatgttaacttgttctagaagagacagagaatgcttgttcattgtcttwgtgaggatcagccttcccttcctcctgccatttgcatgtgacttactaaattattccattttagaagtccagagattcactttagtctgcaagttgtgaactgcccgtggaacagtttctctttsatcttctatagtcctaaggcatttgtatcggagtgcagtttgtcccagatgtctctggagtggtgatgaaggcttcagaaccagacatatccaactccagatccaggccatgatattcactgtctggccttggacgtctgggctgtctgacctttggtctctcatctgtggaatggggatgccaaagctgttgttttgggagtcaccagcctccttttgtcagtgttgatgcctgtattgtgttctggtgttctctactctttgaatcttaaatggtatagctgtacttagtttagtctttggtgataaaatttaaatttaggcagcaagtttcattagtttgatatatattttcagaagttttactgtgttttcttaaaattctaaatgcatgcaactgctcaagtatatttttgtagttttttgcttttagcattaattgatcactaattctgtgattttcaggaattctatttttctaattttttccaggaaagcataggaattccatttaccaatgagaaaattaaagcccccaattagataaacttcttaacatggcattattttcagtttggggttctattaatattacacgctaggcagttaggatctccaagataggagacagatgacagaaagaatatggaaatgactgaagatcagctagataattgtttgataaggaaaaaatacgttaatattaggcaaccttttttttttgatttgcagtaaagtttattttgaaataattctgaagccataaaagactaaaattccctttatgcaaatataaatcagtctcccataatgcaattatttttttcttcctcattttayttttattttttaattttattattattatactttgttttagggtacatgtgcacaacgtgcaggtttgttacatatatatacatgtgccatgttggtgtgctgcacccattaactcgtcatttagcattaggtatatctcctaatgctatccctcccccctcccgccaccccacaacagtccccggtgtgtgatgttccccttcctgtgtccttgtgttctcattgttcagttcccacctatgagtgagaacatgtggtgtttggtttttttgtccttgcgatagtttgctgagaatgatggtttccagtttcatccatgtccctacaaaggaaatgaactcatcattttttatggctgcataatattccatggtgtatatgtgccacattttcttaatccaggctattgttgttggacatataggttggttccaagtctttgctattgtgaatagtgccgctataaacattcatgtgcatgtgtctttatagcagcatgatttataatcctttgggtatatacccagtaatgggatggctgggtcaaatggtatttctagttctagatccctgaggaatcgccacactgacttccacaatggttgaactagtttacagtcccaccaacagtgtaaaagtgttcctatttcttcacatcctctccagcacctgttgtttcctgactttttaatgatcgccattctaactggtgtgagatggtgtatcattgtggttttgatttgcatttctctgatggccagtgatgatgagcatttttkcatgtgtcttttggctgcataaatgtcttcttttgagaagtgtcttttcatatcctttgcccactttttgatggggttgtttttttcttgtaaatttgtttgagttcattgtagattctggattttagccctttgtcagatgagtaggttgcaaaaattttctcccattttgtaggttgcctgttcactctgatggtagtttcttctgctgtgcagaagctctttagtttaattagatcccatctgtcaattttgtcttttgctgccrttgcttttggtgttttagacatgaagtccttgcccatgcctatgtcctgaatggtattgcctaggttttcttctagggtttttatagttttaggtctaacgtttaagtctttaatccatcttgaattaatttttgtataaggtgcaaagaagggatccagtttcagctttctacatatggctagcctaggtaacactttttaaagctaccaaaggtgagaaactgtaacatctgagaagtttctagacaatttccaatgttcccactcttgggaaaactctaaaactgatcattgctcattcctcttcctcaaggtgatgatctcttactaacacggggttctatattgttattttgtctttgatgacaccaaaacatccttttggattctctgtaaaactcacacagtagtgtaaagggctaaggagtcttcattttaaaatcaatacaaatttgaggaagacgagtctgatgtgctcttgaaaagcaaagcaatgggagataaaagaaaaatacatgtggaatctgtcgtcayatggaaataaatcacgtgataagctttaaccgctttaggaatgggaatattcttggcaasttgggaaaccactatttttttttttcaagttgtctttttcctcatcccttcccaacaaaacagcgcaaaaaatgaagagccttaaagttgtctggacatttcttctcacccgctcataaagtgcaacatttattttaaaagttctaatgtacttttaaggaatgaatttaaaaatgccctttttctgtggaaagtgtctttgaattttatttcttgcactaacactttcttttgtaactataacgtgaacgcatcccttctatccagaccgtcactacaaagttgctctggaaatttgaatttaaaatcttaacttttctaccttttttgtcattccaagtttgtaagataagatttatttaggaactagggttgcttttatggttgtttttgcatttatggctttgtactttaaaaataaatctgccttaaaaagtctctaatgctttgttttatagatatggcaatctagatggtgacccaaaagaaatctctccagttattgaccagttcattgagtgtgtttggcagttaatggaacaatttccctgtgcctttgagttcaatgagaggtttttgattcacattcaacatcacatttattcctgccagtttggaaacttcctatgtaacagccaaaaggagagacgagaactcaagtaagtgttttggtgtttttggtgtttaacttttatttaaagattttgatgactgagaattttaggtggcctttcataattttgaagacttttttcatttagtcacatacctatactgacagattagttttattttctttttcctggtgtcatttcataaatggtttaaatgtcatcaactgacagataaatagtttcattttttccttcagtttctgcctgatagacagcttgacagacttgatgcatgaatatcgaaagggaattttctggagtcaaaaaagtggtttttgcatttaaaaggaaaaggttagatatatttggtggctatgctaccataataaaaattgcaaatttaattgggaaagcaaatataaaagccagaatttattcagattaaaactgtattgatttatccaagggtaaaagtagataaattgtggactttaaaataagtgacagtaaaaaacttacaacaaagtgatttaggcagtatacatgagagaacattttttaaattttcataaaatgaaatggttttaactatggtgtatacaacattatcagatttaatttggggaatgatcagttcaaatgaaatggactcataaagaaaattaatttttgtagtggatactagtttgttttctctaaggaagctcaagtgtgattccatggagatggagatgatttagaaggagcagagtgtatcctttagggtcacctgttttcttgtacctgactagccaattctaacagtatctgcttgggtctgaatatggcttttccacttactagctataggactttgggaaaccacttattctctctattcctcagtttcttcatctgtaaattagacagagctcacagcaactcagtgaggattaaatgagagaaaacgtggaacatttagaatagtgtgtgacaaattataaatgtccaatgactatttgggggaaaaaactccccccaaaagaacagcttaacacacacacacacacacacacacacacacacacacacacacacgaatcgaacaccttgtcaaggccagtacagatggtggtgaagttgagattattacagtgttctccctctataccatgaagtcaccaagatgatacatttacctgctatcgaacagacacgtggttttcaggtaacaattattagttcctttccagcattaatataacatatctactgtgtgtaagcaccaaaataggtcatttatagacttattttctttataacaggattcaagaaagaacatactcattatgggctcacctgtggaagaatcgggccgactacctgaatcctctgtttagagctgatcacagccagactcagggaacccttcatctccctacaacaccatgtaacttcatgtacaagtatgtaaatccttggtaactttgtagccatggtatgaacttggattctggtaccgtttaacattcagaggtcaaagtgtatgacactgatctttgaggcttttattggacacaaaagacaccagagggagatgcttgaatatctgatctggtatttttgccagtgactcctctgcctctttattcctcctaaatgtggaattttcttcaggaggtgatgttttataataatgatatcataaaaaggttaagttccaatttatttttttaaaagcaaatgaaagagaataatgcaaatgccttaagtcaaatgtggaatcacaagtttcaacagtgatcatgacgtgttaaggttggagcaaaaataattgtggtttttgccgttawacaacaaaaaggcaaaaaccgcaattacttttgcaccaacgtaataggttgcctttttgtctccactgaattaagtcctactggaagtacttcccttgtggaaattacattaagattgtatgtattrgccgaggcgggtggatcaccctaggtcaggagttcaagacaagcctggccaacatggggagacccagtctctactgaaaatacaaaaattagctgggcatggtggtgagcgcctgtaatcctagctactygggaggctgagacaggagaatcacttgaaccagggaggaggaggttgcggtgagccgagatcgtgccattgcactccagcctgggcaacaagagcaaaactccatctcaaaaaaaaaaaaaaaagattgtatgtatggggagaatggggagagcagggtggcatcctacaagttctactaggtatgtgctagatacgtatgttttttcctttggcttccttgttaggcttgtataatatgaaaaaactcaaaggtcagcaacatcaaaagactcatgcagaataaacagaaaccccatctctttcttcctactcactcccgacacagacttsatggcttttctccctgtatagatttcgtttctcaaggttttttttcttaattatttcaatctaattatcttctcagaatttatagcagaatattctatcatactaaacaaaagcctccatagtgcatgtaagacaagttttaagagctgttgagatatgaccagttggattgcaactaatttattattaacagctagtcaacacatattttattgaggatcaaacactgttctgggcactgcagataaaacaatgacaccaagtccttgccctcaaagtacttacttatctacataaataaaatagtggttctaagggtaactctgtgataacaccatttttctcatttgcactccagttgcttttttgtgtaggataaaaagggatttattggtcaggcgtggtggctcccgcctataatcccagcactttgggaggctgaggtgggtggatcacctgaggtcaggagttcatgaccaacctgaccaacatggtgaaaccctgtctctactaaaaaaaatataaaattaggcatggtggtgcatgcctgtaatcccaggtacttgggaggctgaggcaggagaatcgcttgaacccgggaggtggaggttgcaaggagccgatatcacaccactgcacttcggtttgggtgacaagagcgaaactctgccattaaaaaaaaaagcgggggggggggggggttattgccaatgcaaatgtcaacttttagtggtcgtgatacaaaagataaaagctgcaagtttaagattccctttgtagctgaaagattctaaatatacaatttcaaagttcaaaactaagagccattttcttaaaaggtaatggttacatgtactattttaattttagaaaaatgtattctgtgctaattcatatatacaggcagacttttcataaacttattctccccaaaaggcatttactgacccaagraaaaaaacatcaacatgaaattattaccttaagtagtggcttttttgaggctgaaatttgcatttggttattattaagactgtggtatcatagataccttagaagacttgaggatgtgaattttcagactgtgataaggtggtatcaygacgctttgccatcctttccaggttttggagtggaatgtataaccgctttgaaaaggggatgcagccccgacagtcagttacagattacctaatggcagtgaaggaagaaactcagcagctagaggaagaactagaggccctggaagaagtaagacatacttgctttgttaatctattttctgtgcttatttcttgaagagcaaggcttcatgaaagcctcttaagattcagtgcaatacaaatatttcacatttttagtcagtagaacacctgaaacacaaccccatccaggtcaggactcagataaccgaagcccaaacctaggcatttaatgcatttcacacatctggtttgtggctcagttccacaaatttttggttgttccttattttaggtcaacttgtttggttactgttatttgagagtagtaaaattaatttttttctggaaagtgtgaaaaagtaacagaataaaatcaaatatatgtacttgtaaaactctttccccacttttagaaattatgttaactatgatattaatctataattggtraaggggagactgactgtaaagtcttatcttttggcttctatgaacttccctgtacttggacagggaggttataataaaatgcttttcctaattggataactttgtttccaatggtactaatgtagtttatgaacatcttaggattctattagtctattctagcagtctggctctttaaaactggctcttccttattacaaagtcaaaattccttaggctggcatttgagattttctcttttcagctttattttccatgctaatatttaatggtttttgctgcttgtatacaatttagaccttcctacctttgtgtttgtcctctcactgtccctactcctgtcaggaatgcttactagctatcaccagaatgtccaagtttaaatctttcacagtcctgttaaaatgttccttcctccctgaaacttactctgttcttttccttctaaccttaccccttcatccctcttcaagaacttttgcctttttgaaattcttacattgcatgaactctgcctctstctgctccactactccatgttccttaaggctgggtctgtatttatctatctcttttcctcacactgcccagcacagtgcttttgcacataacctaagtgaatggttttgaatgaatacataatacttgatcttataacacctcctgtgttaacatcaaaacatgaaatctggcgaaatgtattctgaacaacccaggtgtccataacatgatgaatggggaaacaaaatctggtatatccatgtaatggaatactgttcagccagaaaaaggaatgaagtacttgatacatgctgtaccatgaatgaattctgagaacataagctaagtgaaggaagccagatacaaaaatccacatgttgtatgattccattcaatttatataaaacatctagactaggcaaatccatagagatagaagttgatcmgtagtagccaggggctgtggggagataggaatgggaaatgactgctaatgagtatggggttttctttcggcaggggaggtgatgacagtgttttataattagtagtgatcgttgcacaaccttgtgaatataactaaaaaccactgaattgtatactttaaaagggtgagtttcacggtaagtgaattgtatctcagtataaaagttagatgataaacacttcattcatgatttctaaaaaatgttttttgagttcatgggatgagactcatcatttgaaaccatgtaggtatagaaaagagggagactagggttcactgggtgcttcaactgtgctatattgtttattattatagaaaacctatgtcaaggcaggtattatccttacattagagataaagcaggcctcacagattttgtccaaggtcgtgaagtccaggtttgaactcacatccctctgagtcacatgttcttaacattatacccacgtgggaggtaacaaatgctaaagacatgcatatatagmaaaagataagttatttatgatttttcccctgaaattgttatttctttcttagaggctggaaaaaattcaaaaggtccagttaaattgcactaaggtgaagagtaagcamagtgagcccagcaagcactcagggttttctacctcagacaacagcatagccaacactccccaggattacagtgggaatatgaaatcatttccatcccggagcccttcacaaggcgatgaagattctgctctgattctaacccaagacaatctgaaaagttcagatccagatctgtcagccaacagtgaccaagagtccggggtggaggatttgagctgtcggtctccaagtggtggtgagcatgcaccgagtgaagatagtggcaaggaccgggattctgatgaagccgtgtttctcactgcctgaagtttccctttggagttccaaagtaaaggacacataagcaacacttccaaaaacaagggaacaaggtggtttattgtaaaaacaggaaatggtgcatgtcattgagaactattttaatgcagctatgaaaagggaaaaaagtgcccagttcttgatttcttagatactgaagaggacgtagtcatttcatttatcaaatataaggaaaattattcaccattttgaagctcaccctagactatgaaaattatattcactgcagagcaattacttctgtcattacctgaagtgatcagtatctatcttccttgtcatagcatgcatctctcaaaaagcctccactcctttccctcacatctgtgatcatcatgattcttttagttcacttctagatgcatattttgtgttttctaaagcatctgacattatcctcctttccgaccctcttatacatatttctaaaaacaggcacattggtgagatgcaccctttttagttaatagatgcattcctaaggagcttttaattgcttatctttcaggcataatcatcactttaacttttccttggagcatatattttgaattgtgagaataattttgttgcttttctctgagatctatagtctgtttctcctcattatttaaaaatgctaaaccttgtatctcactttttctctaacactgatttaatagctaacgaggtagaagcaacattcattctcctggtcttacatatgaatttaagtatcagctttcttgtaataaccttttattactgttctagagactacactaccgacagtgtgggccagccaccagcctgatctcaaagtatcacattataaagttagtagataaaacatctgtgagtgaaaatccagtttcaagaaccagagaattgggttgtcatgtctgtttaatgaagggaataggttttgtaatctatcattttagaaattatgtaactggctaatatggtttaattaaccttagtaacatctcatgaccactgactgctgaaagttctgaaaagaatttttgttttgttacactgcacatttaagggagagyccctsccctatcttatgagttaaaaaagacttcactaggtgacctaaattaaacttagtggggaaaagtggccatgtttggacataaataaatggtattcacactgtatggttttaatatattagtacattctagaatgtaaaaggattaaactttacaatttagatcaatattttgaatatgtgaaaggattaatttaaactttacaatttacatcaatattttgaatatctgattttttttaatgggagaattattacatttcgctgaaatgaggacgagggcaagaaagcaacattgctgatctctctagtatgaaagatttggagggagtgttgcaatatatataaatgaaaacatttaattgtgttcatcatatttaaaaatatagaatatattagagaactgtgatttaaaagtactgttaatgtaaaaaataaagcaagtgtaattaattctttcagaatataaaatttgggcattctcygctgagcagttcccaaattaagtacaaggaatgtttattcattttctgcaatatactatatgtaatagggaataccttgctaaaataaaacttaggatatagtggtaatggctttcacatttttataacataacataactcacttcacaaccttcttggagctgtccactcttagaaactctgttgcctaatattgaggatgtggctttaatttcttccgtttgacagtgtatgtctataaaaacaataaacattttttaaaaaatgacaaagtatctatgccaaacagcactatgcttttatttgaaaagcaaatagtataaatatttgatgttttaaaatgtagttttttaatatgacaacttccatatcagagtcrtaaacttttagtcccctcaacttttttacaagacagacattataatttatgtaacatgttcgtctgcttattagaagttaacctagcactgagatttatataaaaggttacatttattgcttattaaaactttactgtactttcacagattcttcagagcatggctaacccaacaagactaaaatatccccaacaagactaaaatatctaataatcaaacattaatcaggaagtgttttattgagagcagtggtttaaagcatagggaataatccagtataaaactgatttgaggcatattacttcccaattagtaatatrtagaatgcaagtaatttattttttaaagttgatatgaaataaataggtaagaattttgaccatgacccagcaaatcagtaactgagctttttatagaatggaaggtgatgatcagagacagaaaccatagaataaawttttattctttaagagcacattagtttactttcttctcctaaaaatgaatctgagctgtccttcaatttaagcatatatatgtgtcaagcaccctctattctgatataaatttcctagtctcaatttatgcctagaaatttctttcaactttgaagtgggtctgtttagtttatatctcactgattgattgatttagaattttcttctattttaagatattaacctttaaatctctacctatgacaaattcgtacactgattagcctagtaactcctaagtattcctctttaattctgatttctatctcatcktgtaaaatcagaatacaaactttcacatgcatttcatttttcctgtggcactgcttctccgatgtgaccaatttttatgaagaaaatatatagccataaaattagaaaaaatggtcacttaatctctgttgcaaaaacagaacccacattcatacgggcatattcaaatgcagattcttttcatcgtgggtgacatacataacctttatgtaaactgatttgtctatttgttaaatgcagataactgatcacactgctctgtttcatgactgggttgtaacaaggttatccaatgaatggtatagaatgaaactgggatagttcaactttaaagaataaaaaacactgagatgaactactcatgtgattatgtagaacatttttactctgtaagaaaatgtttcttttttttctgtttttctggtgaaaaggaaagtagataagcatctaaacaatgtttatctttgtatagtatttccacaatgccttattcctagtaggtacttaataacatagatagatcaaatgaattaatcaaatgaggggctgtggtatgctcctcccttgttatgggatacacctacctggtttctaggaacctgattgttggcaaaagattgagactgttctatctcccattgctgtaactgctgggaaaattaagctctggtggccagtgcagtataaggaaaggtttctgaatacccaaaagactatcataaatttgaaacactcttacctcagttatctacaaatcaggagtaataattaattattccttcctcatctggtcactttgaagctttaacagcatgtccttagcacagtgtcaggaagacaatgaaagttattttctgtatccaacattgtatctcagtccacgtgaatacctgccctccacaaacagactaaatattaagcatgttttaattctaacaaaataattttgttcttcctataactttattgccaaaaacatgtacaggaagaactaaaaaatataaaaaagacagacaatctatactatatgctggtgttgggaagacaatcatactgggatgaaatttaagcaaaattatgcattagtttgttttgtaatttagatggcaccttaccaagcctgagctacatagttcacggcattttcctttatgagcttttagggcttctcaagaaatacatgaattttgtgacacggtatagaagcaaactgctcaatgtagtatacaagaacactcaattaaattcattaaaaatcaggattgcctaaaaattaaattttacttattactatagctttcctcttaggaaaaggtaactcacagtaaaggtcagaaaagttcattgactttttttgtgtatagatttagtgtatattaacataaagattgtttttaacattaggaatttagaaaacctatccaaccacaaacctaccagatatatatatgttttaaattagcataagaatttctgttggaatggtttaaatgaaaggcaacttttttttttcctattaggtaaaatatttacttgtattgcttcttaaatgcatctttagttttaaaaatgaaacaatatataagaacagctggtttattcttttgatttattgtaggtattaaaagtttcttttgtgagatggcacataggcaggtttggtgtttcctaacactatgaatatcttaaattgcttttgaaagttttatccacaaagaaagaaaaataagggtttcctcacagttgaaaatagtttttgaaaaaaggttaagaggaaaaaaatctaaataccatccttgataacgaaatggaacttcaagttaaaaatacaaatttaaatgaagttttataaaatattaaaaactagctaaaagtacatgcataggcatttaatcaaggtaagaggaacagcagtggaacttaaatatgatacaatttatcaacaataaataaacatttcagtgcaaatagtgcagaaaaatttctcaaagatcatagcaatcattctaatcggtacaaaatcagtctcagttctgtatacaatctatataggatatctgtgaatttagccactgatgaaatgccagtttgcaaaccataaatataaaacagtgtttggttttgtgtcccattcctctcttggcagttcatgtttccaggaaaatctagaaagaaaacaataaaaaatacctctaatatttaagaagatgaatatgtatctctttacattatcttccaattaagatttgcccacagtggctcccaggcaagatggctgaataggaacagctccagtctgcagctcccagggagaccaacagagaaggcaggtgatttctgcatttccagctgagatacctggttcatctcactgggactggttagacagtgggtgtagcccacggagggtgagcagaagcagggtggggtgttgcctcacccggtaagtgcaaggggttagggaactacctcccctagccaagggaagccttgagggactgtgctacccagcccagaaactacgctttttccacggtcttcgcaacccacagaccaggagattccctcaggtgcctacaccaccaggggcccgggtttcaaccacaaaactaggtggccgtttggccagacatcgagctagctgcaggaattttttttcgtactgcctggaatgccagcgagacagaacccttcactctcctggaaagggggctgatgccagggagccaaatggtcttgctcagcggatcccacccctatggagtctagcaagctaagatccactggcttgaaattttcaccgccagcatagcagtctgaggtcgacctgggatgctggagcttggtggggggaggggcgtccaccattaatgaggtttgagtagtctgttttcccctcacagtgtaaacaaagcctccgggaagtttggactgggcaaagcccacctcagctccacaaagccactgtagccagactgcctctctagattcctcctctctgggcagggcatctctgaaagaaaggcagaggccccagtcaggggcttatagataaaactcccatctccctgcaacagagcacctgggggaaggggtggctgtgggcgcagcttgcacacacttaaacgttcctgcctgccggctctgaagagagcagcggatcacccagcaccatgctctagctctgctaagagacagactgcctcctcaagtggttctctgaccaccgtgcctcctgacaggcagacacctcccagcaggggttgacagacagctcatacaggagagctctggctggcactttgcaggtgcccctctgggacaaagcttccagaggaaggagcaggcagcaatctttgctgttctgcagcctccgctggtgatacccaggcaaacaggatctggagtagacccccagcaaactccagcagacctgcagaagaggggcttgttagaaagacaactaacagaaagcaatagcatcaacatcaacaaaaatgacgaccatgcaaaaattccatccgaaggtcaccaacaacaaagaacaaaggtagataaatccatgaagatgaggaaaaaccagtgcaaaaaggctgaaaattcaaaaaaccagaaagcctcttctcctccaaaggatcacaactcctcgccagcaagggaacaaaactggactgagaatgagtttgatgaattgacagaagtaggcttcagaaggtgggtaataaactccttagagctaaaggagcatgttctaactcaatgcaaggaagctaagaaccttgataaaaggttagaagaattgctaactagaataatcagtttagagaagaacataaataaatgacctacctgatggaactgaaaaacacagcacgagaacttcatgaagcatacatagtatcaacagcccaatcgatcaagcagaagaaaggatatcagagactgaagatcaattttatgaaaaaaagcgtgaagacaagattagagaaaaaagaataaaaaggaacaaacaaagcctccaagaaacatgggactatgtgaaaagacaaaacctatgtttgattggtgtacctgaaagtgacagagagactggaaccaagttggaaaacacacttcaggatatccaggagaacttccccaacctagcaagacagcccaacattcaaattcagaaaatacagagaataccacaaagacactccttgagaagagcaaacccaagacgtaattgtcagatttaccaaggttgaaatgaaggaaaaaatgttaagggcagccagagaaaaaggttgggttacccacaaagggaagcccatcagactaacagtggatctctctgcagaaaccctataagccagaagagaatgggggccaatattcaacattcttaaagaattttcaaccaataatttcatatccagccaaactaagcttcataagtggaggagaaataaaaccctttacagacaagcaaatgctgagggattctgtcaccacgaggactgccttacaagagctcctgaaggaagcactaaacatggaaaggaataactggtaccagccactgcaaaatcaaaccaaaatgtaaagaccattgatactatgaagaaactgcatcaactaatgggcaaaataaccagctagcatcataatgacaggatcaaattcacacataacaatattaaccttaaacgggctaaatgccccaattaaaaggcacagactggcaaatgatacagagtcaagatccatcagtatgctgtattcaggaaacccatttcatgtgcaaagacacacacaggcttaaaataaagggatggaggaagatttaccaagccaatggaaagtaaaaaaaagcaggggttgcaatcctggtctctgataaaacagagtttaaaccaagaaaaaccaaaaaagacaaagaagggcattacataatggtaaagggatcaatgtaggaagaagagctaactatcctaaatatatatgcacccaatacaggagcacccagattcataaagcaagttcttagagacctcaaagagacttagactcccacacaataatagtgggagactttaacaccccactgtcaatattagatcaacgagacagaaaattaacaaggatattcaggacttgaactgagttctggaccaaacggaactaatagacatctacagaactatccacccataatcaacagaatataccttcttctcagcaccacatagcaattattctaaaattggccacataattggaagtaaaacactcctcagcaaatgcaaaagaatggaaatcataacagtctcccagaccacactgcaatcaaattagaattccggattaagaaactcactcaaaaccacacaactacatggaaactgaacaacctgctcctcgatgactacttggtaaataatgaaatgaagacagaaataaataagttctttgaaaccaatgagaacaaagacacaatgtaccagaatctctgggacagagcaaaactgtgtttagagggaaatttatagcactaaatgcccacaggagaaagcggtaaaaatctaaaaaatcaacaccctaacatcacaattaaaagaattagagaagcaagagcaaacaaattcaaaagctagcagaagacaagaaataaccaagatcagagcagaacttaaagagacagagacacgaaaaacccttcaaaaaaaaaaaaaaaaatcaatgaatccagcagctgttttgaaaagattaacaaaatagaccactagccagactaaaaaagaagaaaagagagaagaatcaaatagacaaaataaaaaatgataaaggggagatcgtatgggcatggtggctcacacctgtaatcccagcactttgggaggctgaggtgggtggatcacctgaggtcaggagttcaagactagcctggccaacatggtgaaaccccatctctactaaaaatacaaaaattagccaggtgtgatggcacatgcctataatcccagctacttgggaggctgaggcagagaactgcttaaacctgggaggcggaggctgcagtgagccaagatcataccaatgcactccagcctgggcaacagaatgagagtccatcacaaaacaacaacaacaaaaaaaagatcaccaccgatcccacagaaatacaacctaccatcagagaatactataaacacctttacacaaactagaaaatctagaagaaatggataaattcctggacacatacatc

SEQ ID NO: 95370 - DNA, 64853 bp, Homo sapiens
gtcttgggccacacattaaataaactaacttaaacaacaacaaaaaaatctcataatgttttaagaaagtttacgaatttctgttgggctgcattcaaagccatcctgggccaagggttggacaagtttactttacaaggttctgtagactgtgcgtgtgtgtatagatacaggtatttttagagacaaagtatcactctgttgcccaggctggagtgcagtggtgcaatctagatcactatagccttgaacacctcagttaaagcaatccacttggttcagcctccctgtacctgtagtgctagctacctgtacctgtacctgtagtgctaggactacaggtacacagccaccatgcctggcttagtttcatttttttttttttttttttgtagagacagagtctatgttgaccaggctggtctagaactcctggcctcaagcaatcctcctgccttggtctccaaatggagagtatattattaaacccaaaagagtgaaatggagagtcaggctaaacacagtgtaattacaagccacactactataccacaggcatcattactctgcttttcctaagccctactttcgtaaaattgtgtatactaaatatctttgtttatctgacaaagaacaggaagaaagaattcatacattggcactaccattaattgcctacagtttctttcactattttacctaccagatattaggatgtatgacacaaatgtaggatgtcaaacagaagaacaatgcaatattgcaacatacagttaagtactcactcaacgttatcaataagttcttggaaattgcaactttaagccaaaagatggataacgaaaccaatttttaccacaggctaattgataaaaacaagagttaagttcctacggcatatttctggtcacaaaaaaatcatcaaacttctagataaagaccaaaatacttctaatattaaacaatgaaataaatgtgagctatatgtaaatttaagaacaattaataaaaacaagataattatttgctccattattcagttgaggggtgaagaaagccagagcctattctggcagctcagggcacaatgtgggaaccaaccctggtcagcatgtcgttccgtggcacagtgcactcacacagatacacctactcactcacactgggacaacttagccacaccatttcacctaacgtgcacagccttgggatgtgggaggaaatcagaggacccgggagaaaatccacatatacacgagaacgtgcacactccactcaggtagtggcccgggtcaggaatcaattttattttttatgaaggttaccatgaaacaatgttgaagaaaatgtcatttgaggtcctgctgtaataagaatgtattattttatttacccaacttagtttgcaaataatctgcccctctctaaaaacatctaaaacttcccttagctatcaagactacttctattaataatacagaaatattataactaaggaaactgggtgaagacccagggcttgagttagaatgaagattctgacatatgataaacaccaggttcaaggatactactacttctcctatatgtaaattaagagagcttttgtgggctgaagtggcaacctaatgataatactgacttgaaaggaaaacgtacccaaggttccagaaaacgtcttactgcatttgacatgtaatctactcataaactggaatatgaatgcaacaaaaatcttcacaagaaggataaatattataaaaggctatatttcaaattgcacacaaaatttttgaaagtaaaactaatgtaggattattttttctatcagaagtactttcaatacccagtcttccaaatacaaaaaaagctgcagtcatattttaaatataacatctttaacatcaaagtattttttttggtcccatagtaaaaaagaaaaccatgcttttgaaatgttacgttttatatatttccaggataactacaccaaattcacctagcatgtcaccatacttgaggaaaatcaattcctaagattaaagaaaaaaaaaaaaaagtctgggttatacagttatttcccacttacgtcaaattaaatttaaaattaaactgccaagttgaagttcctggagggtattctccttgctcattcataaatgtcagtcctagctgaattatctttaacaagtctacattacaccgcaatagttggtattgatagtcagcattgctcctgaattctccaatgggtcttgcaaccacacctggaaactcggtgtcctgtaaaatagttttaagattcattatgtactaaacagtcaaaactacaatccacacatttttaatttttgatgcaaatcaaagaatcctacagatgatattctacacatttatattcaattacaaagtatattttaactagaaagaacatcactttttagaaccataaaactctataaacttaataacctttccttaaatatatccaaaaagttactatacgagatacatgtgataaatttaaccaaatacttactctataaccaagaaaggggggaaaatcataaattcctgtctcccaaaggatacatgaaatgatgctcacagtattccaatgctaaaaccaagtttcttgaagaactggttcaaaagaggggaaaacgccctgtactttccaattgcttctctgacacaaggtttttctcaacaccaaaaccctaagaaaaacatcattagcttcctaatttctctggcttaaacaatattctctctatagtccacagaaagcatgctgtcaagaattgcatgccacctactcactcttgtaggatgttatcacttctctatgttgccactctttatcatctgagaaatcaatgatcactatgaatttccattggttaagaaaacaattttagttctaatcatgggtaagtacacctttatcaaatagtatgtcatctacaaagaaacagtcatattttaaccaatcaacttgctcctccccaaagtaatgcatttgtttatttttattaaaaatactgagacaaagatacatcggtttagtattagaattcaaactagggctagctaagaataaaaactacctatcaagtcactatgaaatagtaaagaaatcaatatttctctaaattcagtgcaattcaacagccactttattgaatactatatgtgttatgctaggtgttgggagagaaaggattaaaacacttggtttatggagctaataataatccagtggatgtagaaaacagtagggtagctaacagatatagacagtataatggtaaagaagaaaaatcattaactggatagacaatctaggcagaccaaacagcacgtgcaaaagcagagttgcttagtaacacagtatattcacagaactccagtgttaattatgaaaacaaattgcagaccaacaacgtttcactggcacatctgatttttttgtttgagaaagagcaccctagcttctgggagctcatgtggtactaccagctaggctttggtgttgctaggagcagacctggcactcatagccacgccctaatgttctcctgttgaacacaatttcacaaaagttcaacctcaaataaggccactctgtaatcatgtctgaacaaggacaaaaaaataaaaatgtcaaaccacaaaatgaccaagtatctccatcctggctaaatgaatgactgttccttctctgcagctttaacctcattctagtctctcatttaagacttagtaagatacccaatcacagaattaccccagcttcccgaacacatccaatccacagtaaagccctgcttcccttaccttcccctaagaccacctgacacgagcccaaatccttcctaactcttattcaaacggcccatggttcccatgaattccagtgcgttttccctcactgcaatgagggataaacccaacctgtcaaatcacaggtgtattcctgatggattttggctggagggcagtgacaaattttacttttcatggtgaaattaatccctaaaaatatcaaccaaaagggttgaattcaagactttaaaatttccttttcctcctttatatgaagcgttttaaagatctgcttgtgggcataccatagcaacgtaattatattttcggataacttgacgaattttcttcatctcttcatccaagttgcaagcccaaacttcacaaattctttggctatgatctacagttgccgctggcatagtgagggcacaagggagtctagatgccaagcatcaaaatgttatacttgattgaagatttgtttcataaaatattttatcctttatttatgtacctgtcaaaataaaaaaacaatatgaagaccagatatatcaaatctgaatcacagaataattgatccagcaggaacctaagaagttatttattcaaagttcttgactcataaaaaaaaaaaatcaaagtttagaaagtaacttaaggtcacacagctagtctataggaaaaaaaggactacagtacagatttcctggtcctaatttcagttattttaaaatagcttttttacacatacatactaatcatattttataactttccactaattatttatctgagttcaactactctgcataaaactttataaagccatccatttccagacaaaaaatgaaaaattacttatttacatgtgacaagatcagatgttaccatggcaaagatggtgtttatttttattcctcattaataaaacaaccaaaatccgacttgataacaagatctactttaccggcgtttattctaactagactagaggggtcaaaaatgtttgtaaatgctctgagaaaaaagtaacggccatgaaaattatctgaatgttcgcagttgcagaacggaaaaagaacacaatagaacgtctaaaacttagagcatattgcatggttaccaaagatagatgtcacatttctggtctataaacagagttcctgttgattcttgggcagggaaatttcaaatccttctgcatttttcatacaaattggaaaaaaaaaaaacaagagtaaaaagagggtcttatgactgtcttctaaactctgaagagtcacaaatgtaacttccaattctccaagtagagaaactaaaggagatccaggacacccctcctttataactctcccaccccgataggcacacacacacacataagcacaaaaacacaaagacttggaaagaccctgtagtctaacattgttttcctccacctctctctctactgcagtcccagaagccccgaagagacaccaaaggccttctcattactggagatagcatctccgtactgcagtttcccagagaaacgagaggacggcaccgaggtattcaagccatagataactctcttccctggcaaagcgccagtgcgaaggtgctgataacactgactggagctacactgactcccaagcactgccgcgtgaaacaatacgaagaggtgaggatctaggccaccgccctccactcccaatttccgtcccactgcgaagccccaggtacaaagcctttgcgtcatcactacgcgccaaccccttgacaaacccccagccccagttacccagcccccaayccgccgccaggctccttcctccgccagccgcactccagctggcgccatcgcgcaccctctcaggttcatcgtccccgccccctttctacttccctaacccgcccctccccccgtaaggctgcagcggatgcaagatctacttgtgtcgctgagctcgcgctcctcctcctcctcctcgccatagagacagcactcggcggcggtggcggtggcggtggcggtagcggcggcggcagcgggtgccccatagacacctctcgcccagcgaagggaaaggcgagcaggagctgcgccgcaccgtgctgcgccgtcgcttttcgcacgtcctgacgggggcgctagatgatgacgcgacacgcagagggggcggagagcgcccccgggggcggggcacgcaagtgacggcggcgcgggtggtggagcgctgggcggccaggctccctggctggccggtttgggcgtctgggccgtgaaggtgggacctcctgttccgggccgcaagtttccctctccagccgcccgccgttcgtagcatgtcccccagaactcggggagcgcaggcaggacaggcttagagaagacgcggtccccagcgcttgggccacggacgtcccaccccgctcctctgtcgctggagaaccgccgggccgagccactgggagaagcaggccagagccttccagggcctccggcccgtggacccgaggaggatgagctggctttttcccctgaccaagagcgcctcctcctccgcggctgggtcccccggtggcctcaccagcctccagcagcagaagcagcgcctgatcgagtccctccggaactcacactccaggtgactggtcgctgcctctccaccggaggaaaaagtagggtgggagggcgggcttgtcctaaccaccctcacagcgcctcagtctgctccccaccagctcctcatgtggtttacctcccttggttgtgggtcacacgcttgctctgccactcctgcccccttttactgttttcctccggaccctccctgcctcctgccgcaccactgctcagcgcttctaactcggatttcctcatccctcctgacacatagctgctgactgtaatctctcaatctctctcatagtctatttccagtatcccttgctgcccaggcttcgccactgatctttccctttgcccacctgaytgccgcgtcagcagaattgttaaaatacaattgtgaagagtaatctccaggtttcacaaagaatggaaaatagaactgttgcaacatcaaaggaaagggaagccagagttttcatcagtgaatgcttctcgtctgagagtcacttatcacgtagtcagtcttcttgagtctctaagatttaccctgttggagcagtctctccccatctcacagcgaccagtgcatgtacatttctcacttctttcatagtcttgtccccacgctcaagaattactttatgttcatcttgattgttctgttgtcttcctgtgagtttttcattttatcatggtcagtttagaaatatttttacaattcatattatttcaacttttactgtaaattggtttgctgcagccttttacattgcaaatgtctatggtctctaatggttttcaaaaattagaactgcttctttatattttatgcattytgcaagtatatttacttaacagtttcacactattttaaataaagatgacaacattgttaagtccctaaccccyttttttttttttttttttgccgggggtacggctctcctgttgcccaggctggagcgcagtggcgcgatctcggttcactgcaacctccgtctcccggattcaagcaatcatcctccctcagctccccacacccctccgagtagctgggattacaggtgcgcgccaccatgcgcggctaatattttgtatttttagtagagacggggtttcaccacattggtcaggctggtctcgaactcctgaccttagattatccacccgcttcggcctcccaaagtgctgggattacaggaataagccacctcgccgggctcctagcccttttaaaaatattattttcatacagttaaaaaatatgtatcctcagataatatcgaataattcttatttaaaatggaataatttttaattaaatagtctagttaatagaaaaatttactgcaaaatcagtttggctaaaataaggcctgatgctgactgaactttaggtgtttcttggttcgttgtctcaattgttctgtttgttcagaactttcaaaaggtgaaattttatgctgtttaacagaaaagaatggcaggctgttattggtggctttcattctggaaaattaagttcgcaaagttcttacaagtcactcttactccaaatcatgttctgtactgacctttaagagctactctcacaaggtatgcttataaaataaggggactcgtttttaacatgtttgttcccttagaagttgttaccttggtagactatataccaaaccagtcctgctattgcagaaacacttttttagaaccacacttttggaattaattgcttttaaaccttagtatgtagtattatgttaaatattttcaatgctgactaatttttttcttcgaggttggagtttaattttttaaatactacaaagtctcttgctgctaaggctggtaagtaagggaagtaattgatgtgaaatttataattttggcctcccaaataaagtgagattctatagcagcaattgttaatgtaaagagttctggaattggcttaagaggatcagtaaatacgcggagttggatacagaaaggattcattttatgtattattttttgaaccagaaattatgaacgtatgattggacatgattacattagataatgtaatttattttgtagtgttatgaacaaataactaagtattttattgttttaagttcttttataaaaacacttgaagttttattgagatgtttcgcatttacaaattatactcgaataattcyggagacacttaagtaggtcatatgcttccagttttcaaagaatggcacaatcctggaaaatgccactcacctattcttgttagtccacccttttaaataatgacatatatttgtaagctgggaggtaaaaaataatctgtctgtatggtatctgatgtaaagatggaaaaggtgtgatattttttctcatcagtcataaggggcacagctgaccctcctgtaacaaaagacaggtkaacaagcgaaaagcataacagatttatttaatcaaagttttacactgcatgggagccttcagaaatgaagccccagagaccgaaggaaaactgtctgtatttatgattaggttcaatgaagaatggacagccatgtagaaatgtgattggacaaaaagagtatggtaatggtaatagacagaggtaggggaaacccaccaaggcctgtttgttcagatttttcttggcttctctgtataactttctactcctctagtggaccggcccgggctcatatggagtgagggtcttcagggcggaagggaaagtgacctttctagattttttgtagggaagaagggttgtagtttgtaatataccgcccaggggaggaggaattctggtttctatgacttcttcaatggagaaagaggggcaggaggtggtcagagagagctttacttctgaggccctccagactcctttaattcaaagtaatcagcctaccaaagtgcaatattttggggtattgttttctgagccccaatactggcaatatgttgcctgattacctaaattagtggtacgacttacacttaaaagatttttgtgcgaacagacagattggttattctaaaggtgtggtgtgtaaaagttgaaagaatttccagtgtgttttttcctatgaacagtacaaaaacttgttacatgaggaatatcaatatcttgttacatgctgtccatctccctcatgtttcrttttatgtctcttctccaaatgtaagctcaataggtgaatatctttttttggccatgaaagtatcttttcttctgctctactgagtaacctttctctaccccattctgtcatctcccttccaactcttacaatttttaaccccttataattccgaaaattccacttcagcagtctctttttgtccctttctctaatgattgtgaactttttagttgccttaaattcttatctcctcagctacctcagtcttctacaaaaaaaataggtgaattttatgtaaattttttcatctgagtctcaacaatatgcacggcaaatgagataactgtcatagatgacackcacagaaaagtgtttaaccaaagtgtttaagtcagctgtgaaaatggaaactagaaattatgcctcctgggctcaagtaatatgttctctcttctmagtatcacttaccacagtattcagtttatcaccaaaactcctgactttatggacaggagtagaactaattctgtttcttatacttcctgaggaagctgactttatggacactgttggtttttccctctgcaaggcccatactttgtggaggctggaatctttcaacccagcctccactagaggtgaataaggattgtttatgccagtgatgatggtctcatcacccttccccccaagttactgtggaagcaggactcttggttagtgggagttggaggggaagtctgctggggagctgctcaaaatgttttctcagcaatagtaacaaatgactgggaggaagaaatgtctcatgttttggatatttttatgtgagacaaccctgatcctccaattcctatctgtaaaatcagcaattgtgattcctgtcatgcaggatttttgataactaaaaaatatatgtaagacatttggaagagtatctagcacatagtaggcataggacgaattacattccttctttctactgcatagaatcagtgtgcttgaatctttgcctcttagcctataagcttctagccagcttattgtttgtagatctctcataagcttacctacaacttatctgtctctggcagaactacttctgactttccatttagaaagcaagtccattccagacagttagtttcttcataaaattaggcatgatgcaggtaaataacctaaattattatcttgcacacaggagatgtaaacagcaattgttactgtattttgttcttgtccctatctttaaaatagtagtgccattctccctagtctttaaaatttgttttaatattttcttttgctgccagtctgcggattccgttgttctgattgcctaaatgtttagccttaaaacttcttgtagagtcagctcttgtatagttctcccccacagctgctaagcttaacsttttgatcacagctataagactttgtccccctatctcatgggattctgagtaagcttaaattccatgctcttgtttctatagaattcattctcagctcatraggactcacacacaaacttggtaacacaagagatattgtaatgaagggatgtgtatgtctgtgtttcaacccgtcgcatgttatatatttttatgaaaagcatttattatcaacagtcaaaatttgcaatttttgtattaaaatttccaggtttcctttttatttatttattttttgagacagggtctcactctgttacccaggctagagtgcagtggcacgatcacagcttaccgcagcaatcctcccacctcagcttcccaagtagctggaactacaggcacatgccatcatgcctggctcataagtttaattacttttgttgttgttgttgttgttttggtagagatggggttttgctatgttgcccaggcttgtctctcaaactcctgggcccaagcactctgcctggcttggcctcccaaagtgctaggatgacaggcatgagctgccacacccagcccaatttttctttatttaatagactttatttttagtgtagttttatgttcacagcaaaattaaaaggcagaagatttcccctatgtcccctgtcgtctctaactcttcttttaaaatggaaaatctggaaagattggtttccacatagcaacatttgcttcaagctgaagagtagctgtctgctttgctgggctacccactacccatttcactagtttgcaattcactccctgttggactacaaggagctgccttcattcatgtgtgttacctcgctggtgtagttatttgataggaaaacttctttatggaaggaaataacattaacttgtaataaaaaattctacaagcatctgttatgccttagcccattgaagctacagaaatctccaaaatatcaacattttgactgtgtaaatgcactttgagctctatatagtaaactttaaaattatgcgtatcaatcctgtaattaagttaaaactttgacacattaaattatattgtctatttgtaaccagtgattaagacgtataattgcagagcgtatgacgcaataaagcatggtaccatttaagaaatatcatacagctcaagtgctcagttaattttctcattagaaatattagtccgttactgctttaaaaaaaagttatgataaggcagtcatttctccattrctagttaaatcagctacatctgcccctccccccaacctgaactccttccaaaccatttctgctgtttgctcacctaagccgaaaacctgtgccgtcttccatttccattcagtcttccatgtctactaccacaaggttctaacagttctctctgcctccagcctttttccctctgccttttcttccacattgctgccagagtaatctttctaaaattcaaatttgaccatgtcactcctttcagtagtttcctaactcttgtcaaaaaaggccagccaccttaacttgattcctggttgtcacagaagatggtgatgtgactggtggaaagatatcaacaaacagaatgtaacgtttcatatatggcaaaggctatggagacttttggagaacttgtgttattttgtatctgaagcttttctgatagggcttctccatttaaaatgtacactgtatttccctgatttacttttctgagtattaactcttttaaatgtaactcagatattattttttccagaagaccccactgccgctaggttaggtgctttcttctgtgttttcatagctctttgtacatctcagtcattatcatgtgttctattaaaaaaatgtgaaataagtgctccatgttaacacagatttcgaaaacaaacacaatttactttggaatttctcaaaatctttaatgtgctaaagtggatcagcattctccaagagacagctatagtatgaaggattttccaaacaacactgaaccatttttggagctatttgttttaaatttccagtttcttgctttttcattcttatatcagttgtgtaagtatgtgtgtgtgtgcaagtgctgttgtcttttgttgttctgatattacataaatttatagtcatcttgtctttgctcttgagttttttatgtttcaatttgttgaatttggtgcacagtttgcgtgatttttttttattcraacctttatgacgttctcgtttctgtatttgagcttccctgttgacttgtttgtgaatacttactgtttgccatagtctgcttctggtgatgaagaataagaatgacgagtccttaggtagggcaagttgatagttatcttctggaaaaggaggcttcctggggagtcagtagctgtcatggggttagtaacttcctgaggagtctccgctagcttagaggctgtctctgtgttaatctgaatgcaaatattactgctatttaccagcaacaagctggaaacaagctaggaaaagaggctaattccctagcctacctgctgctccacgaatgtcaccctgttgattaattactctgagaaatgctcctgacctgccttcttccccccaaactcttagtttgcattgacctggttcaagggcttagaggaccttcaaactgctccaaactttatattggacttatgttttggattgtgatttttttccttgtttactttctttttcttcttttttttttaaatgttcactcctttcttacatgtaatcctttctgtttgtcagtttgctcaaaatttatctgtatatggtagtttttgcttttcagcactgttatggatttgctttttaaaaatctgttttgtacttctatcaaaacatcacaagtaccccataaatatgtataactattatgtatccataataattaaaaataaaaaatctgttttgatttttttatctaaatcatagagatttagataggatgtttgtctgtctgttctccatctattctaagcacttgaatcttttatttgcaagattcacctataaacgttacttgagttacccaacactgagggaaatgcatgacatcattatcttgaattgatctttttagtaacttgagtttctcatcacactgtatgctcattcagagcacaaaacaccccatattcatctctgtatttccatttccttgcaggatgctggatatatggttggtgttcagttaaactgagtcttatgaaatcaaactaaatataaacataaatacaaaatataaactaagtgggctggctgcagtggctcactgagcgcctgtaatcccagcactttgggaggctgaagcgggtggatcgcctgaggtcaggagttcgagaccagcctggccaacatggtgaaaccctgtctctactaaaaatataaatattagccgggcatggtagcaggcgcctgtaatcccagctactcgggaggctgaggcaggacaatcacgtgaacctgggaggcagaggttgcagtgagctgagatagtgacattgcactccagcctgggcaacgagagtgagacttcgtcttaaatatatatatgtgtgtgtgtgtgtgtatgtgtatatatgtgtgtatatatataaactaagtgataaattattgtttattctgtaaaaggaagcttcagaaatagtgcctctgttgcatttttaaatcttttaaaattgatacatgatagctgtacaaacactaggtcttatttcttttatcaactgtatatttaaactcactaattaatttcatttcccctcctgtttacccttcctagtgtctggaaccatcacgctactttctttctttgtggatctacttttttagctttcacatatgcaatgtttgtctttttgtgtttggtttatgtcacttaacgtaatgacttccagttmcactcatgttgctgtaaatgacaggatttcatccttttttatggtgggataatattctgttgtgtattatgccacattttctttatccattcatttgttgatgtgtacttaaatttattacatattttggctgttgtgaatagtgctgcaataaacgtgggagtgcagctatctctttgattttttttctttattttggcaatatacccagtagcagaattgctgaatcatatggcagtttcattttttttttcaaggttctaaaggtgcagagatattgttagtcttttgaggaacctccatactgttctccatagcagactccaaattagttgtactaatttacattcccaccagcagtatatcagggttcccctgtctccaaatccttgccagcattcgttattgcctggctttttgataaaagtctttttagctggggtaaaatgattttttttttttttttttttttttttttggagatagggtcccactgtttgttgcccagactaatctggaactcctgggctcaaggagtcccacttcagtcttgcacgtaactgggtttacaggcgcacaccaccacaccctgtatgctgcttttgagaaatgtttgttgagatcttttgccaatgtttaaatcacattatttgtttttctgcttttgagttgtttgaactcctcatgtattcggtagttaatcctttgtcagatggatagtttacaaaagttttctcccgttttttgggttgtctctttactttgttgattgttccttcgctgtgtaggttttatttatttatttatttatttatttatttatttattggaaatggagtttcacttttgttgctcaggctggagtgcaatggcactgtctcggctcaccacaacctccgcctcccggattcaagcaattttcctgcctcagccttccaagtagctgggattacaggcactcaccaccacrcccggctaattttgtatctttagtagagacagggtttctccatgttggtcaggctggtctcaaactcctgacctcagatgatcggcctgccttggcctcactgtgtaggtttttagcttgatgtaatcccatttatctgtttctgctttagatgcctgtgcttttgaggtcttacacaaaattgtttgcctasaacaatgtactgaagcatttcctcaatgytttcttctagtagttccatagtttcaggtcttagatttaagtcattaatccattcttatttgatttttgtgtatggtaagagatagggtctagtttcattcttcagcatatagttacccarttttcccagcaccgtttattgaaaacatcatcctttctccgttgtatgttcttggtgcttttgttaagatgagttggctgtaaattatatttgggttccttgttttgctccattggtctgtgtgtttgtttttaggccagtagcatgtgatttggttactataactttgcagtaaattttgaagctggatagatagtgtgatgcctccaaccttgttctttttgctcagagttgcttcagctattcagggtcttgtgagtccatataaatattaggattatgaacagtgaaaacacatggatacagggaggggaacatcacacaccggggcctgtcagggggcgttaggggagggatagcattaggagaaatacctaatgtaggtgacgggttgatgggtgcagcaaaccaccatggcacgtgtatacctatgtaacaaaactgcacattctgcacatgtactccagaacctaaagtataatttgtaaaaaaattgtgattgtttctatttctgtgaagaatgtcattggtattttgctagggattgctccaaatctgtaatttgctttgggtagtattgtcattttaatagtatttattcctccagccacaagcatggaatatgtttccattttttttgtacatgtcctcttcaatttctttcatcagtgttctatagttttccttgtttagatgtttcacttcttaggtaaaattgtttgctaggtattttatattctttgtaactattgtaactaggattacttttttctttagattgtttattgttagcatatgtaaatgccactaatttttgtatgttaattttgtatcctgcaactttactgaattggtttatcatttctaacaggttttttgtttgtctgtttttttggtggggtctttaggtttttccagtcrtaacattgtgtcatccgcgaacaaggctaatttaacttctcttttccattttagatgctgtttatttctatctcttgcctaattgctctggccaagacttccactattatattggataaaagtttgaaagtgggcatgcttgtcttattctagatcttagaggaaaggccttcagtttttccacattcactataatgtcaactgtggtttgttatatatggcctttattattttgatgtatattccttctatacccagttcgatgagggttgtaatcacaaaggattttattgagtgctttttcagcatctgttgaaacaatcatttgttttttgttcttggttctcttaatggatatatcacatttattgatttgcatatatattgcactgtccttgcattcctggggtaataccacctgataatggtgaatgatcttttttaatgttttgtcgaatttggtttgctagtattttgttcaggagttttgtatgtatgttaatctgtaatattggcctgtagttttcttttttcttgtttctatgggtgatgctgatcttgtagaatgagtttggaagtagtccttcttcaatttttttgaagcatgagtagaattgttattagttctttaagtgtttggtagaattcaccagcgaagctatcaggtcctcagcttttctttgatgtgagactttttattatggctttaatctcattattattggcttattgaagttttctattttatcatggtttaatcttagtaggttgtatatgtccggcaatttgttcctttcttttaggctttccagttttttagcatataattcatagtggtgcctaatgattctttatagttctgtggtctcagttgtcacatcttctttttcattgtgacttcatttatttgggtcttctctcctagttcatctagctaaaggcttgatgattttatcttttcaaataaccaacttttcattttcttgatcttttgtatttttggtctcaacttcattgatttctgctctgatatttatattttttctccttttaggtttggttcttctctagttcatcaaagtgcataattgggttgtttatttgaagtctttttacttttttgatacagtcatttattgctataaactttcttctttgtatcacttttgctttatcccatagattttggtgtgttctatttccattttcatctgtttgaagactttttaaaatttactttttaatttctttgtcaccccattggctgttcagtagcatgtttaatttccacgtggttgtgtagtttctgaagttcctcttgttattgttttctagttttattgcattgtggtcagaaaacatacttgatgtaatttctgatttctttgagtttgttcagacttgttttctggcctaagatatgttctgttctggagaatgttccatgtgctgatgaaaagaacatattctgcagcaattgagtgcagtgttctgtaaatgtcaattaggcctattaggtccaaagtgaagtttaactttggtgtttctttattgattttctgtctggatgatctttgcmttactgatagtagagtgaaagtcccctatagttaacgtattgcaatctgtctttctctttaggttcattaatgtttgctgtatgtactttggagctctggttttgggtgcatagatatttctaattgttatatctgcttgctgaattgacccctttatcattttatatagtgacctttgattctttttatagtctttgatttgtagtctgttttatttgctgtaagtatagctgctcctgctccttttggtttccagttgcatgaaatatctttttctactccttcactttcagtctacgtgtgtctttttatatgaagtgggtttcttgtaggcaacatattcttgggtcttgttgctttatccattcagccacttaatgccttttaattggagaatttagtccattacattaattattgataagtaaggacttcttccattttgttgattgttttctggttgttcttaatctcctctcttcctttcttactatcttcctttgtaggtaagtgactttctttggtagtatgttttaatttgttgcttttttatgtttagtgaatctactataggtttttgcactgtggttttcatgaggtttacaaaaaacatatatgtaataagttatttcaaagagacaataacttagatcacaaagaaaagaacagaaacaaaaatatttatgccttaattccttctccccaacattttgacttttaattgtctcaatttacagatttttatattacctatctcttaacaggttgttgtagctattgttgtttttgatagatttttattttgggcctcatactggaattataagtggattgcacaccataattacagtattagaggattctgggtttctctgtgtatttaattttaccagtggatttcatgcctccagatgttttctctttgcacattaattttttttctttcagactgatgaactccctttagcatttcttataagatgggtcttggggtgaattctccatgcttttatttatgtgggaaagactttgattctccttcatatttgaaagataactttgctggttacagtatttttggatggcaagttgtttgtttgtttgttcgttttttcctttcagcatttggaaaatgttgttccactcccttctggcctatatggttctcattgagaagtctgttgccagaccaattagagctcctttttatgttgtttctttcctcttgctgattttaggatcctctctttgtgcttcacctttgagagtttgatgattatatgcctaggagtagccttatttgtgtcagatttgttcagtgtatctgaccttccagtacctggatatttatgactttctcaagctttggaagtttttctgtgactatttcttggaataagctttctacccattcctctggctcaacttctttttgaacaccagtaattcttagatgtggtcttctgaggcaatattctgtatttcgtaggtggtcttcatttcttttcagtcttttttcttctttctcttactgtgtattttctaataacctgtcttcaggtttactgattgtttcttctgcctgatccattctgccatggagagcctctaatgtatttcagttcagcaaacatatttctcagttccaacatttctgtttaattgtttattattacttaaatctctttgttaaayttctctgataaatttctgaattttttgttttatcttggagatcactgagtttccttaaatctactatttaaattcttgttcagagagcttacatattattatctcattagggtcagtcatttgttctttgtttcatccgcttagggaagtcaggctccctgtttgytcttgtttcctgcggatgtgcgtctatgtctttactttgacgaattagttatttattctggtcttctctctctggcttgttttggttttattgaatgtatttgcttaaagactctttactgtaaggtttctgcctcctttttggttctcagtggcactttaaacccaggtttgccttggctctaataagtacctggagcagtgcccatctctaatgggggagctcccaaaggggatatcccaacagtgtgggaaggctggcaaacggttcctgcccatggtttctgtggaatatatctcctacaacatggagctgctgaataggcactctgatttggtgttttctttggctgcagacagggcagtttccagggttgaggatggtagtcttgcctctcccctttgtctctggctgtcctcaggaatatttctcccttcagtcctcatgatgcttctggtgagttgaggcagggatgagtctcctgccagggaaccaaaaatggtgggaaagccgattgttcacctcgatcttactttttccagtgtagaaatcgtgagtcgaggggaaattttttgtatgcttgatgctgggaagattgtggggagaggcatcacaggtatggaagtccgattctcttaccatctgctcagagttttttcacttctctgtggccctgagaagtgactgatcctcatatttgagttctgggatgtcgttggtgttaatcttagtgttacatatttgttgttttctgtgacattaagtgaagccagcttgcttctgtgacaccattttggaacttgaattctctaaagcatattaaggtctatttgtttccatttgggggactatcaaagaaatgaggatgccagttaatctatattcttaataacaaagtgatatattattacagctttatttagccccaacaaattcagagccactgaggtaaaaccatagtaattctcttctcccagagaaactagaaaatgaaattattaatttgcaggtcatttaaattttctcttgtggtgtgattaaaatattactttaaagtatgtgtgtgtgtgtgtgtgtgtgtgtgtatttatgttgaaaatagtaccactgtcagtataaagatatggttataagaatgtttatcaaagtgtggtttgtaagaataaaagctgcaaacaatctaaatatctaatagtagaaaatagcttaaataatagtatgaccatatactacaacattatgcagccattaaaaattatattgtaggccggacacggtgactcacgcctgtaatcctagcactttgggaggccgaggcgggcagatcacgaggtcaagagattgagatcatcctggccaacatggtgaaaccccgtctctactaaaaatacaaaaattagctgggtgtggtggtgtgcacctgtagtcccagctactcaggagactgaggcaggagaatcggttgaacccgggaggcagaggttgcagtgagccgagatctcgccattgcactccagcctgatgactgagtgaaaccccatctcaaaaaaaaaaaaaaaagatattgtaaaataacatttactaatttggaaagataatcacaattgagtgagaaaagagtaacttacaaaattgatgtacagtgtaattatatttttattttaaatgaggctatgaatgtgcaaagaagtttagaagattatagagcaatatgtttacagtggttttttggcaacttttttttaatgagaatgaatgttttggaataagttttttaaaagtattaaaatagcaacattcaaaatcacatttgtgatgaatattcagggaattattcctgttttaattaagtaaaacaagtacttatctgttgtttaatgcagctaatcaaaatgcatttctagattgccatgattaacttgttttggaatttgttgatggttcagctctcattaatattataagtatcaccttctgttatttgtgatacttagtttgtgaagaaaactcataaaaaaaattttaggaactgtcatcagtataactggagaaaatgaattggacatttctaaccaattatttagataaaaattatttaaatcaaatttattttaatatgttttcaatgaaaattttctataaaaatctgaacaatgtctgaaaaactgaggagttaaaacttcattggaaggccaaggcaggtggatcgcttgaggtcaggaattcgagaccagcctagccagcatggtgaaaccccttatctacaaaatatatatataaccgggtgtggtggcacacacctgtagtcccagctactcatgaggctgaggcaagagaattgcttgaacccaggaggcagaaattctagtgagccaagatcgtgtcaccacactccagcctgggcaacagagcgaaactccgtgtcaaaaagacaaacaaaaaactttaatactataaatctagagagggaccaacctccatgttctacatgcctatttaataatagctaacatttattgaacacttatttgcctggtactgtgttgggggatttacatgcattattttgcgtaatctaacaaatcttttaggtgggtagattttttttaacatctccctttcccatttgagagaaaaggcttaacttacccatgacagtaaataaatggtaaagacaggatttgaacccaggaagcctgacttgagaggcagtgctgttaatcactaagatgctctagttgactttgaattggtggatgcttttgtgaccagtatttatttccttgaacaatgacctcttcaggttctaaaataatgtagaggaataaaaaatttaggccattctgttgattatgtggtgttcatacaagggaggaggtttttcagtccaaacctaattcccaaagaaaaacttccagaaaaactgttcaagtcctaatattgagtgtccacttgagtcttttcttaatcgttttttctaagtgataactccattccttaggatatcagagaggaaagcttatctacatctacagtttttctgtaactccatcccaacacttttgaatcttttaagctatcttaagatttacatatcctagagtctgggtttttatcaaaggaccaaaaacagggaaataagaggttttataaagctgttagaagaagcatccaaaagaacaaaaagcaaatcattagtcataagctagatctttgaagggtattcatgcttgaagaagtttcatgttcatttcaatattaagcttcctctgcaacctcacctcattaatactacttagcattttcccccttggaaatatcatgaatattggttagaatttcaagtgagcccccaaaagacttgcttagtgtattatagttgtaataatatatgcctgcaaataacaataaaacaaacttatgaatgtagaatgttaaagtatcagggacttagaagccaagaattatattacctgccaataccaaagacccaagaatggtggctaaaacaagataaaagtttatttttctcacacataaagcaaattcagagtttgacagttgcatagtcatcaaggacccaagctacttctttctttctgcctagctttccttagtgcatggcttcaattctcagagtcactcatggtggaaaatggctattagaagtctagttcctagatccaaggaggaagtagaaggaaggcaggaagggcaaaatgggctcatatcagttgtctattattttgttccctttaagatattttcctacaatttctccctacaactttcctgtacattctactggatgggatttaagtctatagcaacaactagctataagaactaactagaacattgctacccagaataaaatcaggcttctctacttagaaaaaaggggatatttgtttttggaaagcagccagcatcctctgtcataagattgtaggatgcrtytcatctagacttttaagttcaagctgttaagacccagacttccccagctgccgatattgcttaatagtggcagttaaaacccagatggattgctcatctgtattaaccggagagcacacaattgcttctgctaatggtaaattggatagagtgatagtaaaacagtgtagcattaatgaagagttttttcttgcctctttacatcatcatcccccttcccctggatagtttagaatgttactgtgtgcttagatgatgagcctttctaactatgatcattttccttcccctcaagatacaagttatgctggctatccagattctgtgattaaaaataaaggtagttttagtagattctagcacttaacattggtttttaacaataatggtttcatgactttgggtaaattttttaaaattttctcctgcagtatagccgaaatacagaaagatgtggaatacagattgccattcaccataaacaacctgacaattaacattaatatgtgagtagaattgtatcctactttttcatgtaaaaggacttaacagtttttttattgtttcttagttattagaaataaacttttaaggtgaacttatttcaagtaactataatttataaaatagtgcacaattcagtgaaataaaaatattcgaaagctatcactgttatagtgttataagaaagaaactagaaaagaggaaatgcaataaaaatgtgtaatactaattctgagtactgtaattgtttttattgataagcactaaaatcttagcaggaggtatgctgaaaaatgataataaaaaacaaaggggttatatatataaagccgttagagatagattcacctttaaatcagaaacaagttaaaatattccaaatttcagcaacagatatactacatcaaccagaaagttcaagattagatttgatttgctgatcatttttaagaaaaacaaaaaagttaaaagtataattatgagggttttacttaagttacaaaaagttggacaaagtgattgctgaagtagcaatttagccttaaatgcagctatgaggctgtagtgtgaaaaggctgtgattacctgaggttacattaagtggctgctgctagagcaagtgtttgagccagataagaaggcacctaacttgaagacaggaaccttatcatattcaccttcacgttctccttgccagcatactgcctgtacataggagaccttattaaatactaatgagtgaattaaagcatgaatatataagtgctgtgttaacgatatatatgagcttttttatttatttacttatttttgagacggagcctccctctgtcgcccagactggagtgcagtggcacaatcttggccactgcaacctccgcctcccgggttcaagcgattctcctgcctcagcttcttgagtagctgggattacaggcacgccccaccatgcccggctaatttttgaattttcagtagagacgaggtttcaccatgttggtcaggctggtctcgaactcctgacctcgtgatacacccgcctcggcctcccaaagtgctggaattacaggcgtatgtgagctttttgaatcctcacagcagccttgcaaattagggcaaattacagaaacacggttagtaagtagcatagtcaagatacaaactgggctccaaaggccatttagtgccttttttaccaaactagttttaaaatcttcagctttgtaaatgaagtagttttatctctcatcaaatgaccaggtaaagctaagcaggagaggccaacaaggacccagttttcttttcaacagtatgaccaacaaatagttgtctgaaccatcaggggaacaaagagacaattcaaagtaaaatattcttgagttttagagatttggaaacagggtttcatatccagtaaactctcatttttaagatttcactcactaatcttggttttgtagtagttcaaaaaaggttaaaatttctgcttgtgtgtgtgtgtgtgtgtgtgttgaaaatatactgttctttacgtgaaaccatgtgattgacctctaacttgggagagatgtgtcatttggggcatttagaagggagccgtgtagaaccaagtcttgatgacagctacattgtttcaatcctcctactttacattttatcctctttagaaatacagtaaatagtgaaataatgtttcacagcatgttatttatttttatcttactttagtttttcaaagatgaggtctcactgtgttgcccaggctggacttgaactcctgggctcaagtggctctcctgccttagcctcccaagtaactgggactacaggcatgcaccaccatgcccagccgtgacagcattctcaaagtagaaaaaccacagaaaattatatggctagaacctgtggtccaataaatagccagactggactagtatggttcacctgataaaaatgcctgatctaatttctacctaagattttgtatagcttggtatattgtgtttgaaagcaactaattggcatgatgtgaagaatattctataattcatgtccatatttcacattaagattttactgcgttgaatgactagtcttgttaccaaattttagtcttaaacatattttcagacaacaccataatagagcacttattactaaatgacccatatcaaagtgtgaaaatttaatttacttttaaatagctttgttttaagattttgaccatataatgtacctttgttatctttgtttttgtttttcatctgttctacctctaccagattgcttcctccacagtttcctcaggaaaaaccagtgatcagtgtttatccaccaatacgacatcacttaatggataaacaaggagtgtatgttacctctccattagtaaacaatgtatgtatatgggataatttatttcagggtaatataataggtgtattacttttctactaaatattttagaaatctgaaatgcatttaaagtttcattttgtcatgagtactttttttaaaaattgaatatttaagactacgccttaaagttcttacaatatgatatggttgattgtgaaagattataacttccatatactctagtatttacctttgaaccctcaaattattgtaaatagtcaagtaaggaaatattttggctccattttttattcaatggacttttaacctgtttactaatcaccagatatttatggtatcgattctataagaaaatgctataacttgttaattgctaatatcctttttcatttaattcttgacctgcaaaagtaagttaatatttagagtgacattatcctaatgagactttataatctttttctggaagtgattttaagcgtcatgtattgttactttcagtttacaatgcactcagatcttggaaaaattattcagagtctgttggatgagttttggaagaatcctccagttttagctcctacttcaacagcatttccttagtaagtatatttctagtaaataaaaaagtctgcctgtattttaatgtattaatcaaaatatagtttaaaaattcaaatgatgttaaaaatcagtcctctgatttctacatccccacaaatacatccatactttcagaggcaactgttttactcttttacctgtttcttctaatgtttacctacatctttctgaataatgtatgcgtacttctatcactcgattctttcattttagatattatctgttggcctcctattgtaatagatgaagatttcagctgtttttcactaaacttcctttctcctcactgtctcagtgaaattatatcatgatttttaatattattccatatttggtgtatttattactgtgactctcaatattgtccattgctgagccaagtatgttaccatgtttacatttcccttatggtgcaattttttgccttttttctggaattaataattacctacattttgtatttggtttggttttgttttagatcatcttcattttccacatcatcttaaattttaagatcttactaaatttccacagagcttttagcaactatgaaaaatatcctttaaaccatttttttcatatcaaaccagtaagataatacctgggtttcattgtttccttcacattcagtgctccacttcttccctccattctgagttactctctataacatttgagtaactctcaccaggaatttcctttgttgtcatcctgggattttccctttgccactttcttgtattggattctccatttcttagatttcatttttccctttctcaggccatttcctagtttcttggtttactgccttccagtagcttcctgaataaagtcatgttctcgtactaaagatactgttttagtcttgttcttgcattgctataaaggaatacctgagactgggtaatatataaagaaaagaggtttaattggctcagggttctgctggctatacaagaagcatgacattgtcatctgcttggcatctgaggagcttttactcccggtagaaggtaaagcgggtgcaggcacattacatgatgagagcaagagtgaggagtgggggaggtaccacacccttttaaacagtcagatctcatgagaactcactatggcaaggacagcaccaagaggatggcattaaagtattcatgagaaatacacccccatgatccagtcacctcccagcaggccccacctccaacattggggattgcawttcagtatgagatttaaaggggaaaacatccaaactatatcagatgaataacagattaccctaaaaacttttggttgaaataatgacatttatgtttttataagaatctaccatttggttagggaccagtggcgataactcatttttgctccactttttgcattacctggtgtcgtctggcagttaatgttggcttaatggttagacttcagtgctgatacatctatatgtggcatctccatgtgacctgcgcttcctcactgcgtggcaggggtgagatctgagggtcaggatcccaagagagagagcattccaaccaagtggaagctgtattatcttttttggtttagtcctgaatgttattcagcatcatttctgctgcattttctaaagttagtcacctagatccacccagattgaaaggggagggaaagtagacttcatttctcgatggggtagcaaagttcaagaagttcatatgggactggaaatctggttgtggccattttggaatataaagtcggtcacattcttcctcctagccgtaagaattcacctctttcctataggtgaataggcacactcccctttccccaagaacttgcagagttcatcatattgtagaatcaggcttgtgttctttcatctaaatcagattcaagtacagatgaggtttctcacttgtgttcctgaagaacaattcctcttgatctgaagacaacggaattaaagagacaaggtagctgcccctcacacacccactgtacaatggtagaacaagcctcgggtaaccactatagattccaaaagagaggaagtaggaagcacacaggagccactggttcataacagtactgaaatccaactgggcacattgttttttttattaagacttagttaatggaaatgattcttcatagagtaattttcgtttcttggttctgccttctgtgtcataattcctttctgtaaaatgtagcccttgtttccaagtgcatagttttttcagcctgcttcctgcctgtagaaattaagggtctgttagcctctttttcatttggtactttctctgtcccttgtagacccaagatgacacaattcctttaacatgcttatgattggctgggcgcggtggctcacgcctgtaatcccagcaacttgggaggccgaggcaggcggatcacgaggtcaggagatcgagaccatcctggctaacacggtgaaacctcgtctctactaaaaatacaaaaaagttagctgggcatggtggtgggcacctgtagtcccagctactcggaaggctgaggcaggagaatggcgtgaacccgggaggaagagcttgcagtgagccgagatcacgccactgcattccagcctgggtgacagagcaagactccgtctcaaaaaaaaaaatgcttatgatttcttatgaatcctttttcattcatttcattaaacaaaagcaacacccactaagctcctccaaataagctgttgggcttccagtgaggctgctgagagacaatgtctttaagattctttgaagccctaagtggctgtttttcttactcgacagcactctgaggctctgccttggctcttccagaggtgttaacaaaggatcttctagcccatgctgggtttgaactttgcttttagaggtgtttcttaatttgagaatcttagggaagctaggaatgagagataaatttattttcaaatccaggaaatctcatctttcatatttagcagttctttaatttctctctcttctcacattttactacagccagctagaaatcaggtggcaccatccgcactgcctggaaatctccttagctagatcatccaattcactaggtacattttctgttttccatattattgcatgcagcagtattggtaaactttccactaataaaaagttctccttccggtgaccatctgctcaaaggcccaccaggctcctcctaacagcctctttgaggcccattagaccttcataatcttctgaggggacttccagcctatagctctgcttggtcccaaagctactcccacactttagatttttgttgttgttgttgtcatagcagcattccacttccaggtacttcagccctctccccctcatctttttcttcctgttttctatgttctagagtcctgagtccttattttcagataaaaaatgtattcaaaacccatacctctatcttctgtagtaatagggctggatataaactcatttaccttatttgaaaatacaaaccgacaagtttacttgttttcatttcagataagttcggggatatagtaccattattaaaaatcaagtttgatgcatttcttagattattttgtgggttgtacctgctactgagttcaaaataaagcagattgggtcagaattattgatttaaattcaaagatattacaaatactctctcatgttggttttattgtttctaaatagcttgttatattcacatacatatcactaattccttcagataaattttaagataaagatgagccatcgtttgaaatgaacaagctgattagaaaacttaattttttctaggggtcatatattcacctggctcaaaattcaaaaagtataaaggagtatagagtgaaaatctccgtgtcactyttttcccttgcagcttaattttttttcctcattagcatctaaagttatttgtttgggtttgtgtatatataattcctgagctgttttattcatctacaagaaaatatatatagtattgtattttcccccttttttatatgaatggtagcatattttgcccttcctttttttttttttttttttttttttggtggagggggtcactaaatgatatggttttggaaagtttttcatgttagtactaaggcacttcctcattattccttatagccacaaagtatttgttttatgggtgtattataatgtctttagcaagcctgacagatattttcatgttttctaaccctccctcaaaagcccatcctacttcattgccgtcagtgctgctccagtaaataatctttaaaataatattttacccaaatgtgagcttatttgttggataaattctagaagtgtaatgcacatttgtagttttgacaaatgctgcaaaattgccctccagagtagttgtaccagtttctgttcctatacaatccctattttccccaggctggagtgcagtggcgcaatctcggctcactgcaagctcggcctcccgggttcatgccatcctcctgcctcagcctcccgagtagctgggactacaggcgcccaccactacgcccagctaattttttgtatttttagtagagacggggtttcaccgtgttagccaggatggtctcgatcccctgacctcatgatccacctgcctcagcctcccaaagtgctaggattacaggcgtgtattagggttttataatttgttttgctttatcaaaggactaatatttctgtaccttcctttttcaggctttttttctttctactgtggcttatttttccatatacattttagtgtcattcgtatacatttaaaaaaaatgttttcttcccacaaaatttccaactcaggttatgtcattaaatgaaataatagtactctcataaaaaattaatacattttgaaacatttttcaatgtaaagggaagcattttagtagcattacattaatatttaaaacataactgtaagtcccttatcctttacactagagtgcctgatccatataaactcactgtattattcatatattgkatttagatgattctcagtctgcatctaggtctgaattactctaatgctttttagagtaatataatgatctggttctctctaaaatttgctaaggggaaaaaatgttaaatgtaaaatatttgttatcttgcaaaaataaatactgactatattgttctgtgattgaatccaaagtacataatgctgtgtgactctaatatacatgcgtgtttatatatgcatctgtttttaatatttcaacattttagaagctcatctgcatacttaattttacttcgaaattttctagaaaagcagtcttgactttcagtcagattttgacaaatacagagaaagctgttagcctctacttgaataaatgtcctggattaaatattgctctgcattccctctatggagatactgattgatagcagtggagtgctgaaaactcaaaaatggcctgtctatccacttctactccgtccagttgaattgcatgctttctaaagcacccatcatcttctttgtagaaaccacaattctacaattcttttttttcgggggggtggggtcatattttaccactttatataatatttaattccattatataatttaataaatatcacctgccattataacatttcatctatatagtacttgacctttgttatttagaacaatttagaaacaatttgacatgttttatccataaaatctaatgtaatgatcttctctttttcttttcagtctatacagtaacccaagtgggatgtctccttatgcttctcagggttttccatttcttcctccatatcctccacaagaagcaaacaggagtatcacttctttatctgttgctgacactgtttcttcttcaacaacaagtcataccacagccaagcctgccgctccttcatttggtgtcctttcaaatctgccattacccattcccacagtggatgcttcaataccggttggtatcgtcagttatctatattttgtgccactgaaacattcattcaatccacacacctttattacatgcctctgtgtgccagataataagttagacacaaaatatgaaaagatgaactcacatttttcaattcaagtaacaggtaaccaacaaataataattttaaatatggagcttctaattctagtgtagtagaagggacagagttttggtagagacacagttaggggaatggtcagtgctcctagggaccaaggtagaactagtagatcgcctttacaaaaaatgtgattctggtttttttcaccactttcttagtgcctcaaatatactgatgaatatagtgggtactctttaaaaatgaggcagctaaacaaatgcatgcatttatgcttgaggccagattttgaaagatcattattaatttgccagaataacaaggggatacataaggcattctttgagaggcagtaacattgtcaaagacattgaggtagaaactggatggcatttttgtgaagctgcctatagtagatctctctggctgccatatagggtgtgggcaaaggcagaagaatgatcatgtgggagcagcaggtgtcacattatgatgggtctgctaacatacgctgagggcttcaagtgttccgttggtttaaaagcttgtatattcttaagctggtaactgttgctatgtggaatgttcctgaaggagagactaatacttagggcatgaaacatttaaaggggtataaaacctttcaattaaaaccctcagtgaatatcacccatagcattactcaagtatgaaaccatagtatatccaacattactaatttcagagtttataatcatttagaagatacagacctaagtggacttggtttttccaaaacctttcatttattgtgttaatgagtgttgtgaacaaaytacagttagtagtgtgaacaaaattacaagaggacttttcaagggtcctcaaggataaaaagtcatatatattcaaacagtggctactcggttgctcatctrccctaccgtctcatgtgactgaggcatgtaactattcagactgttgataaattattgcttttstatatttaatgcctttcacttgagagaaacatattcatatataccaatgaaatctacagccatgtacttagacaagaaagagaactaccagttctctacctaacacaggtcctcacatggccatcaccaaaaaaaaaagtaatcctatgtatacgacgctgaaaagaagacagactgaaggaagaaggggagactaaggcagtgtgagatgtgaagatgaaaatatgataatgcaaacagttatgggatatagtacattaaagattacgtttattagtaattgagagcagtcaaaaataatggctgaaatttaatatcatttaaaacttttctttagacaagccaaaatggttttgggtacaagatgccagatgtccctgatgcatttccagaactctcagaactaaggtaaacctggaaagtaaagttggtcacattgtctattttatttgtaagcataaaccagattattatttcatatccatataaattaaagtttaaaattttcactaatcctaaacaatattgttgttgccttagtgggatttaaaaatcagttttaggtcctataggttacatttattgagtgactggtacatactcagggatttttataggatttttataatgatataatagttaccaagataacaaaatcctttctgtcatgtggcctgcattctttgaaaaatatttttgaatacattattcctgacaatttcaaaatatatcttggcctattttagatcttccattgttcccttagtagataaactttacatatagagaaataaagttataaagtattaggtgtttttacagatccaaactttttttcaaatttatagcagaaaagtttataatcaaatttaaggtgccatttttcatggaactttgcttctctaaaatgtttcatgaagaaaatggttttttgccattcagttttgggaagcactgcaccctttatacccccattgagagttcatgatactcataaggctcttattactaataagactactgaatgcagttagactttttctttatttttttgcagtcctttttgtctttaggatatatctcatcaaagatgtacagccaagtacccatgagaaattctgtagtttaaaaagagtttaaatttatttgcaccagtgttttatagtcattttaaggaaatagtgatttattgtcttctgtaataaaatgaatatttacaatatactgcatacattaaaggttaatatgcattgtaatgctcacaataaccccataaggtaggagttctcatttaataagattatcttttttgctttaaattttttttaaataattgttatgaaaacatcaaaaatgcaaaaaargtgaagaaactagtataatgagccaccacgtatccatcatgtggcaacarcagctataaacccttttgctcaccatgcttcatgcctcttctatccagctttcttggagggctgtaggtatgagtcaccattattctaaagcaaatcccagataatacatcctttttaacccatcaattcttcagtaaatttttctaccaggtaaggattttctttccttttaaccataaccccagtcaccatcatcatcatacctaacacaattaatggtaattctttaatattaccttatttctccagtgtcttaataattaatatttttgtgggcagtttgtttgaatcaggattcaaaacragttccacctattgcatttggatagtggatctcttaagttccttttaataatgaaccatttctccccaacttttctcttttatacacacacacacacacacacacacacacacacacacacagacatatacatatgtgtatttacatatgttcgtatacatgtacacaaatatgggaataaatacatgtccatgtacatacatccatgcgtgtatattagacatagtgtgtgtttattaaattggttatttgtcctataaaattttccatatcctgttttttccttagtgcctccttgtggtaccattgaagatgtttctctgtttcccatagtttatgctgctggtggctagaagtagacaaggttcaattcttttgccaatacttatgtcataattactgcatgcttctttttacatcctatgaggcagcagtgaggtctggttgccctttttttagtgacattaagattatatcaggttaaagcacctgaaatcattgaccatcattaatatagcaagggtcataaatatgatttaatgattttatcattaccaccagaatttattaaccagaattactctatgaagaacttgacttaatcaactacatatttagttatactgaagtatacttcatacaggaccaagaaaaatgcttaaatttttccccttatattatcacctktcacaataatgagttgctgcactatctgtctccaaaagttgctctgatgggtgagaaactcaagttgccttctgtatcgtttttggcaaagtgaagatgctgtgggctcatcatgaacatttcttctcccagacctagagtcagccatttctctgaagggtgcttgttcttttccaaaataacaataccagtactgttactaagattattgaatgcaggttaaatttttgtttttgttttttacagttctgttgtctttaggatatgacatgccagaatatactgttgtttttttaatctctccaaataatttttctctgggtgttgatataacttagaatatacaggtttatttattttcaaagcagtccattttccctgaattttaaagactgctttttcttttcttctttatttttaaattatccaacgtttttatatggctccatagtcaaaactaagatacgttcagaaaagttttgcttccatccatatctgctccacctagttctttcaccctacagatacccatttttgtttttggtttagccctccattatttcttttctttaaatattttatgaatatctgtacacacatatacataaacacacataaacatatctataactcttactgtgacagccacacatctgtaagctaaatagtcacagaggttaaaayggagttgttgtgactgcttatgtgccgtgtcttactggtcctacagtaactgacattatacactagcagagactgtttatcttgtagagtcttgggagattttactggctacattttggccaacacatccttggaatcatgcactgacctggtctaaagctgactagaggaaaaagccaaaatgttacagtaactactctggcctcttttcagctctgtttccctcttatcaatacatacaatgaaatgactaggaagaaattcttctcatgctaccttstctgtgaacttgtacttgtctgaatttactatagtactagtgtgttcaacattatgcttggaagaaataaatagcttaaattttacatatcagtaagtctggttcctatcagggaaatttaagaaataagtgatattctcaagcaattaagttaaacagaattaagaacaagaaaaaaatacttaactatattactgctgtcctattttaagaaacctaagctgaataagctccttagtttcatacattgttctttacctgagttaagttgactttatttttaatttcaggtcactgtataactgtgaacacttccccacggttgtgatttttaaagaaagtagatatatcgatatatccattggaccaaaatttacttttacagattctgtcaagaatatattacagactgctctatgttccattgtggttgatgttttatttgattttaaggttaaaactggcagccttaggtgtatatgtaaaaattatttagaaccctatcagttaactaaagctgaaaaattgtaaatagttgtcatggagaaaaactcgatgtctgatatttattgacattttttcttttgtgtttctagtgtgtcacaactcacagatatgaatgaacaagaggaggtattactagaacagtttctgactttgcctcaactaaaacaaattattaccgacaaagatgacttagtaaaaagtattgaggaactagcaagtatgttttccctctcctgagcrcacatttcctgaaaaaaatctcatctttacctagaagtaaactagagatttatcttacaggaaaaaatctccttttggagcccagcttggaagccaaaagacaaactgttttagataaggtgagttagtgataattttgaagaaatttacataatttaaaaatagaataaaacaaccttttcattttctcttttagtatgaattacttacacagatgaagtccactttcgaaaagaagatgcaaaggcagcatgaacttagtgaggtaagactgtttatttttttccctttgccatagattttttttttaatcttatgtgcatgagtcctgatctcactttcattatcatcagaaaccatttatgaggtatctgaccttataagacatgatacctttaaacgtggatgaacagctctcagtgatgaggcatcatacattatttgtgctcatataagagcgtatttgtttctaaaacagaaaattatgacaggccctgacacataacttttctgggtaagttatgaaaccattgtaacacttgtagtgaaacctagcaataacaacaaaaactttcgactcacttgtaagcttatctacaaataccttaaatgaaaagttcgcaaattaaaaagaataatatatgaaaaatatatagtattatctgctacaaataagttttatgctagaaatccagttatgtgaaaatcaaaagaattttataaaattcaacctatatttctgaaaaaaaaggaatctttgaaaaggaaccagaggacataatctttgtatcataccaataacaacctcatagttaatattctgtttcctgtaaaattaggaactttgggtaragtcaatgaaataaaacataaaatagayataaaccaacaacagcaaaaaagatggtaaaggagaatataaatttataatgaatttcagataatacggtcatttgtcagaataaagaaataatagctaacrttgagcaattaatatgtcttgcaccgcatgaagctatttacgtatattgggccattattacaccaaatcctatgaaataggtattgttactttttcccattttacattttacagatagggaaactgaggcacagggagattaaataaatttcttgaggtcatacaagtagaaacattagttaggagtstaacctaagcagtcctccttcacagaaaatctgtgagactcaactgaagtactgttagatatatactggaccttagtaaatgttgaagaagctttcatagtactcaacatcattctttatacaaactcttagtaaactaaaaatagaaatttcttatttgaaaaagaatactagaaaccagcagtaaacctcacaattactacacatttctaggatcccattaatgttaggaataagagagtaatgcctcatgatcactgctgtttaacgttgtttgggaggttttgagtactgcaagaccaaaaaaaagtggtataacataaaaagaagaaatgaaacagttgtttaccaaaaataaacaatcaaaaattctagagaactgagaaattttttcctgtttgctccagcaattactactgcaaaatgaagtacagaaaacaactcatttaccataggaacaaaattgtaaagtacttagaagtaaacccaatgaagtaagttaggaaactttattgaatgccataaaagaagagctgagttttgtattttctaagactatttagagcagcatagaatattcattgaatgaaagatccattattaaaaagatttcattctccccaaaataacttagaaattgaatacagttcttatcaaaatgccaagaatattttttttatcttaacagtttattctaaagttcatctgaaactttatttttcagatgggtagtcaggaagagcttgaacaaaaagaaaaaatgaaaaaaactccctttcccagtatcagaatacactgtaaatcctcattatttaaaacagtatagtagttttataggaagagaaaattatttctatggaacagactatgtagttcaaaaatagacttgtgtatgtgaataatcagttggaaaaaattgaggattcaataaattataaaattggttatttagtatccatttagaaaaaggttagatcattgtatcatacaatacacagaaagtttattacagataaactgcttcagcggaaaccataaaacgtcaactagcttctaggattttttctttaagattatggtgggaaaagcctttcttagcataataaaacagatatgagcataaaggaaaaactcgacatatttacctctacagattgaaaactcagatatattaaaaaatcatgaaatcaaaattgaagttaaaaaaagggtacagatatttttagcctatacaacaaatactaatgccagtggtctattggaaaaggaaacaacaggaaactgacaaaaggagaaatataaatgtccaataaagattctgctttaacagttattctgatccttaaacattcatataagaattgctggaagtgactcttcaaacacttaaaaaaaagacacacacacacacacacacaaaacaatgattcctaggcttctttctagatgttctcagtcaaaattttctggggatgatgaatcttctgcgctcttacatatggaaaccacttcattagaccattggttccgtgatggaggaatctgttctgtttcatttctactgtacacctaatatctggttcagtggttggcacataataggtactcaataaatatttaatgaataaataactggaaactttggaaaatatgttcaactttactgtaattttttaaaaagccaaataaaacatccatgtgagccatatttgtgaagatagataaccagttttggcaagggcaatgagaaaatggtgcattacagttcatttttatttatgagtcacaaagagatactaccccacatgcattagcatggccattattttttttttcttactctgtcacccaggctggagtgcagtgctgcagttacagctcactgcagccttgacctcccaggctcaagcgatcctcccaattcatcctcccaagtagccaaggctacaggtgcatgccaccacacctggctaatttttgtattttttgtagagacggggtctcgctatgttgcccagcctggtcatgaactcccaggctcaagccatctgcttgcctcaggctcccacagtgctgggattacaggcatgagccaccacgtcaagcaggatagctattattaaaaaatcattttagtgcctagatttaggtctttgatccatttggaatcaattttgtatttaagtaaggtaagggtccaacttttttcctttgcctgtcgataatccagttttttccagcaccatttgttgaaaagattcctttccccattaactggactgggctccctggttgaaaatcatttggccatatgtgtgagggtttatttctgggctgtctattctgttccattgttctttatgtttttatgccagtaccacagttttgattactgtaactttgttagtaacttgacatgaggaaatattaatcatctttaagattgttttggctatttggggtctcttgagattccgtatgaattttaggataggtttttctatttttgcaaaaaatgcccttgagattttgatagggattgcattgagtctataggttgctttgattagtaatgtcttcttaagaatattaaatctttcaacccataaacatgggatgtcttccagtaatttatgtcttcaatttcttatagcagtgtctacagttttctgtttatcagtctttcactgctttagtgaaatttaatcccatcatttttgccttattctattgaaatgagtcgtcaggttcagcccacactcaatggtgggattatgcaagggcaggaataccaggaggtgaggtcattagtggagcgtctccttagcatatatctaccacagtgatttaattcgtaaatccttaggagagaacaatgattttcccagtttctctcatttaatagtttgcagccaatagattagtttctcttgagttaggtgtctacccctatccaaaagctaaggacctgggtggggcattataagacagcagattttctcaaaaagaggctatatagggcatataataaattgcctctccataccactaccttacttcctttccctgtgaggagttcttgtgagtatcataaattaaagtagtgcctgattttctttttcagagctgtagtgcaagtgcccttcaggcaagattgaaagtagctgcacatgaagctgaggaagaatctgataatattgcagaagayttcttggagggaaagatggaaatagatgattttctcagtagcttcatggaaaagagaacagtatgtaatactcgtcagttgaggacaagtattggataaagtttggtatttttatagaggaggagaagcactgggtgttagctatttctctattatgatatcatccccctttttttgtacaatatatttacctgaaaggaaggtttctattccttgggtgtggacttgggcaaaaaccaggttcctggaacttaaaactttgaaggtctgtcataggactctggacagccacacaccttagctattcccaggggaccccaggggggcaactgccattgctctaagatgtccttttgatgtgacttgagatataaatgagagtgagggcctgtacgtgtggctatttcctgtctggtatgtcagaggaacagtcctggtcagaagggggctcttctgagcagaaattgctaataaactttgtgctgatctggaaaaaaaaawwttttttttttgacagcatagtatcaaattactttagcatactcatgagtgaaaaacattagcacattactgaactggagttttgagtgctgtgagaggaacctgaaaagcctcttgagaataatagcagcatcttcctatcactttagacttgctttttctgagtatacaagcaggtaaatcaaatagttgtttcagaaatggtagtatctgtatcattctgtaatacagctgataaatctagtcctaatagttgaaatagactcctcaatgacttgttttaccacttgttgaaagaaagaataacgtacagggattatagaatacatttttaaaaattgagaaacagtttctgttctgttctgatatttctgttgtatttaaagaaaaatccaaaaaagtctgcttaatagtttcttgccttttaatacagtccaaaatatttacctaatttgtctgaaataatcacattttaaaaatagtattttgttagtaaactttatgaaacatctgtgagacatacacacacacatacacacactcctgttaaggcagatgaggtggattttatcattcccatttttcatgagaggaaattgaagttcagagatgttagtgacttacttatggttatagtgttagtaaggcattgatttctgctccattattcttcaatgctgtgtaactgtgccttgaagcttgtatctgttaatcttcctgcttaacagtagcagaatttacgtccatttttttaaacatagatatttaaagttagataattgatataaaggatcagtgttttttacattctagaagcttgtaggcgaaggctgtcttccaagcaagagcgtttttttgtttttttggttgttaaattcttagctgtcgtcaacattagctatcttcaacattcaattattagattactacctaattcaaaatgaattggtgtcatgtgatcctctgcccagtcgactgggctgagggagtggattatgagaagggagcatgagaggttccctaaaacagggactggggtgcaggaaagaagatgacaggcatgtctcatgtcccattcaaagtattatctgctccttgtaccattagtgctaatgaaatgaatttgctcataatttgataattttagctattagattattagctatcttcaacattcaaaacataaaataatgccaacaagttaaaagcttcctgtcayactgttggaagtaaagtagtaggcatatctttgtaaaagtgactsgtattttcaaaaatttattttctagatttgccactgtagaagagccaaggaagagaaacttcagcaggcgatagcaatgcacagccaatttcatgctccactataggtaaattgtatttcaagtttgagtctcaaggtgattgcatcagtgttctttaaatagacatgttgttaacggtgcctgttcatmagccttaagcataattctgtcattatagttactgtgctatgtaacatagaatgctttgtattatataataagcataatataaacatataactagtagaaatcttttggatattttctgtgatcttggcatgaatgagatttttttaacattagctgctaatgtagaattgtaagttatagtcagttcctttctctcacctggtgtgtagagtataccttgtcatgtggctaacatttctcagaaggctcctttgtcatttcttcctttaaagtgaacttccagccagtctctttctctatcccacaccacgattactctaataattcacctgtccccacgacttgagggttctcttcctatgcagcactgatagaatgatcttcctaaaataccacttttatgataaaatttgctctactccagaacctgtaattaatcgctagtaatgacagtatccatgccaaattcctctgcttttaagatttccataatcttgcatatatttcagatcatccattttaactttgcattttccccttacattgcgttgtcttacatggcacattctttcttctaccacggtatctttggccgtgcttgtacctgatgttaagatgcctttccttttcctctgcatctgttttgttttaggaatgatttgtttgcaagaatagttcccaccccaacaaacttaagtaaaagcttatgttatttgataggacagggatttattatagagtaaaaatgaaggaaagtacagtcacctgagactgaaaacagccactcagtgaccaaaacagctcttctcacaccttttttgaggctgcttgtttggttgtttcttatttctgcatctctattcttttttaaaattttttctggccgagcgcagtggctcatgcctgtaatcccagcactttgggaggccgaggcgtgtggatcacatggtcaagagatcgagaccattctggctaacacagtgaaaccccgtctctactaaaaatacaaaaaaaatattagccgggcatggtggcaggcacctgtagtctcagctactcgggaggctgaggcaggagaatggcatgaacctgggaggcagaccttgcagtgagccgagatcacgccactgcactccaacctgggtgacagagcaagactctgtctcaaaaaaaaaaaaattcttttttcttactagcccttcacgtattcctgattatatcatctgacagttcagacagccgatggagataaacaagagtccctggagttctagaacattccctggaagagtaactgacccagtatgggcaagctatccatcctactgtagtcagtttggcctggaaattggtatcctgtggtcctctgcccagtcgactgggctgagggagtggattatgagaagagagcatgagaggttccctaaaacagggactagggtacaggaaaagaaatgacaggcgtttctcatgtccagtaaactatttctgctccttgtaacattagtgctcacaatgaattgttttatgtgttactttccaaatcatactataaattccttaagggtaggggctgatttttgataccaactttgcatatctgccagcttaagaagaagtagacacagagtagttgctcatttatatgaacatactcaaatccgttccttacctctattccctcatagtcaagttattttataggaaaatcttttttattattattatgctttaagttctgggatacatgtgcagaacgtacaggttttttacataggtatacatgtgccatgatggtttgctgcacccatcaacctgtcattgacattaggtgtttcttctaatgctattcctctccttgcccccaactccccaacaggctccagtgtgtgatgttccctccttgtgcccatatgttctcattgttcaattcccacttatgagtgagaacatgcattagttggttttctgttcccgtgttagtttcctgagaatgatggtttccagcttcgtctgtgtccctgcaaaggacatgaactcattcttttttatggctgcatagtattccatggtgtatatgtgccacattttctttatccattctatcattgatgagcatttgggttggttccaagtctttgctattgtgaatagtgctgcaataaacatacgtgtgcatgcgcctttataggagartggtttataatactttgggtatatacccagtagtgggatctgggtcaaatggtatttctagttctasatccttgaggaatcrccacactggtcttccataatggttgaactaatttacactcccaccaacagtgtaaaggtgttcctatttctccacatcctctccagcatctgttgtttcctaactttttaataattgccattctaactggtgtgacatggtatctcattgtggttttgatttgcatgtctctagtgaccagtgatgatgagctttttttcatgttggttggctgcataaatgtcttcttatgaaactgttcatatccttagcccactttttgatrgggttgtatttttcttgtaaatttaagttccttgtagattctggatattagccctttgtcagatggatagattccagaaattttccccattctgtaggtggcctgttgattctgatggtagtttctttgctgtgcataaggtctttagttttattagatctcatttgtccattttggcttttgttgccattgtttttttgtgttttagacatgaagtctttgcccatgcccatgtcctgaatggtattgcctaggttttcttctagggtttttatggttttaggtcttaacgtttaaatctttaatccatcttgagttaatttttgtataaggttaggaaggggtccatttttagttttctgtgtatggctagccagttttcccaacaccatttattaaatagggaatccttcccccattgcttttgtcaggtttgtcaaagatcagatggttgtagatgtgtggtgttatttctgaggcctctgttctgttccattggtctgtatgtctgttttggtaccagtaccgtgctgttttggttactgtagtcttgtagtatagtttgaagtcaggtagcatgaygcctgccgccagctttgttcttttcgctgaggattgtcttggatatatgggctctttcttggttccatataaaatttaaagtattttttctaattctgtgaagaaattcaatggtagctcgatgggaacagcatagaatctataaattactttggtcagtatggccgttatcacgatattgattctttctatccatgagcatggaatgtttttccatttgtttgtgtcctctcttatttccttgagcagtggtttgtagttctccttgaagaggtccttcatatcccttgtaagttggattcctaggtattttattctctttgaagcaattgtgaatgggagttcactcatgatttggctgtttgtctattattggtgtataggaatgcttgtgatttttgcacattgattttgtatcctgagaccttgctgaagttgcttatcagcttaaggagsttttgggctgagacagtggggtttcctaaatatacaatcrkgtcatctgcaaacagagaaaaattgacttcctcttttcctatttgaatacctttatttctttttcttgcctcattgcactggccagaacttccagtactgtgttgaataggagttgtcttgtgccagttttcaaaggcaatgcttccagcttttgcccattcagtatgacattggctgtgggtttgtcataaatagctcttattattttcagatacattccatcattacctagtttactgagtgtttttagcatgaaggggtgttgaattttatcgaaggccttttctgcatctatgagataattgtggtttttgtcattgcctctgtttatgtcgtggattacgtttattgatttgcgtatgttgaaccagccttgcatcccagggatgaagccaacttgatcgtggtggataagctttttaatgcgctgctggattcagtttgccagtacattaatgaggattttcgcattgatgttcatcagggatattggcctgaaattttcttttgttgttgtgtcttagccaggttttggtatcaggatgatgctggcctcatacaatcagttagggaggagtccctctttttctgttgtttggaatagttttagaaggaatggtaccagcttctctttgtacctctggtagaatttggctatgaatcagtctggtactgggctttttttggttggtgagctattactgcctcggtttcagaacttgttattggtctattcagggatttgacttcttcctggttgggaggatgtatgtgtccaggaatttatccatttcttctagattttctagtttgtgtaaaggtgtttatagtattctctgatggtaggttgtatttctgtgggatcggtggtgatcttttttttgttgttgttgttttgtgatggactctcattctgttgcccaggctggagtgcattggtatgatcttggctcactgcagcctccgcctcccaggtttaagcagttctctgcctcagcctcccaagtagctgggattataggcatgtgccatcacacctggctaatttttgtatttttagtagagatggggtttcaccatgttggccaggctagtcttgaactcctgacctcaggtgatccacccacctcagcctcccaaagtgctgggattacaggtgtgagccaccatgcccatacgatctcccctttatcattttttattttgtctatttgattcttctctcttttcttcttttttagtctggctagtggtctattttgttaatcttttcaaaacagctgctggattcattgatttttttttttttttttgaagggtttttcgtgtctctgtctctttaagttctgctctgatcttggttatttcttgtcttctgctagcttttgaatttgtttgctcttgcttctctaattcttttaattgtgatgttagggtgttgattttttagatttttaccgctttctcctgtgggcatttagtgctataaatttccctctaaacacagttttgctctgtcccagagattctggtacattgtgtctttgttctcattggtttcaaagaacttatttatttctgtcttcatttcattatttaccaagtagtcatcgaggagcaggttgttcagtttccatgtagttgtgtggttttgagtgagtttcttaatccggaattctaatttgattgcagtgtggtctgggagactgttatgatttccattcttttgcatttgctgaggagtgttttacttccaattatgtggccaattttagaataattgctatgtggtgctgagaagaaggtatattctgttgattatgggtggatagttctgtagatgtctattagttccgtttggtccagaactcagttcaagtcctgaatatccttgttaattttctgtctcgttgatctaatattgacagtggggtgttaaagtctcccactattattgtgtgggagtctaagtctctttgaggtctcyaagaacttgctttatgaatctgggtgctcctgtattgggtgcatatatatttaggatagttagctcttcttcctacattgatccctttaccattatgtaatgcccttctttgtcttttttggtttttcttggtttaaactctgttttatcagagaccaggattgcaacccctgcttttttttactttccattggcttggtaaatcttcctccatccctttattttaagcctgtgtgtgtctttgcacatgaaatgggtttcctgaatacagcatactgatggatcttgactctgtatcatttgccagtctgtgccttttaattggggcatttagcccgtttaaggttaatattgttatgtgtgaatttgatcctgtcattatgatgctagctggttattttgcccattagttgatgcagtttcttcatagtatcaatggtctttacattttggtttgattttgcagtggctggtaccagttattcctttccatgtttagtgcttccttcaggagctcttgtaaggcagtcctcgtggtgacagaatccctcagcatttgcttgtctgtaaagggttttatttctcctccacttatgaagcttagtttggctggatatgaaattattggttgaaaattctttaagaatgttgaatattggcccccattctcttctggcttatagggtttctgcagagagatccactgttagtctgatgggcttccctttgtgggtaacccaacctttttctctggctgcccttaacattttttccttcatttcaaccttggtaaatctgacaattacgtcttgggtttgctcttctcaaggagtgtctttgtggtattctctgtattttctgaatttgaatgttgggctgtcttgctaggttggggaagttctcctggatatcctgaagtgtgttttccaacttggttccagtctctctgtcactttcaggtacaccaatcaaacataggttttgtcttttcacatagtcccatgtttcttggaggctttgtttgttcctttttattcttttttctctaatcttgtcttcacgctttttttcataaaattgatcttcagtctctgatatcctttcttctgcttgatcgattgggctgttgatactatgtatgcttcatgaagttctcgtgctgtgtttttcagttccatcaggtaggtcatttatttatgttcttctctaaactgattattctagttagcaattcttctaaccttttatcaaggttcttagcttccttgcattgagttagaacatgctcctttagctctaaggagtttattacccaccttctgaagcctacttctgtcaattcatcaaactcattctcagtccagttttgttcccttgctggcgaggagttgtgatcctttggaggagaagaggctttctggttttttgaattttcagcctttttgcactggtttttcctcatcttcatggatttatctacctttgttctttgttgttggtgaccttcggatggaatttttgcatggtcgtcatttttgttgatgttgatgctattgctttctgttagttgtctttctaacaagcccctcttctgcaggtctgctggagtttgctgggggtctactccasatcctgtttgcctgggtatcaccagcggaggctgcagaacagcaaagattgctgcctgctccttcctctggaagctttgtcccagaggggcacctgcaaagtgccagccagagctctcctgtatgagctgtctgtcaacccctgctgggaggtgtctgcctgtcaggaggcacggtggtcagagaaccacttgaggaggcagtctgtctcttagcagagctagagcatggtgctgggtgatccgctgctctcttcagagccggcaggcaggaacgtttaagtgtgtgcaagctgcgcccacagccaccccttcccccaggtgctctgttgcagggagatgggagttttatctataagcccctgactggggcctctgcctttctttcagagatgccctgcccagagaggagraatctagagaggcagtctggctacagtggctttgtggagctgaggtgggctttgcccagtccaaacttcccggaggctttgtttacactgtgaggggaaaacagactactcaaacctcattaatggtggacgcccctccccccaccaagctccagcatcccaggtcgacctcagactgctatgctggcggtgaaaatttcaagccagtggatcttagcttgctagactccataggggtgggatccgctgagcaagaccatttggctccctggcatcagccccctttccaggagagtgaagggttctgtctcgctggcattccaggcagtacgaaaaaaaattcctgcagctagctcgatgtctggccaaacggccacctagttttgtggttgaaacccgggcccctggtggtgtaggcacctgagggaatctcctggtctgtgggttgcgaagaccgtggaaaaagcgtagtttctgggctgggtagcacagtccctcaaggcttcccttggctaggggaggtagttccctaaccccttgcacttaccgggtgaggcaacaccccaccctgcttctgctcaccctccgtgggctacacccactgtctaaccagtcccagtgagatgaaccaggtatctcagctggaaatgcagaaatcacctgccttctctgttggtctccctgggagctgcagactggagctgttcctattcagccatcttgcctgggagccactgtgggcaaatcttaattggaagataatgtaaagagatacatattcatcttcttaaatattagaggtattttttattgttttctttctagattttcctggaaacatgaactgccaagagaggaatgggacacaaaaccaaacactgttttatatttatggtttgcaaactggcatttcatcagtggctaaattcacagatatcctatatagattgtatacagaactgagactgattttgtaccgattagaatgattgctatgatctttgagaaatttttctgcactatttgcactgaaatgtttatttattgttgataaattgtatcatatttaagttccactgctgttcctcttaccttgattaaatgcctatgcatgtacttttagctagtttttaatattttataaaacttcatttaaatttgtatttttaacttgaagttccatttckttatcaaggatggtatttagatttttttcctcttaaccttttttcaaaaactattttcaactgtgaggaaacccttatttttctttctttgtggataaaactttcaaaagcaatttaagatattcatagtgttaggaaacaccaaacctgcctatgtgccatctcacaaaagaaacttttaatacctacaataaatcaaaagaataaaccagctgttcttatatattgtttcatttttaaaactaaagatgcatttaagaagcaatacaagtaaatattttacctaataggaaaaaaaaaagttgcctttcatttaaaccattccaacagaaattcttatgctaatttaaaacatatatatatctggtaggtttgtggttggataggttttctaaattcctaatgttaaaaacaatctttatgttaatatacactaaatctatacacaaaaaaagtcaatgaacttttctgacctttactgtgagttaccttttcctaagaggaaagctatagtaataagtaaaatttaatttttaggcaatcctgatttttaatgaatttaattgagtgttcttgtatactacattgagcagtttgcttctataccgtgtcacaaaattcatgtatttcttgagaagccctaaaagctcataaaggaaaatgccgtgaactatgtagctcaggcttggtaaggtgccatctaaattacaaaacaaactaatgcataattttgcttaaatttcatcccagtatgattgtcttcccaacaccagcatatagtatagattgtctgtcttttttatattttttagttcttcctgtacatgtttttggcaataaagttataggaagaacaaaattattttgttagaattaaaacatgcttaatatttagtctgtttgtggagggcaggtattcacgtggactgagatacaatgttggatacagaaaataactttcattgtcttcctgacactgtgctaaggacatgctgttaaagcttcaaagtgaccagatgaggaaggaataattaattattactcctgatttgtagataactgaggtaagagtgtttcaaatttatgatagtcttttgggtattcagaaacctttccttatactgcactggccaccagagcttaattttcccagcagttacagcaatgggagatagaacagtctcartcttttgccaacmatcaggttcctagaaaccaggtaggtgtatcccataacaagggaggagcataccacagcccctcatttgattaattcatttgatctatctatgttattaagtacctactaggaataaggcattgtggaaatactatacaaagataaacattgtttagatgcttatctactttccttttcaccagaaaaacagaaaaaaaagaaacattttcttacagagtaaaaatgttctacataatcacatgagtagttcatctcagtgttttttattctttaaagttgaactatcccagtttcattctataccattcattggataaccttgttacaacccagtcatgaaacagagcagtgtgatcagttatctgcatttaacaaatagacaaatcagtttacataaaggttatgtatgtcacccacgatgaaaagaatctgcatttgaatatgcccgtatgaatgtgggttctgtttttgcaacagagattaagtgaccattttttctaattttatggctatatattttcttcataaaaattggtcacatcggagaagcagtgccacaggaaaaatgaaatgcatgtgaaagtttgtattctgattttacamgatgagatagaaatcagaattaaagaggaatacttaggagttactaggctaatcagtgtacgaatttgtcataggtagagatttaaaggttaatatcttaaaatagaagaaaattctaaatcaatcaatcagtgagatataaactaaacagacccacttcaaagttgaaagaaatttctaggcataaattgagactaggaaatttatatcagaatagagggtgcttgacacatatatatgcttaaattgaaggacagctcagattcatttttaggagaagaaagtaaactaatgtgctcttaaagaataaaawtttattctatggtttctgtctctgatcatcaccttccattctataaaaagctcagttactgatttgctgggtcatggtcaaaattcttacctatttatttcatatcaactttaaaaaataaattacttgcattctayatattactaattgggaagtaatatgcctcaaatcagttttatactggattattccctatgctttaaaccactgctctcaataaaacacttcctgattaatgtttgattattagatattttagtcttgttggggatattttagtcttgttgggttagccatgctctgaagaatctgtgaaagtacagtaaagttttaataagcaataaatgtaaccttttatataaatctcagtgctaggttaacttctaataagcagacgaacatgttacataaattataatgtctgtcttgtaaaaaagttgaggggactaaaagtttaygactctgatatggaagttgtcatattaaaaaactacattttaaaacatcaaatatttatactatttgcttttcaaataaaagcatagtgctgtttggcatagatactttgtcattttttaaaaaatgtttattgtttttatagacatacactgtcaaacggaagaaattaaagccacatcctcaatattaggcaacagagtttctaagagtggacagctccaagaaggttgtgaagtgagttatgttatgttataaaaatgtgaaagccattaccactatatcctaagttttattttagcaaggtattccctattacatatagtatattgcagaaaatgaataaacattccttgtacttaatttgggaactgctcagcrgagaatgcccaaattttatattctgaaagaattaattacacttgctttattttttacattaacagtacttttaaatcacagttctctaatatattctatatttttaaatatgatgaacacaattaaatgttttcatttatatatattgcaacactccctccaaatctttcatactagagagatcagcaatgttgctttcttgccctcgtcctcatttcagcgaaatgtaataattctcccattaaaaaaaatcagatattcaaaatattgatgtaaattgtaaagtttaaattaatcctttcacatattcaaaatattgatctaaattgtaaagtttaatccttttacattctagaatgtactaatatattaaaaccatacagtgtgaataccatttatttatgtccaaacatggccacttttccccactaagtttaatttaggtcacctagtgaagtcttttttaactcataagatagggsagggrctctcccttaaatgtgcagtgtaacaaaacaaaaattcttttcagaactttcagcagtcagtggtcatgagatgttactaaggttaattaaaccatattagccagttacataatttctaaaatgatagattacaaaacctattcccttcattaaacagacatgacaacccaattctctggttcttgaaactggattttcactcacagatgttttatctactaactttataatgtgatactttgagatcaggctggtggctggcccacactgtcggtagtgtagtctctagaacagtaataaaaggttattacaagaaagctgatacttaaattcatatgtaagaccaggagaatgaatgttgcttctacctcgttagctattaaatcagtgttagagaaaaagtgagatacaaggtttagcatttttaaataatgaggagaaacagactatagatctcagagaaaagcaacaaaattattctcacaattcaaaatatatgctccaaggaaaagttaaagtgatgattatgcctgaaagataagcaattaaaagctccttaggaatgcatctattaactaaaaagggtgcatctcaccaatgtgcctgtttttagaaatatgtataagagggtcggaaaggaggataatgtcagatgctttagaaaacacaaaatatgcatctagaagtgaactaaaagaatcatgatgatcacagatgtgagggaaaggagtggaggctttttgagagatgcatgctatgacaaggaagatagatactgatcacttcaggtaatgacagaagtaattgctctgcagtgaatataattttcatagtctagggtgagcttcaaaatggtgaataattttccttatatttgataaatgaaatgactacgtcctcttcagtatctaagaaatcaagaactgggcacttttttcccttttcatagctgcattaaaatagttctcaatgacatgcaccatttcctgtttttacaataaaccaccttgttcccttgtttttggaagtgttgcttatgtgtcctttactttggaactccaaagggaaacttcaggcagtgagaaacacggcttcatcagaatcccggtccttgccactatcttcactcggtgcatgctcaccaccacttggagaccgacagctcaaatcctccaccccggactcttggtcactgttggctgacagatctggatctgaacttttcagattgtcttgggttagaatcagagcagaatcttcatcgccttgtgaagggctccgggatggaaatgatttcatattcccactgtaatcctggggagtgttggctatgctgttgtctgaggtagaaaaccctgagtgcttgctgggctcactktgcttactcttcaccttagtgcaatttaactggaccttttgaattttttccagcctctaagaaagaaataacaatttcaggggaaaaatcataaataacttatctttttctatatatgcatgtctttagcatttgttacctcccacgtgggtataatgttaagaacatgtgactcagagggatgtgagttcaaacctggacttcacgaccttggacaaaatctgtgaggcctgctttatctctaatgtaaggataatacctgccttgacataggttttctataataataaacaatatagcacagttgaagcacccagtgaaccctagtctccctcttttctatacctacatggtttcaaatgatgagtctcatcccatgaactcaaaaaacattttttagaaatcatgaatgaagtgtttatcatctaacttttatactgagatacaattcacttaccgtgaaactcacccttttaaagtatacaattcagtggtttttagttatattcacaaggttgtgcaacgatcactactaattataaaacactgtcatcacctcccctgccgaaagaaaaccccatactcattagcagtcatttcccattcctatctccccacagcccctggctactactgatcaacttctatctctatggatttgcctagtctagatgttttatataaattgaatggaatcatacaacatgtggatttttgtatctggcttccttcacttagcttatgttctcagaattcattcatggtacagcatgtatcaagtacttcattcctttttctggctgaacagtattccattacatggatataccagattttgtttccccattcatcatgttatggacacctgggttgttcagaatacatttcgccagatttcatgttttgatgttaacacaggaggtgttataagatcaagtattatgtattcattcaaaaccattcacttaggttatgtgcaaaagcactgtgctgggcagtgtgaggaaaagagatagataaatacagacccagccttaaggaacatggagtagtggagcagagagaggcagagttcatgcaatgtaagaatttcaaaaaggcaaaagttcttgaagagggatgaaggggtaaggttagaaggaaaagaacagagtaagtttcagggaggaaggaacattttaacaggactgtgaaagatttaaacttggacattctggtgatagctagtaagcattcctgacaggagtagggacagtgagaggacaaacacaaaggtaggaaggtctaaattgtatacaagcagcaaaaaccattaaatattagcatggaaaataaagctgaaaagagaaaatctcaaatgccagcctaaggaattttgactttgtaataaggaagagccagttttaaagagccagactgctagaatagactaatagaatcctaagatgttcataaactacattagtaccattggaaacaaagttatccaattaggaaaagcattttattataacctccctgtccaagtacagggaagttcatagaagccaaaagataagactttacagtcagtctcccctttaccaattatagattaatatcatagttaacataatttctaaaagtggggaaagagttttacaagtacatatatttgattttattctgttactttttcacactttccagaaaaaaattaattttactactctcaaataacagtaaccaaacaagttgacctaaaataaggaacaaccaaaaatttgtggaactgagccacaaaccagatgtgtgaaatgcattaaatgcctaggtttgggcttcggttatctgagtcctgacctggatggggttgtgtttcaggtgttctactgactaaaaatgtgaaatatttgtattgcactgaatcttaagaggctttcatgaagccttgctcttcaagaaataagcacagaaaatagattaacaaagcaagtatgtcttacttcttccagggcctctagttcttcctctagctgctgagtttcttccttcactgccattaggtaatctgtaactgactgtcggggctgcatccccttttcaaagcggttatacattccactccaaaacctggaaaggatggcaaagcgtcrtgataccaccttatcacagtctgaaaattcacatcctcaagtcttctaaggtatctatgataccacagtcttaataataaccaaatgcaaatttcagcctcaaaaaagccactacttaaggtaataatttcatgttgatgttttttttcttgggtcagtaaatgccttttggggagaataagtttatgaaaagtctgcctgtatatatgaattagcacagaatacatttttctaaaattaaaatagtacatgtaaccattaccttttaagaaaatggctcttagttttgaactttgaaattgtatatttagaatctttcagctacaaagggaatcttaaacttgcagcttttatcttttgtatcacgaccactaaaagttgacatttgcattggcaataacccccccccccccccgcttttttttttaatggcagagtttcgctcttgtcacccaaaccgaagtgcagtggtgtgatatcggctccttgcaacctccacctcccgggttcaagcgattctcctgcctcagcctcccaagtacctgggattacaggcatgcaccaccatgcctaattttatattttttttagtagagacagggtttcaccatgttggtcaggttggtcatgaactcctgacctcaggtgatccacccacctcagcctcccaaagtgctgggattataggcgggagccaccacgcctgaccaataaatccctttttatcctacacaaaaaagcaactggagtgcaaatgagaaaaatggtgttatcacagagttacccttagaaccactattttatttatgtagataagtaagtactttgagggcaaggacttggtgtcattgttttatctgcagtgcccagaacagtgtttgatcctcaataaaatatgtgttgactagctgttaataataaattagttgcaatccaactggtcatatctcaacagctcttaaaacttgtcttacatgcactatggaggcttttgtttagtatgatagaatattctgctataaattctgagaagataattagattgaaataattaagaaaaaaaaccttgagaaacgaaatctatacagggagaaaagccatcaagtctgtgtcgggagtgagtaggaagaaagagatggggtttctgtttattctgcatgagtcttttgatgttgctgacctttgagttttttcatattatacaagcctaacaaggaagccaaaggaaaaaacatacgtatctagcacatacctagtagaacttgtaggatgccaccctgctctccccattctccccatacatacaatcttttttttttttttttgagatggagttttgctcttgttgcccaggctggagtgcaatggcacgatctcggctcaccgcaacctcctcctccctggttcaagtgattctcctgtctcagcctcccgagtagctaggattacaggcgctcaccaccatgcccagctaatttttgtattttcagtagagactgggtctccccatgttggccaggcttgtcttgaactcctgacctagggtgatccacccgcctcggctaatacatacaatcttaatgtaatttccacaagggaagtacttccagtaggacttaattcagtggagacaaaaaggcaacctattacgttggtgcaaaagtaattgcggtttttgcctttttgttgtataacggcaaaaaccacaattatttttgctccaaccttaacacgtcatgatcactgttgaaacttgtgattccacatttgacttaaggcatttgcattattctctttcatttgcttttaaaaaaataaattggaacttaacctttttatgatatcattattataaaacatcacctcctgaagaaaattccacatttaggaggaataaagaggcagaggagtcactggcaaaaataccagatcagatattcaagcatctccctctggtgtcttttgtgtccaataaaagcctcaaagatcagtgtcatacactttgacctctgaatgttaaacggtaccagaatccaagttcataccatggctacaaagttaccaaggatttacatacttgtacatgaagttacatggtgttgtagggagatgaagggttccctgagtctggctgtgatcagctctaaacagaggattcaggtagtcggcccgattcttccacaggtgagcccataatgagtatgttctttcttgaatcctgttataaagaaaataagtctataaatgacctattttggtgcttacacacagtagatatgttatattaatgctggaaaggaactaataattgttacctgaaaaccacgtgtctgttcgatagcaggtaaatgtatcatcttggtgacttcatggtatagagggagaacactgtaataatctcaacttcaccaccatctgtactggccttgacaaggtgttcgattcgtgtgtgtgtgtgtgtgtgtgtgtgtgtgtgtgtgtgtgtgtgttaagctgttcttttggggggagttttttcccccaaatagtcattggacatttataatttgtcacacactattctaaatgttccacgttttctctcatttaatcctcactgagttgctgtgagctctgtctaatttacagatgaagaaactgaggaatagagagaataagtggtttcccaaagtcctatagctagtaagtggaaaagccatattcagacccaagcagatactgttagaattggctagtcaggtacaagaaaacaggtgaccctaaaggatacactctgctccttctaaatcatctccatctccatggaatcacacttgagcttccttagagaaaacaaactagtatccactacaaaaattaattttctttatgagtccatttcatttgaactgatcattccccaaattaaatctgataatgttgtatacaccatagttaaaaccatttcattttatgaaaatttaaaaaatgttctctcatgtatactgcctaaatcactttgttgtaagttttttactgtcacttattttaaagtccacaatttatctacttttacccttggataaatcaatacagttttaatctgaataaattctggcttttatatttgctttcccaattaaatttgcaatttttattatggtagcatagccaccaaatatatctaaccttttccttttaaatgcaaaaaccacttttttgactccagaaaattccctttcgatattcatgcatcaagtctgtcaagctgtctatcaggcagaaactgaaggaaaaaatgaaactatttatctgtcagttgatgacatttaaaccatttatgaaatgacaccaggaaaaagaaaataaaactaatctgtcagtataggtatgtgactaaatgaaaaaagtcttcaaaattatgaaaggccacctaaaattctcagtcatcaaaatctttaaataaaagtt

SEQ ID NO: 95371 - DNA, 80032 bp, Homo sapiens
  misc_feature (1)...(80032): n = A,T,C or G
gtggtttgtatctttgtgggatcggtggtgatatcccctttatcattttttattgcatctatctgattcttctctctttccttctttattagtctttctagcagtctatcaattttgttgatgttttcaaaaaaccagctcctggattcattgattttttgaagggtgttttgtgtctctatctccttcagttctgctctgatcttagttatttcttgccttcggctagcttttgaatgtgtttttctcttgcttctctagttcttttaattgtgatgttagggtgtcaattttagatctttcctgttttctcttgtgggcatttattgatataaattttcctctatacactgctttaaatgtttcctagagattctggcatgtcgtgtctttgttctcattggtttgaaagaacatccttatttcttccttcatttcatgatatacccagtagtcattcaggagcaggttgttcagtttccatgtagttgagcagttttgagtgagtttcttaatcctgagttctggtttgattgcactgtggtctgagagacagtttgctacaatttctgttcttttacatttgttgaggagtgctttacttccaactatgtggtcaatattggaataagtgtgatgtggtgctgagaagaatgtatattctgttgatttggggtggagagttctgtagatgtctattaggtccacttggtgcagagcagagttcaattcctggatatccttgttaactttctgtctcgttgatctgcctaatgttgacagtggggtgttaaagtctgccattattattgtgtgggagtctaagtctctttgtaggtctctaaggacttgctttatgaatctgggtgctcctgtattgggtgatatatatttaggatactgagctcttcttgttgaattgatgccttcaccattatgtagtagccttcttttctcttttgatctttgttggtttaatgtctattttatccgagactaggattgcaacccctccttttttttgttttccatttggttggtagatcttcctccatccctttattttgagcctatgtgtgtctctgcatgtgggatgggtatcctgaatacagcacactgacgggtcttgactctttatccaatttgctaatctgtgtcttttaattggagaatttagcccatttacatttgatgttaatattgttatgtgtgaatttgttcttgtcattatgattttacctggttattttgatcgttagttgttgcagtttctttctagcattgatagtctttacaatttggtatgtttttgcagtggctggtatcagttgttcctttccatgtttagtgcttccttcaggagctcttataaggcagtcctggtggtgacaaaatctctcagcgtttgcttgtttgtaaaggattttctttctccttcacttatgaagcttagtttggctggatatgaaattctgggttgaaaattcttttctttaagaatgttgaatattggccctcatctcttctggcttgtagagtttctggcgagagatccactgttagtctgatgggcttccctttgcgggtaacccgacctttctctctggctgcccaaaacattttttccttcatttcaaccttggtgagtctgacaattatgtgtcttggagctgctcttctcgaggagtatctttgtagcattctctgtatttcccaaatttgaatgttggtatgccttgctaggttggggaagttctcctgcataatatcctgcagagcgttttccaacttggttcctttttcccccttcactttcatgtacaccaatcaaatgtagatttggtcttttcacatagtcccatgtttcttggaggctttgttcgtttctttttactctttttcctctaaacttctcttgtcacttcatttcattaacttgatcttcaatcactgataccctttcttccacttgatagaatcagctactgtagcttgagcatacgtcacgtagttcttgtgccatggttttcagctccatcaggtcattttaggtcttctctatgctgtttattctagttagccttttgtctaatcttttttcactgtttttagcttctttgtgatgggtttgaacatcttcctttagctcagacaagttttttattaccaatcatctgaagccttcttctctcaactcgtcaaagtcattccccgtccagctttgttccattgctggtgagtagctgcgttcctttggaggagaagaggcgctctgatttttagaattttcagcttttctgctctggttccccccatctttgtggttttatctaccttcggtctttgatgatggtgatgtacagatggggttttggtgtggatgtcctttccgtttgttagtattccttctaacagtcaggaccctcagctgcaggtctgttggagtttgctggaggtccactccagaccctgtttgcctgagtatcaccagcagaggctgctgaacagaaaatattgcagaatggccattgttgctgcctgatccttccctggaaacttcatctcagaggtgcacccggctggatgaggtgtcagtcggcccctactgggagttgcctcccagttaggctactcggggtcagggacccatttgaggaggcagtctgtccattctcagatctcaaactctgtgctggtagaaccactactctcttcaaagctgtcagaaggggacatttaagtctgcagaagtgtctgctgccttttgttcagctatgccctgcccccaggggtggagtctacagaggcaggcaggcctggttgaactgaggtgggctccatctagtttgagcttcctggccactttgtttacctattcaagcctcagcaatggaggatgcccctcccccagcctcgctgctgccttgcagttggatctcagactgctgtgttatcagtaagcgaggctccgtgcacgcctcttatttttaatgttcggtttgcttcatgagtccttgtgtcgaatactattctgggcaatgattattcattaatacaaataaacattagattataggaagagtaagcttcccatgataaccgaagttattatcagatcctaaaagcaataattaaaaaccctgttcccaggtagaattgtaaagtggatgactcctgcatccagcattctcccattcatttttagagccatccaactccctcagtcacttcactgccattccctttcccaagccccggctgccgtctagatagtcagagcttcttggcccattgcaagcactcatcatgatgtttagccaccaacccagcattgtttggcatctttctaaatttcttggttttcactcaaacctcccataatccaaatgatgactgctatagaattccatcagaagacttatgaagacaagtgatttgacagcaaagagtcagaattcttaggttacagtggcaaaatcctgtaggctccatgtctgtcatatattgctatttgttcagtcttactttgatctactcactaaacaattcatcctctatagaactgagggtgcaaaggtggttggtagtgggttaaagaggaaagtcaaatcagaaatgaagaagaggttgaagagaccacatgtagattaaaaataaacttttttggggcattgattttcatttagtcacaatatttttattttcaaataacattaaagaaaaacaaacagtctttatgttttttaaaggagaagcagagaaatattacactattcctagtcaaaagtaatgttagcaggaatgtctagactatttctatgtgtttatttctctttattttagttaaatgatagatttactcacttgcaactaactcttgctatatttctcccatttcaaaattcttaaactattgtagctaaaaattgtatctattttacttagctgcctttggtagcatttgaaagtgaatgcaaaatttctggacaaaatagaaacaggtacatgggctaatataggaatatacacaatactgttaactgtcccaagatttttcattgattaygtcttccatggtgagatttcaggcataaaattggtttgggttagtacaaagtctggcccaacatatgcttacttgtagttcttcctaataagtcaaacaagctcacatttatggtgctgaatatattctagattcattgtatctgtagttgctaaaaatttagttccatgccttaggatggtattagaatgtccatgataagaaaaataagtgcagcaaaataaaagaaatgccacgcctatctttctgtattattttttccactggagaaggacagattttactcattaaaactacaaaagtctgagaccaactgctccatattcttttgtgttcgttaaatgttgttatttggaggtgacttaattagactaaagctagaagagaaaacaatagaatgtcaaagatgcttttcaagttgtaaactaacgttttaagttataaactacttgatactattttcttaattaaaaagatatttctgaatcgaaaagatcaaagcttctgagtaaatttagaaagcatttttttgtcatttacagaaaagggctttaagagcctatgttcctttggctttaagagctcttcactgtgacttcaaagtaatcattttcagattaataaactggagctcgtctttggaattatcagtttttcttttattacagaatctgaggttagccagaatccatctgcagaacatgaggcagaagggagaaacacctgacaaggtgaggccttccttaactattttaacacaagcaattaaccatttatactcacttaaaagcagacagctgggatgatggtgtctgctaaaaaaaaaaagtgtaatgaaatgttctttagttttttgatctttagtaaaatttcatcttcgtataaaattttattaaycattccactaacttgttacttctccactccacctccccactccctttagaatccttagtttgaagacataattctttaaatgatctgtctcagggaggggggatcttgttacttttaaggactgcaaatagcattataaactttgtttttatttttaaatacgaatatcgactgaagctctcaaatcaatcaatattgttgccaaattttgtaaaacgcactgtcttagctctctaacgatagagttctaatataaatgtaaaaaccaacctatcaacatgttttcaaaaatactttttgtaaagaacagtacaattttgtggtgtccaaatattcctttctttcttacaaaatattattggatctgtccagttcataaatattcctgccctctcttcctccctccctgcctctctctccctgcagtttttttgatgtttgttcttttctttccattttctagttattaattggttcaatggatgacctttgtgcgacactgttataccttatcagcctcgccagggcccccgcgccgcccaatcccagcaactctggttctcctgtgaccccaagccttccagatccctgggtttccccccacgggactgtcacattcttccccgccggagacgccagtcgcggggcctcctccctggggtgtgagcaggtcggcgcgccacacttctctaggtggccggacgcgcgcccagggaggagctggcggcggggcccaggctgttccggctgcggcacgccaggggatgtggttagccctgagcctggaggccgaaggtgggcaggcaacactcccaccatgtttcggaggagaatacactaggctagcctaacgacactcggagtgcgagctgcggctggggtaggggcacccctttccagcgggcgcgtgggtcaccaaggagcagttctccgggacccgttgcgtccgagggactgggcggggctgggcggggcaggacgggggcggcgctcaggaaccctggaacccgctggccctgaggccacggaccgagacgtggtgctgagcccctgcgcggtttctggtgcgtagagactgtaaatcgctgcgcttctcagtcatcatcatcccagcttttcccggctcgaattcagcctccaactcaagctcgcgggaaagactacctgagaggagaaaagctkctgtccctggaccttcttctgagggtrgtgaggtttgtttagggtcgcagaagcagggaggactgactcagccctcacagagaagaggtctggaaagtcctggggaactcgcagggcacgggccgctgtcgcggttgggaggcgagggcgcagcgctggggttgtagattccaagacccctgagggtggctgtgttggtttctcgcaggagtcggaggctccctgctytccagccgcccagtgacccaagcttaatcttcagcaccacttggggcgaccttttcggtgcaaacctacgattctgtttctcaggattcctccccatcycgcttcgccccggaaaagctgacaagaacttcaggtgtaagccctgagtagtgaggmtctgcggtctccrtggagagctgtgcctggaagagaaggacgctggtgggggctgagatcagagctgtcttctggcccagtwrcccccatgcttctgtcatggctaacagttctaggggctggaatggtcgtcctgcacttcktgcagaaactcctgttcccttacttttgggatgacttctggttcgtgttgaaggtggtgctcattataattcggctgaagaagtaygaaaagagaggggagctggtgactgtgctggataaattcttgagtcatgccaaaagacaacctcggaaacctttcatcatctatgagggagacatctacacctatcaggatgtagacaaaaggagcagcagagtggcccatgtcttcctgaaccattcctctctgaaaaagggggacacggtggctctgctgatgagcaatgagccggacttcgttcacgtgtggttcggcctcgccaagctgggctgcgtggtggcctttctcaacaccaacattcgctccaactccctcctgaattgcatccgcgcctgtgggcccagagccctagtggtgggcgcaggtagagtatggggtgtggtctgcctatacagaatggcagcccacctgctttcatacccttttttttttctttaggataattcgtaactaatattttgggtgagtgaagtgtgcatgttaagagtacaaaatagttttatgattctatgctggtttaacaactgtctcctcccttcaggcacgtagtttcagaaaacttttatgaaatctctgcttcctaccattttgagacagggacagttttactgctattggttccttcagtgagtgcaagaacacacagagaacttggtcacttctaaattttatcagctctgacaaaatgrtgaataggaaagttatctgacttcattgtgacacgtctacctacctctaattgtactttatcarggatgactacatttgcagaagagatatgtttaawggaaggtacctgaattcctttcttcatgtctgctcttattttatactgtctgcaagctaggrcttgcctagcaaggttgcgctcccacctgtgagccagaacgtgggctcttggcmgactctaggagcctttctgtttcttcttcttatccttccatgcatccttttctttttttgactaagttctacccttcctcctccccctgccttggagttaggacatcttaggctacacrtattttcactgaactgtaaagaaaagcctggggtttagtggctaattagtaaagaarctaggaagatgggttgcttaatgaaatagaagtgaaatatgaaaaatgatacttatttggtgtaatctaaatggtttatgcagagtcttcttcaatggggaaggaaggtgcrgaaagaggaagatccattgcaaggaccataatgaaaatatttaagtattttagattaatagatacataccaataccttgtataaagtttttaaactcacagaacaatatggaaaaatatatttataccctggtgatctctaaggtatagaacttttcaaataacctttatgatataatatttgtatatcaaaccaaagtgagttaggcagtatatggaaaatgggctagcccttcaaggctatcactgttcctagttcttttcagttcaacttgtggtctgataaagtggcaaatgtatactttttcttatttattattattttttattattatactttaagttctagagtacatgtgcacaaagtgcaggtttgttatgtatgtatacatgtgccatgttagtgtgctgcacccattaactcatcatttacattaggtattcctcctaatgctatccctccccactccccccaccccacgacaggccctggtgtgtgatgttccccaccctgtgtccaagtattctcatttttcagttcccacctatgagtgagaacatgtggtgtttggttttctgtccttgtgatagtttgctcagaatgatggtttccagcttcatccatgtccctacaaaggacatgaactcatccttttttatggctgcatrgtattccatggtgcatatgtgcctcattttcttaatcaagtctatcattgatggacatttgggttggctccaagtctttgctattgagaaaagtgccgcaataaacatacatgtgtgtgtgtctttatagaggcatgatttagaatcctttgggtatatacccggtaatgggatggctgggtcaaatggtatttctagttctagatccttgaggaatcaccacaccgtcttccacaatggttgaactaatttacactcccaccaacagtgtcaaagtgttcctatttctccacatcctctcccgcacctattgtttcctgactttttaatgatcgccattctaactggtgtgagatggtatctcattgtggttttgatttgcatttctctgatggccagtgatgatgagcattttttcatgtgtctgttggctacataaatgtcttctttggagaagtgtctgttcatatcctttgcccactttttgatggggttgtttgatttttttcttgtaaatttctttaagttctttgtagattctagatattagccatttgtcagatgggtagattgtaaaaattttctcccattctrtaggttgmctgttcactctgatggyagtttcttttgctgtgcagaagctctttagtttaattagatcccatttgtcaattttggcttttgttgccattgcttttggtgttttagacatgaagtccttgcccatgcctatgtcctgaatggtattgcctagattttcttctakggttctaatggttttaggtctaacattkaagtctttaatccatcttgaattaaattttgtataargtgtaaggaaggtatccagtttcagctttctacatatggctagccagttttcccagcaccatttattaaatagggaatcgtttccccatttcttgtttwtgtcaggtttgtcaaagatcagatggctgtagatgtgtggtattatttctgagggctctgttctgytccgttggtctatatctctgttttggtactagtaccatgctgttttggttgctgtagccctgtagtatagtttgaagtcaggtatcgtgatgcctccagctttgctctttttgcttaggattgtcttggcaatgcaggctcttttttggttccgtatgaactttaaagtagttttttccaattctgtgaagaaagtcattggtagcttgatggggatggcattgaatctataagttaccttgggcagtatggccattttcatgwtattgattcttcctatccatgggcatggaatgttcttccatttgtttgtgtcctctttttatttcgttgagcagtggtttgtagttctccttgaaraggtccttcacatcccttgtaagttggattcctaggtattttattctctttgtagcaattgtgaatgggagatcactcatgatttggctctctgtttgtctgtttttggtgtaaaggaatgcttgtgatttttgcacattgattttstgtcctgagactgctgaagttgcttatcagcttaaggagattttgggctgagatgctggggttctctaaatatacaatcatgtcatctgcaaacagggacaatttgacttcctcttttcctaattgaataccttttatttctttctcctgcctgattgccctggccagaatttccgacactatgttgaataggagtggtgagagagggcatccctgtcttgtgccagttttcaaagggaatgcttccagtctttgcccattcagtatgatattggctatggatttgtcataaatagctcttattattttgagatacatcccatcaatacctagtttattgagagtttttagcatgaagggctgttgaattttgtcagaggccttttctgcatctattgagataatcatgtggtttttgtctttggttctgtttatatgctggattacgtttattgatttgcatgtgttgaaccagccttgcatcccagggatgaagcccacttgatcatggtggataagctttttgatgttctgctggatttggtttgccagtattttattgaggatttttgcatcagtgttcatcaaggatattggtctaaaattctctttttttgttgtgtctctgccrgactttggtatcaggatgatgttggcctcatgaattagggaggattccctctttttctattgattggaatagtttcagaaggaatggtaccaattcctgtttgtacctctggtagaattcgttgtgaacccatcttgtcctgcactttttttggttggtaggctattaattattgcctcaatttcagagcctgttattggtctattcagagattcaacttcttcctggtttagtmttgtgacrgtgtatgtgtccaggaatttatccattttttctagattttctagtttatttgcgtagaggtgtttatagtattctctgatggtagtttgcatttccgtgggatcagtggttgtatcccctttatcattttttattgtgtctatttgattcttctctcttttcttctttattagtcttgctagcagtctaccaattttgttgatcgtttcagaaaaccagctcctggattctttgattttttgaagggttttttatgtctctatctccttcagttctgctctgatcttagttatttcttgccttctgctagcttttgaatgtttttctcttgcttctctagttcttttaattgtgatgttagggtgtcaattttagatctttcctgctttctcttgtgggcatttagtgctataaatttccctctacacactgctttaaatgttttccagagattctgatatgttgtgtcttttttctcattggtttcaaagaacagctttatttctgccttcatttcgttatttaccctgtagtcattcaggagcaggttgttcagtttccatgtagttgtgcggttttgagtgagtttcttaaccctgacttctaatttggttgcactatgggctgagagacagtttgctacaatttcttttcttttacatttgctgaggagtgctttacttccaactatgtggtcaattttggaataagtgtgatgtggtgctgagaagaatgtatattctgttgatttggggtggagagttctgtagatgtctattaggtctgcttggtgcagagctgagttcaattcctttatatccttgttaacttttggtctcattgatctgtctaatattgacagtggggtgttaaagtctcctattattattgtttgggggtctaagtctctttgtagttctctaaggacttgctttatgaatctgggtgttcctgtattgggtgcatatatattcaggatagttagctcttcttgttgaattgatccctttaccattatgtaagggccttctttgtctcttgatctttgttggtttaaagtcttttttatcagagactaggattgcaacccctgcttttttttttttgttttccatttggttggtcgatcttcctgcatccctttattttgagcctatagtgtgtctctgcacgtgagatgggtctcctgaatacagcacactgatgggtcttgactctttatccaatttgccagtctgtgtcttttctttgggacatttagtccatttacatttaatgctaatattgttatgtgtgagtctgatcctatcattatgattttagctggttattttgctctttagttgatgcagtttcttcctagcgtcgatggtctttacaatttggcatgttttagcagtggctggtactggttgttcctttccacgtttagtgcttcctttaggagcgcttgtaaggcaggcctggtggtgacaaaatctctcagcatttgcttgtctgtaaaggatattatttctccttcacttatgaagcttagtttggctggatatgaaattctgggttgaaaattgttttctttaagaatgttgaatattggcccccactctcttctggcttgtagagtttctgccaagagatcagctgttagtctgatgggcttccctttgtgggtaacccgacctttctctctggctgcccttaacatttttccttcatttcaactttggtgaatctgacaattatgtgtcttggggttgctcttcttgtggagtatctttgtggcgttgtctgtatttcctgaatttgaatgttggtctgccttgctaggtagggtaagttctcctggataatatcctgaaaagtgttttccaacttggttccattctccccatcactttcatgtacaccaatcaaacgtagatttggtcttttcacatagtcccatatttcttcgaggctttgttttttctttttactcttttttctctaagcttctcttctcgtttcatttcatttcattcatttgatcttcaatcactgataccctttcttccacttaatcaaattggctactgaagcttatgcatgcatcatgcagttctcgtgccatggttttcagctccatcatgtcatttaaagtcttctctatgctgtttattctaattagccattcatctaatcttttttcaaggtttttagcttctttgtgatggtttcgaacatccccctttagctcggagaagtttgttattaccggtcttctgaagcctgcttctgtcacctcatcaaattcattctccatccagttttgttccattgctggcaagtagctgtgatcctttgaaggagaagaggcactctgatttttagaattttcagcttttctgctctggtttcctatctttgtggttttatttacccttggtctttgatgatggtgacctacagatggcgttttcatgtggatgtcctttttgttggtgttgatgctattcctttctgtttattagttttccttctaacagtcaggaccctcagctgcaggtctgttgtagtttgctggaggtccactccagaccccgtttgcctgggtatcaccagcrgaggctgcagaacagcaaatgttgctgcctgatccttcctctggaagcttsgtctcagaggggcacctgcttgtatgyrgtgtcagttggcccctactgggagatgtctcccagttaggctactcgtgggtcagggacccacttgaggaggcagtctgtcggttctcagatttcaaactccctgctgggagaaccactgctctcttcagagctgtcagatggggacgtttaagtctgcagaagtgtctgctgccttttattcagctatgccctgcccccagaggtagagtctacagaggcacacagcccggtttgagctgtggtgggctccacccagttcgatcttccgcactgctttgtttacctagtgaagcctcagcagtggtggactcccctcccctagccttgctgccacctcgcagttcaatctcggactgctgtgctagcagtgagcaaggcttcgtgggtgtgggacccrccragccaggcacgggatatagtttcctggtgtgctgtttgctaagaccattggaaaagtgcagtattagagtgagagtatcccgagtttccaggtaccgtctgtcacagcttcccttggctgggaaagggaattccctgaccccttgtgyttcccaggtgaggcgatgccctgtcctrctttgctcacactctgtgggttgcacccactgtccagcaagtccaaatgagatgaatccggtacctcagttggaaatgcagaaatcacctgtcttctgcgtcgctcayrctaggagctatagactggtgctgttcctattcagctatcttggaacaataaaaacacaaaggtttacttctgagcactcattttaatcttgttttcattacgggaggaaagggtctaggagcaaatgtaaactccaagttttgctaataattgataaggccgtaagttctgtttacaagggccaaccaagagggccacagtgtccctgaaaaaatggaracattccaaagccggtttcctgagagattcrtcttaaagtacataggactggctacttctcaagatagagcattcagrcttttctgttgacygaattgttgtttaactaggaccaattaattttgcagttttactygtgccagcttttactttgcttgccaataactaattgcattgttttcttatttttgtttttaacaccaacagtcagttttttgtatttaaaaaagccactttgggatactgaagttttaagccaagactatttagttgattggctcggtaagtaggtcactggagaagtcacccattctttctggcataccttcaaatataaatgagatatatgttttccaaagatggaaaaattctattttgattaacagattttgtartaagatgtagcttagatcatagtcacttttatacttaaaatactgtgttgttggcatctggagtctcatttgtgaacaatataaacatactstttttagcacattaaatttcagatttcttggattctcattggatgtttctgatggtgtactattaaatcattatacccccagggagagtatattgaggtagaaagatgaatcatgtggttcagacggaggtaagccagacagacccaaattccatgtatggtctgccacttcctggctgtatggttaaagataatatcatcagttaccctggatctcactgaacttagttgtaaaatggtgatgataccatctgattcacagtataattctgaggattaaatgacacatcttttgtraagtggctagctgagtgcctggtatgtactaagtagatcttattgtatttaaatgattgctattatgattatagagtaatcctggggcttttaataagggatctcatttggattttgcagctacaaccttatttgatgttagctagtatatacagtcatgaatcacttaatgacaaggatacttttcttagaaatgtgttagacgggccaggcgtggtggctcacgcctgtaatcccagcactttgggaggctgaggcaggcagatcacctgaggtcaggagtttgagaccagcctggccaacatggcaaaaccccgtctctactaaaaatacaaaaattagccgagtgtggtggcagacactggtaatcccagctacttgggaagctgaggcaggagaatcatttgaacacaggaggcagagattacagtgagctgagatcgtgcaactacactccggtctggggaatagagtgagactccaaaaaacaaaagcaaacaaacaaacaaaagaaatgtgttaggtgattttgttgttgtgtgaacatcatagagtgtacctacacgaacctagatgacatagtttactacacacctaggcgctgtggtatgggttattgctcctaggctacaaacttgtacaggatattactgtactgaatatcgtaggcaattggaacacaatggtggtaagtatttttaagtgaaaacagaaatggtacagtaaaaacatagtggtatgatcttatgggactactgttgtatatgcagtccctcattgaccraaatatcattatcattactatgtgttagcagtaagttaatgacagagttaggatttgagcccatgtttacctgatatcatgatgtgtatttctcacattcagacttgccmcttctgtaaggaggcatatcctttctttacattatttttgctcctgacagtattcaagcatcattccctttcagtaaatacatgttcaacagatattataaataaaaaccccagagtcagtgcctccatggccagtaaagaagaaaccacgcattatcagtgcttagaacactgccttttctagctactgaaccatgaagccatttaaacttcctattaaaatcaattattttcttttgtaacagaagtaattgttgatctagctgagtctaggaatgaaaaagaaaaaaaaaacaaaaagccaaacagyctattctactaaatacaagtagaaatttagaaatgtcctgaaaagtaaaacagataycatgtatggatatcatagtatgtaggtaagataataaaagttcacatgagctatgtattttatctatcggcatacataacactttctataaaacttaaagggggccagcgcggtggctcatgcctgtaatcccagaactttcagaggccaaggcaggtggatcacctgaggtcaggagttcgagaccagtctgaccaacatggtgaaagcccatctctactaaaaatacaaaatcaaaatcagccaggtttggtggtgcgtgcctataatcccagctactcaggaggctgaggcaggagaatcgcttgaacctgggaggcggagtttgcagtgagctgagatcgtgccattgcactccagcctaggcaacaagaatgaaactccgtctcaaacaaaacaaaacaaaacaaaacaaaaaatccaaaagggcatttatttttcctctgactctttttcttagtctttaaaaaacaattgcctttatggttgaaagtcatttggagaattacaatggcttgattgttaacaagaacatttgttaacaataactacaaactatgcaccatttcagtgtaacagtttactaacagtgcaaggctgcatgcattattttgtgtttatagagaagacacaggatttttacttcttacgaagagaaatctgaaatgcttcaaaatatgttgaacarcaaaatactatcaaatctaaattgaaagagttcmgggtaattgaatagttttttaaaggtctctatttataagtataatgatttaatatgtggygtattaagaaaggatggagaataaaatatataccatatgcaagtaaatctgaagccttgtgggtgcctactatgtctaaagtgctttgtaccttttgggagtgatgattagtaacattgacatcaacacaaccaggaaatcccaaccatatcaccaccctcaaaaccagttaccaaatgaacagtggagagtggacaactttttgcaaaaatatgcgaagtaaattaaaagttagcaartgttcatgtgtatcatagtttttattatgccattcattcactcattcatccagataataaatacttgttgaatatctcctttgtgctaagtcctgaaaatttagcagtgaacaaaacaaatttcctcagttcaagagtttacaacctagttcttgaactattccttgaggctgcatcaacatctrtttgtgaattggcaaagagagctttatgattggagggagtcactgtaaagacacayagagcacctgaggcaggtgaggtcagtggaaaaggtactcaaagtagatggatagagaaaaggtgagagagaaaaggaaaggggtgggggaacaagggagaaaaggagagggaaagggagaagatggagatgagggaatgagcaggaggagaaaggaggaaaaagacaaaggtaagcccttcaggcttttatgatttagcatcagaaaatctgaactctagttcccatgccaccttgcctagatgtatgagcttgagtagagtatttgcccactataaccaggcttccctcgtccttaaaataaggttaatatttacctatcatggctgtaagtgttgatcaccaaaaataatgtataaaaacattttgtaatctatgaagtactttaaaatggcaagtattcttatttatcatcagcagcattataattatgactaaacatgccaaaggatatagagataatagcatacaaattttaaatgatataaaagcaccccaacattgttctgtttgttttaagtaaagagaagagcatagatcagtagatggtaatcttggcagcagataatattagcaatatcagagatgaaaaattgggggaaaggttgaggtttaatctcaaacactttaattttcaataagtttcccagagaaatttgggatgccatttgatatatgttctaatccaaaaatacacagatataagacttctgcaagtatttttgagtcttcagactgtgtgggaaggaaataatagtattataaaaattttaacatttttcttatctgtgtataaaaaacttggtgtcttaatattggtaacttttattttcatattttgtatagcctgaatgtgtattttttcagttacatcaaagtggaattgacagtctcagaaacattggactatatagtatagagaccatgttttgagtctgctctgcaacctactaagctgtgttaccttaaaaaagttacttaatwgtttaccatttcagtttctaaaatatarcactttacctgtctcccaaaaccgctgagagtgccttttagttagccttgagtacatggcaaccattatttttgttagtgacaataacaagagtaacatttgcctggtggtttagctgaaatcttttcctttggcttattcctaaagacagttatcagataccagccatgatagaaacttcacctatcacagtgcacattatctggcgtggcctatgaaacctgtttggaattgcttctgtataacttatgaaaaatagagtttttctaaaatgtaccaaaacaatgtgtttaaggttctatttcaaagaaaccacactattatttgaagctacatggaaatgcctgaatacatagttctaggaggtataacttaaaaatagaaggcaaaatcattataaagccaataatagaatgcatacatgatgatggtcccataagattgtaatactctattgtaccttttctaagtttaaatatatttaaatacacaarcacatattactgtgttagaattgcctgcartgttttcagtacagtaacatggtgtacaggtttgtagcctaggagcgataggctatatatcatacagcctaggtgtgtagtgggctatatcacttaggtttgatcaatgattatcattcagtcttgtgtgaattaaatgtaaagaactcaacagaataccaggatcataaagtatattcaacaaatggatgcaatcattatttttaactgcataatggcagagacagccacccatagtaagaagtcacttttgctcaggtctcttcatttgagatttgttgtatggagggaaacccacgtagtgtgttacacaaccttagtgagttggctttaaacagctttcttgtcctctccagtagcagtacatccataactacttcccaaccctcagtggccaaggttggaatgctctcagacacaagtttggagtgaggtcgttagctcttctctggccaaaaagaagaaggttcttctactgttaataacaaagaggtcatgagggagataaccctgatggggtctgagtcttgcagaaatactaccttagtattcactgcsttttaaaaatatatatatcatttacttactaatgagtctgtctgtagatygctttggtctgcatttactcttctaatttcaccactttcttactgaaaaatagcaagccagatgcaacatgccttcttgtgccatttcagtaataattattcattggcaacaggagatgtgttagaaataacatcaaatgaagtgttcractttttcttttttgtataattttggttataataatataatgtataaattgtgttattatrttataataatattcaatctgctcacctcaaaaatgtgggaacaactgagagtgaaaacacataaacccacttagaaacttgtgtgcatatattcagggcagttaaatcatgtcaggaaaaaatatgttattgcaatagaaagacttgtgcttctgttattcatgagttttgtatttcactcctcgagaactttgctatgttaagtgaggaatgaagcttcaactcaccctgcctggttatgcccttttgggtgggaagaggaagggcatggtctgacttggaaacaaaacaggccagaatcactagaagcacttctcccatgtaaggacctggattcccaatctgttgctctcccttccagggtctatcatctcctcttttcagtcttcaactttctatttaatgagcttgagctcattgtatgtcctcatcatcatcatcatcatcacaaccaacagtagtagtaataacaaccaccaccacagcagacaccatttaaggaggactgattctgggtcaggcaccacaatgaatggtttatatagaccatttaattatctcaacaactgtataagttgtatggagtcacttttcaaaagaggagagggagactcagagaaatgaagtgacttgtccaaggtcacacaactagcaagtgtcagaagcagtgtttgaatccagattctctggctgaaaatcctatactctagggaatcaatccagaattccagtgttttgctgaaaccatatttttttgtttttaagccagtggggtccacagtgtatgttggaacccattcttgggcaataattttgcctayttaatcatcaattttcttagaaaccagagctacccgtgcattatgtgaaaagcctgttgaactgctctacatagtargatggtaactataaggatgtggcaagatctctaatttcactttgaattctaatgttgctttgcagtatgggaagctaaagttaaccatttgtagctgaataccatattaggtttattagtgcataaaatttaaaagttgaaatgcttaccaatgtattaacaaccataatcaatcaattcccatgccatatctttgaaagtattagcttgttttatgtagaataatgtagtttttagtgcagcataaataatataactcatactaatggcatattagagggatacataaaatttttacccatatattttgcagtctcaaaaatgtgaataagatctaatgttgatgaagaaacaagaaatcaatttgtaaaataaatgctaaaggattttaggcagggattataattaacatttttgtacttgcaaccccacctaatgaagtacattgcatgtgggaggaaaaaaatatgtaatttttgaatgaacatgcttctttgaaaacagaaattaagcctacaatgtagactttgttaaaggtcatagaaaatccagctgtctggctgggcgtggtggctcatgtctataatcccagcactttgggaggccaaggtgggtggatcacctgaggtcaggagctcgagaccagcctggccaacatggtaaaaaccccgtctctactaaaaatacaaaaattagttaggtgtggtggygggcatctgtaatcccagctacttgggaggctgaggtaggagaatcacttgaacctgggtggcggaggttgtagtgagccgagtttgggccactgcactctagcttggaggacagagtgagactccatctcaaaaaaaaaaaagaaaaaaaaatccagttgtctcattttcctgcagtagtttacgatcaaaatggtacaaatttcagtttctgtaaccagttatctatctagcacctaatggcatgcggccaggtagagtgagcagaaggatggaggagaacacacatcattcttttgagatgcttataattctacaggtatcaatggtaatgcagtgaagcataaatcctcatgagataaagtcatttccttaaagtatttaaacaaatgctattttgtgtcaagacaatattcagaatttactgttaaaggacatgaaaagagtttttttctttcttttcttttcttttcttttctttttttttttgttaagatggagtctcactctgtcccctaagctggagtgcagtggcgtgatcttggctcactgcaacctccgcctcccaggcycaagcgattcacctgcctcagtctcctgagtagctgggattacaggtgcctgccaccacacccagctaatttttgtatttttagtagagacagggtttcaccatgttggccaggctcttctttaamtcctgacctcaggtgatccacttgcttcagcctcctaaggtgctgggattacaggcatgagccaccrcgcctggccaagattcattttattaagaaagactggcagtgataatgattctttatcccctgcatgactcttctttatcccctacatgactcttttattttaactttctctatcctcacccacatttcctaccactattgaagaaataattttgttacactaaattctatttgagaattctaagcatctcacctaaataaaattaattttaacttatgaaagaagtgacattgtatctcctctgattcctaggaaccttctcactttcttttttcttgctgtaaaaattatcactcttggtaaatactcagtttctttgggctctagaattccaacaaagatttggagccacacttattcatattttaactttcttggcacttatttccccaatttagacatacatatcattaagaacatataaaagtttgtgctgggaatttcttattctagatgagagattttgaaattaaagtaatgagtcagttcagagatttgcacttacaagttcaaaacctgagaaagagtcattacarcaaaatctggaacaaacattaaaaagaaagtctagatcctttgcttatccagtttttcatgtttctaacttgtcactcctcctatcatccttggtgatttttcacattttgccaaagcaatctatatacagcarcatgatgtgtgtgygttaagtagagctaggcattttccctggattcttatattttacttagayttgttatagaaataaaaattaataagacatcttaaggctatgaaccccactttccaccrcatatcaacttcattataatttctgtrttgccttctattttcatacaggttttatttataaactgcttagtcccacttgacatatttatcttgctgctgctttgtgatcaatctgggttatagatttcatgaaagtaaatcaagagttttcccccaatgtatttcattgtagtagaactaacccaatgactgatagttggccttttgagggaaccagatactgatttatgtttccagggaaatgtttaatgcagaactctgaattcaaactcaaagcagaatatatcttgtgattattttaaaatttttcctgaaaaaattagaaaaaatataattgctttaggtgtaaaggtccacattttcatgtacagaacttgagcattctgatccgggtttttttttttttttttttttgagacagagttttgctcttcttgcccaggctggagtacaatggcgtgatctcggctcactgccacctccgcctcctgggttcaagcgattctcctgcctcagcctcctgagtagatgggattacaggcacccatcaccatacctggctattttttttgtattcttagtagagayggggtttcaccatgttggccaggctggtctcgaactcctgacctcaggtgatccacctgcttcggcctcccaaagtgctggaattacaggcatgagccaccgggcctggccratctgtrtctattttacatttagcaccattattttttctttkttgccatttatttcttttatgaggtaattttatagttttagagttagtctatggttagattactaattctaccatccaccaacttgtgagcttgatgtatgagtttcctaaggctgctataatgaagtaccacaaacttggtggcttaaaacaagcgaaatttattttctcacagttctgggggctagacatccaaaataaagctgtcagcagagccatgctccctcagaaggatccaagaattttttcttgtctcttagcttctggtagttgccagtaatgttggacttcccttgcattaactccaaaaggccagtgggktactattgtttaatatccccaaggacgttaatatagattttaagataacctatatagcactcagaaatcccttgaaccttctaaatgtatagcatattatagaaataaggaagtaaaatcagagttgccatgtagaatataaaagttgaacttcatgtcagagatccatgctaaagtaagggagtggtgaatttaaaaagaatttaaataatataaataattgtatgcctgtctactctggagaaaaaaatgatgcttcacttgcttacacaaaagactgtataggaatgatgacattgtttcttttgtatcccacagagtgttggttacctcagtgcttaattatttcctcatcaaggacccagtcccaccttctgtctctcttgttttcaccactactcctctcttgaacagatgatatttttttcctgggttactgggcaaatcaggaaggtctggttaagtttcacagattaactcaacatagtctcacctcaccagttgctcctttgttatccttgtagcagatccttcctaagaaacttgtccctttttctttctgaaccttaaattgccaatcacccaaactgtgaattgtaaacattgtacccaataggtaatttctcagtcttcacctctctctcccaccctcccccattttggagtccccactcacttaacttctggctttggaatgatttctaaaccacaatgatcttgtgatttcagagcagtcggggattctcccaaatgttttgcattacagtggaactgaagagtaacctgcagacagcttttggaataactagctactgagttgtacttcaaggaaaatgtttagtgcagtatcctgaatttagattcagacagagttttaaatagttttatttaaaaattggtggagggaaacccataatttgaataatggagtctcttaaattcagtctgaattggactgcttgcattggtctgtcaggtgataactaaatttccctttcagttggtcctgttgaaacggaaccataaaatgactgtgatattacttatccaacataagaaggaaatcagcattttatttacattttatccctgtttcaatacacaaaagcaactccaaagtgaattgtttgagatttaaggtttgcttaactcttcccaaccctttggcttttagatttgcttggaacggtagaagaaatccttccaagcctctcagaaaatatcagtgtttgggggatgaaagattctgttccacaaggtgtaatttcactcaaagaaaaactgagcacctcacctgatgagcccgtgccacgcagccaccatgttgtctcactcctcaagtctacttgtctttacatttttacctctggaacaacaggtatgatccaattcttttgaaggctaaaatgaatgcgasaaatttgcaaagcaacagtgttgggcaaatttctaccatgtgtagtgaccaaccatctgagaatgcatgcttgcaagaagatgtaaggatctcagaggctagaactttccaacttggatggaaagttaattatcttaacttttacttgaaaagtcattgtgttcatttggcatttgtctcatttgacaagattttcttaaagtttggtagtacaaagggcatgggagtatccaaacaccttgatccagtctcattgctcagtgtatgatacttgatacttgattttttgggcaagatctttgttagcttctctgatcctcaaatttctgatatctaaaatgaagaaattagtttaaatagtttctactgattcttttggatttaaaaagtgttttaatgtacttgaaaacagttctctatattcctgtgtaaattattaaatcctaaacataatccaggtataccggcaatttaagcacctgttgctggctctcctgattttggtcagggtaattgaatcatgtgacaaacaggaactcttgaaggcactgcaggtttggactaagatacaaaataaaatcaagtaaataagctttattttaagtaaacaacagcaataacaataataaaactgcctgagaattcaaaagaagggcctggcacagtgactactcacacctgtaatcacacactttggaggccaaggcaggaggattacttgaggccaagtgtttgagaccagcctaggcaacacagtgagacctcatatgtacaaaaaaattaaaaaaaatagccagatgtggtggcatrcacctgtagtaccagctactcaggaggctgaggcagttgaatcattctatcccagaagttcggggttatagtgagctgattgcacctctgcactccagcctgggcaacagagtgagactcagtcttaagaaagaaaagaaagagaattcaaaagaaatgttaaacttaattgatttctaggaaaaactgaatggtattaatggtagcctaaataggctttcattattagtttgaaaatgattgttgatttgacttagacatattaagagtattgttactcatttcttgtgcataggttgtgagcaactattgcatagtaaaatttttcttacattttaaaaatctattcagttcctaattgtaatcccttttagactggagaatataatttttttttacatgattagaacagttttgataaatgaactgaaaagtgctaatatgtgtgtggctactctgtccagactgagggagcttctttctcagattgttcaggctacctaatcaggtctattgaataataacaggtctagaagttggcagattgaacagatacacagtcccttaggacaaaaggaatggaactagagatgacagctacaaaattttagaaaaggaggtgatgactgagtgtggtggcagacaccgcagacccaagaagctgaagcttatggtgaagccttgaagaaaattcatttgcccccaccaaaccccagaaaggctcagaaattgggtaccaggtacctcaaagagtagaaaataaatgtgaaactataagcaggaaactttatgggaagtttgtttaagaaggaactatagtcctggattgcttcttccaccctgatagaagtcctgagacgtaattctggaaaagatgaacttctgaaaataccaggaagaacagaggtttaaaaagtaggggatataaaagaaagtctccctccctataaatatrtatatatgtatatagatagatatacatatatgtatatgttctctttaatatatataacttcttttaatacttgactgttttaatctttgagattcttgtctgaggaatctgaatagcccacatgtaaaaattgaaagacactgatcatgatggattcccccaacagaatgtcctggacagtgaaaccaactagtaaataagtattcttcagacacagagattctagttaatattttgtttgtttattttgtgtttttgtgtctgcacttttaaatataaactgatagtcagtagtctccagatatttgaaaaaaatcctcctgaatatattctagattagattgagaccaatacaaacgaaagataaaaaggatgttggagaaaactgacaagatagagaggagaaattttcaaaaaattattattgttaatattctgaaagatggggacaaaaaagtgtcaataatataaaaataacatactacaaaaagaggaatattcagagaacataaktgttggaaaatctctcaaaaagtaaagcaaaaggtaagagaaggaaaacaggataggcaacattaggaaaccagtgattctgtccaggagggctgatcttcagaaaatcaagagttctaaaaatgaaaggatgaacacacaaataaatgtaacagaaaaaagcaatgggcaaaaagaacagaaataaggaaggaaagagaagaatggggtgtgaaaattattttgttttcaaattcaaaaatatctagaactataagacctgagttgttagactgaaaaagcctaaaaatttcccagygaaatggatagatgagactggtcccagtaaaagtcatcatgatattacagactactgaaaacaaatagaagattccaaaaatgaaaaaaaatagaaataccatgttgcatccaaaggataagaaatcagaaagactgataattgctcaatatatatactggaagtcagaagattatagagcaatgccttcaaagtcctgcgtaaaaatgactacttacctagaattctttacaagcagccattcaagtgtataggtggmaaaaaaagacatttycagncacataaggactgacaaaaacttacctcccaaatgctctttatcagatagctactgaaaccaaatgtgtgctaccactgtaattaatttctagaatcttagatctatccagaaaggccaacgataaaattacatagcgtttgagatacaggcctacttagcagcctgtcaaaggagcgttgctaaagtcagaatggcctcttttacaaagcagatagactactttgatatattttctgtcaattgctagtgtagttgttatcagtatcatcttctttctgttacttcctttctagttatatgaatatgtatgcatatgtatatgtatgtatgtgtgtatatatatttcctgttcttttcttttcttccaggtctaccaaaagcagctgtgattagtcagctgcaggttttaaggggttctgctgtcctgtgggcttttggttgtactgctcatgacattgtttatataacccttcctctgtatcatagttcagcagctatcctgggaatttctggatgtgttgagttgggtaaggctttattttctttttgataagttttcaaaatgtctaataattagaacaagtatttattaacatttgaagctgtatcggtagaatttagagtgattatatgcatattattttattataacacaatatttattttaaaaaaactacacaattttatggcatattcagtgttttcctgaggtgaaaagaacagttttctgaggatttggccatgtggtcggagctggstattggctgggcttctctctccttgtagtcactcaccctcaaacaaactaccccagattcctcaaatgtagtagaaatgttccaagggagtgagtatggamgctgcataaatcttaaggcctagtcttgaaagacacataggttattttaccttcattccattgatcaaagtaagtcatgggccagcctagattcaagattccagggctggagaaacagaagccacctcttgaagggagaaggagcaaatttacactgcaaaagtaagagccctgaagaaattgctgaggccatctttgcgaacagtctgccatagacactcaataaattagttggtagagcktgtgactcagtagattccattcataaacatgcaagattatgtgtcagtttctagacctcacataatatacaaacagtggagatcatttgctacttgtatttgtctaaaatgctgtaatttttagaatagaatatttagaatatgatcaatatccaccayaaatgaagatgagatattaaaagmcattaaaatcttcagtggacatacattgttgtcaaaattaggttctgcagtcatttaagaacttttttgttagtactatcttgctaattcaaccttactaacagttgacctcaagatatgttgaggtggccgggcgcagtggctcatgcctgtaatcccagcactttgggaggctgaggcaggtggatcacgaggtcaggagattgagaccatcctggctaacacggtgaaaccctgtctctactaaaaatacaaaaaattagccaggtgtggtggcaggcacctgtagtcccagctactcgggaggctgaggcaggagaatagtatgaacctgggaggcagagcttgcagtgagccgagttcgtgccactgcactccagcctggatgacagggtgagactccgtctcaaaaaaaaaaaaaaaaagatatgttgaggctgctttaaggtttaaaaatgaataatatgtatatattccagttcacaagtaagtgaatattcttggcttctatgaagaaggatgactcttatcaatagccatgctctaatactttaactcttttacttattttgactgttgcttttctcctgtgtattgcaaaaagcatattttcagtcaaaatttagaattacaatattttaacagagtttttggacggtaaaaattagtgtttccaaatgagtttgatataaattattgatgatgagttattaaagttttaaaatgagcaaacatgttctagacagagaaacatcattcatgttttatgttcattctgcctttgaatttttttccctagtgcctgtttttgtcttttcttataggtgccacttgtgtgttaaagaagaaattttcagcragccagttttggagtgactgcargaagtatgatgtgactgtgtttcagtatattggagaactttgtcgctacctttgcaaacaatctaaggtaggcgtaatcattatcagaaaaaaatatgtcagaaagaataagtattgagatagaaaaggttatttttatttctttgtttatactctacctttgttactggcgggtctttgttcttagagcttccaagatagtggcaggtgctacctagatggtggcgggcagctcccaagatggtggmaagccttgtgttctctgatctggggttcttggcctcacggattccaaggaatggaaccttgggccatgcggtgagtgttatagctctattagaagccatgggtcatggaagagaaccgtggaacccagcgactagtgttcagctggattaggacgaacctgggcacttagccattcaggaacaatggcgagcctctagcccgattgggagcggcaatgggcaccttgctggatcagaagcagagcagacaccctgctggatctggaggggtggaagtcagcagcgggtctgcgatggcggagatcagcagtggtggacggtgagcaaaagctcagcttgagccagaataaacacagaccagaagagtatgcagttgcaagatttaatagagtgaaaacagaactctcatacaacgggaggcgacccaaagcaggttgccactgccggctcaaatgcctgggtttatatctggatctttgtccctccccctgtgctctcaggtgatagatgattgactatttctttacctcctgcttttagcctarttggtattttagtgagctctctttatgacctgattggccgggtgtgagctgagttacaagccccatrtttaaaggtaggtgcagtcaccttccccagctaggcttaggaattcttagtcggcctaggaaatccagctagtcctgtctctcaccttctttcagaacataatttagctgacttacaaagatgcgtgcaataccccaagataaaataagacaagtgaaagaaaataaacagagagctatccaagaatgtactaatgtgytttgtactgtagcaggataggactgacccaaagactgtgtttagactaaaattaaaatttctataaacataacacgcatcagattatgaaattagattcatgctatgtttacagaaagcaattattctaaggttaaaataatcttttaaaatgctgttctttaaaaaaataactactgaccactgacactgattataatttattttctattttttcttttgaataagtgattatattaggatatctttttgttttactttaaattaaaaaaaaaamcccacattgctttgatttgcacttgtctccttaactgaagaagtcatttccacattcgtttgatcaactgccaccatctgaaaaacagataagcagagacagttgcaatagcctgaagtttatctttattggttcatttgtttttttgccctcagaagttattttctttttcctgstttcgtttatctctccaaatgcttcttctttaactttatgattttctaaacattcttgagactataaagaagttactttctttaatcaaatttatttaattctttatattattttattattataaattatttatcttttattatctgattattttaaacatcagatccacatcagccccttcaagaatgacaatagagtaggatattgccctacgtggggtggggcaacagaaccttggcctttgagacccacctttccttgactagaggatctctcacttatcacctctgccatcatcacatctgcttaaggcatgaatggtgtgctgggatatcttctcttctctttggctaaaatctggccatgtaatttttcaattaattacccagagcacagctgacactaggctggaggcatttaaataagactttttcattttgagcttggagttcaccaaggagaaacctccagtcgagyttctgacccacctcccygtggcagaagccatccttactcattttttgyctggartgcttcaaataactatagattccacagattcatagccaagacaaagagttccagataaatgttttacattttttaaatatttttctcttcaaggagaccttgcctcaggtaagggaggtagtcttaatctaaagaaccccaataatacacttagaatgccacaacctcacatattttmtcttctagttttcattgtactttttggtaatgtgatatctggactaggttaatttagggaattaatgccctccagtaagattaaggtcaccttcagttgagatttcatgactttagtacagaacacagtaggtgctacctagtgaagctcatctgctttctaaaccatgtgctccaccattcctgtttcctctcatcctttaatagtgacatcagtttgtgtaatgtcattgctcagtaaatatttattgaatggttgaatacatgaatttacttatttctaaaatttaccaacttaatgctgcatttagtatcttcatgcaattgagctaatgtaggttttcagaagtgaatgtaaatagccaaagtatrtggatacttttgygatttatagaaaatatttctaaattgctgttcaacatggttgaagtgatttagaagctcatgcacattgtaggagtatgcctgttgcacagtgtctgtcagtactgggtgttattaaaaatagtggttttccagttgtgcttcttggaaaattagaagctcttttaagctccctcaaaagtccttgaaacatggtgagtaagagtaaaagcaggccaatttccaaggcccaccctttcaaatatcatgaattaaacccaatttcctgagctcctcaataatgctttgtttgaacaaaggatgcctcagtggtttttaattagaaaaagtaaattcgattatttacttttgtttataattttatagactagaaacaaacatwttaatgtgctctgttaagattactggcaaggtgggacagttttccagctgtatttccctttaaaaatgtctcttttgtgtcttgtactcatttatttgtctggtacataatgttttaccttatccagttgaactcccacttcatataataaaggtattaatagtttttcatattgattacaaatcttttctcagtgtttttctttaaattttttaaagaaatgaaatattctttttaactctctgaatctgtattgcactgatttggaggaaatattatagcttyggagaatttgaragaactgagaattgaaaacagaatrcctgattgctttttaattaatttaatttttaggggtgggcatggtggttcacgcctgtaatcccagcactttgggaggccaaggtgggcagatcacttgaggtcaggagtttgaggtcagcctgatcaatatggggaaaccayctctactaaaaatacaaaattatgtttttgtaaaatacaaaaatacaacatggggaaacgatctgtactaaaaatacaaaaattagccgggcgtggtggcgagcacctgtaatcccagctactcgggaggctgaggcaggagaattgcttaaccccgtgaggtggagkttgtgtgagccgagattgtgccactgcactccagcctgggtgacagagcaagactctgtctcaaaaaaaaaattaatttaatttttaattttaatttttaactaaatctcttcaaagaaaaaatgatgtttatcaaataatctgcaaatgcttacctgaatgcaaactgaggaggaaagaaggaaataaatacagctttacccaaaggraaacttaataatttttttttaagcagagaagcattgtactacctaataccctttgttgaactcacacaaaatgagtacaagctgttyttggcattamaaattaggaaaaggagaaagtcattctgttatgacatcttttcccttcaaggagatcttacatttttgctstccaatattcctttcaatgacattcccttgaaatgaaggggcagtttctgctgcccagccagtacatcagtggattcaggtagagccagagaatgaacacgtgacatggtccaggtccttaccttcaaagaattaaaattgaatgtctcataagccatggtttgaagccccacagacagttatttaaaagaaagcaaaaccatgtggttttaaaatagattcagatttgttgacaatctcagggtaagtagcatattccaaaggaaatttacctgcaggcagaagtcagaatgtgagttgaatgtttatgtgtagttgcacaaagactccctagggttggctttctatggccagaagcatttatcctttcccatctctcaaacatgcaccctattccccactgcttctctttttcaaaactccagttacaaaagttcttttggcataaacgttagatgtacttctttaaaactgctggcagcagcattgttttcagaaaaagagactgactcctgttagtcatggtgagatgaagttgttcttctctttccctgagactaggaaagcagctctccctcacttttaatcttccaagttttctatgtcactaaagcaccatcatacaatctgattgggtctagttctatattttcttaatactaatgttgtctttaatattgattggtgaggaatatgttggwactctagacatcagtgatcctctaggggagtcttgctgcagagtttgtcttatataagcaattccacctaacacagtcaacagttagccatatctagggatatatctagggatagaccatatatgtaacatattcatttcctcattcattcattcattcaagtaatattgtaggattagatatacaggacacacaggacaaatcagactgcttctctcttagaatttatactctctttgatgagggggagagaaaataaacccagcaaacacagatgaaaagtaattacagacaatgacaaaggttatgaagaaacaaaacagggtgcggtgatggagaatgatggactgtgggagtaggacattgctaattagatttggtggtcagggatggcttcacagaaatagtaatctatgagccgaggacctgatatgacaagtgggatccaggcacagaaaagctgggaggttgccgtcatgacagaagaaactcaaaaggaagagccccacagaaaacaccacctgaatgtttgaagagaaggagggtatgctgggccatccattgactagatcttgtagggyttgaatctttgtaatcttggaggagaaacttggattttattcccatcagagtagttgaaaaaagatgaaggaaaaactggaaaaaattakaccactttgggatctatcttgaaggaaagctaacaagacttgttagatcaaggataggaagtgaaggaatgggtagaatcaaggataagtcccaggtttttggttcaaacatgtaggcaaattatgaactatttgctgagatgaagaaaactgagattcgaggaattaaaattaatttttttgatctgttaagtttgatatattaggcatccagatgaataagctaaataggcaattggatgtaggaatctgaagctcgaatagtacaaaagacaggacctaattaacaaagcaaggacctatagtgtgatacatgtatgatgcttatttttcaagctactatttgtagtttgacatttaggctatataatttgtctatatatgtcaatgtagaacacccacattttgacattctcaaggcatagtctatacttattaggaatgcattttctaaaaattatatcccctttccttattttgttttcttaaaagctaagaaattccctgggagccagaaaacatccttatgattctgaatacttttggtaaagaatattgaaatttgacaaaatgtcttacacttgactcccattataaaaagagaggtgttttaaagtatcagtgtattcattaagtatttttattcatttttaaactttacaaattgtgttaaatttttcattagtaatgcttagacaatcctgcagtgagcccctaagagtttacaggtttttttttattattttgttttgtttttctgaggctgacaagatgaaaattttggaacacaagaagtgatttatggcagtgtgagagtgtttaagagttcaattagaaaggaaacctgctttcttttctccaaaagaatgtatcattcctttcaagagttttctttgtcatatctagatatgatatggaaatgaagaagattcagtagtgccagagaataaaattccaataaggagagatcraatgatgctatcttgatcttsgtatcttgaacttgtttgtttgttcatttgtttcgccagttactttttgaatgggaccaaagacrgtcataagctaaaatcttggctttactttgtacctggttaagtgcattctatttattcttttttctttattgaaaatgggcatattaaaaatattctctcatcacattttcatgttcttagtttctacataacttcaagtgttttatcatgttttctccttttcatgtcctttaaaagatgtaatcaatcaaagtacatagttttggaaaacttttcccaccacattttagtaactttttaaaaatagcattttaaaattaatgtaaactttaattgttatcaagatattctgatatagtttcattacaattctctgtagctttcaaaacaattgattttgcctgtaagatctagttaaagacatttatatattttttattatttgtattcctcaaatatttgaagcatattatatggttgagaaagtaatctctctttcaaaacccagttttccttaaataagtcaaagatatgtttacattgttataatagatataaaagcatttagagaagttggtaagctgccagaaactcttttcagcttagaaactgtaaatgtagaaatacaaggggctaacataaatagctgttagcagcctgaatgctagtggaattacacaggaatttgtgaatattttggagtgttttagaactatgtgtatatattaaaggctttttataagtgctaattttaatagttaatgattcacatttcataggtagcagtgcatgtaaaatatacacatctttttctatctgtcctttatgccatttatgctaattccattgaggatacatatatcccgtctttgtaaaatttcccaagaaatttagctttatgtaggaaaccatctgatagtgcattggctacggaatctaatgacataggcttaatttcaagctcctgttgtttgactttcagttgctcacttctttaagccataattcttctctttatataaaataagtaacaatacctacttcttctaattggcccttgattctcataatccagttatgagatatatgtgaaaaactgtaaacaaggaagccgaatacaaatggaaggattttaaacaaaatgtaggttgaatgcagtgactcatgcctgtaatcccagcactttgggaaaccaaggcacgaggattgcttgaggccagaaatttgagatcaatttaggcaacatagtgacagtcccatctctacaaaaaaaaaaaaaaaaaaaaattagccaggggtggtgatgtatgccattagtagtccatgctatgggggaggctgaggtggcaggatcatttgcacccaggagtttgaagctgcagtgagctatgatttcaccactgccctccaacagcttgggtgacagagcaagaccttgtttcaaaataaaaaaagtaatattttacatgaatgtatttataaaattagagtaattttgtagaatgtatttataaaattagagtaattttgtagaatgtatttataaaattagagtaattttgtaggtattgaaaactaattggtctttgactaataaaaattacataatactgattgtaaaattccatataaatagatcatgatcattttaaaataaaactttaataataaaatattaacaattttatagtggcttgtcacaaaaagactaaaaataaaaaaccagaaaccctaaaaatattatgcatatctcctcttagattatgtattcttattgtagatgtggtgtgttagtaagattttcccacatttgatattaatttaacatttaaaaacttatgtccaggattatttctttgagtattcatttgctatttttcacattgactattccttaaattttctattcctgaacttccttgctatgaacacataaagtgaaggtcagaaatggttaatctttgttctgcagtgagggcttatcaggaaatacaagaatattcaacaaatgataaactattagaattctccatgatcacatcatttttattcccagcgggggtaaaacacaatgaattaagatcaaggatttaatgacaacttttctattaatttaccatgtgacatagggcaattcattgaattaatttatttgccccttggagttggggagcctgaaatttaagcctaaccaacaaccatgtcttatgagctttgtgatcttgggctagttcttgttctttcatctatataatgaatgtaataacaattatatccagaggtgataggatgattaatgagttaactcaagtagaaacaggttgactagaacacggggtgctctctggaagaagcttcacaagatttttttattatcatattgaatatgccaaaactgaagatgtagtcttcagccttccaggaccagaactcaatttatcagtacatgtctttaggttggactcatataaaccaggctcaagaatgccagtttatggcttcaaagtctcttcattgctggaccttccctgatcttcttgactaaatgttggcatgcccctgactcactctcaaacctttactctttacgctatattgtcactccatggataggctcctggttgcaaataccgtctacaacttaactctcaaattggtgtctccaatcctgtcttctcccttgatttctagttttttatatctagattcctacctgacatgtccacttagaaatctgacatcttacctcaaaaatagccaaagtccaactttttacaccccgctagtttattccttgtttactccagcctatctgcctccttgcctttccttcagtacaccaggactttcctcccttggactgttccccccctggatattgtatagctcactccctaacccatcaaatacctcctcagagtgggcttctctgacctcaagctccactaatgtctgttgtgttcacactaccaacttgatgggctccctacccaaagtttgggtagactgatgttatacatgcatcaagagaatacaaaaaggttaactactgacagacccttctgaggagagaagcaaagagttccaagcatgtccaaaaatggctggagagcaggggaaaagactggttcaacttttatttgataaaggagcatcactagggtgaaagttcctgggcatttaggcctgtatatgttgatctgaacatacagctggtgcccaaagaaagagcactgggcattctcatcagcttgctgaagaggaaaggatagtggtgcggtgtgaaagctgtgagcagtcacgcatgaagaatggagatggacactggattatgaggtctgtcttcttcatgaaagtgtcttctttcactgctttatgtttcttcctagagcttataattccattacatattttatatataacctctttctttatctctcttaatcttcttccctccactattgcataagttccattaygtattattatatccttagtgcctagaatggtgcctgacacatagtagatcctcaayaaaatttgttaatatttaaacaaaagagagtagcaaatagaacaagtccagttgctgggatacttgtgtgctcatgaccaacataatctttccctagtctcagacctgcaaggaaagctaaattctacagaamgttggtgtttctggaggggacaaartccaacaagggaatttggataaatcaaagtttctatcgttgcaggcagggagttgggactctgrtgcattcaggtcactgcagaaatgaccttgctaatgggaccctgcactttttggaacgtttcattaatgagcgctagtagttgtagctcaggtgacagtttttctgagtttctaggaaaaatcaacctcccttcacatctacgcatccttttcttaggtgatttaacacagttattcaagttagagccaagtcttgcagaccgttggagctagtctttctctacaaggtgcctttgaatgttctgggtctgaggcatttgctttccctccactgttctcccacgtgctgcaggatagaaagcagctattcagagtaagtagtctgtaagtagcagttcctatccctgtactattatgtctggaaaatgagtttgaagtaagccgactttgtgctgtaacacttgaaatcacagaagtcttttcaaactatcttttgtgccttaaaatctttgttaaactgatggctgtcatctctgaaaccacggcccacccaaactcaggcttgagttaaagscaacattgaaaagattttcaggggcagctggaacctgtgctgtcttgaccttgtaggccactcattttaaatactaccaaatcctttcttaaaagaagtgcatactctctccccacaccactcctttcctgcttcagtaaaagaaaatctgttcttctgccccagtttatgcctatttttctgccccagttctccgacatcctgttygcatttagtgttacttcttactggctctgcaatagccatttgacttggtgtctatattgtttcagtgtataatattggagtgtctgtgaagaaagcaaactgttggaatgttttatctttcttattattacataaggtgtgttggtgtgacacatgtatatatataattgtgagcaggttttaggaaaaagaagtcttataatccctaacatatgtttatattttaggtgatcttttaggagttagatcatgcttttatgcattaaatggttagttatctaaagctgaaggcagaaatgatttgcttctttgttttcatgatgaatttgtttcttttgtgtctctccacctatcaacaaacattcttttgtttcatgaaaaattaaggttgatataaaattacctgtatttaaacagagcttgagaggttcacttttcttaggcatataaagaggttattcagcctgagtatgttagagattctctaagtaggaataaccacatgttttggaagaaagaggctttgtttttagaaaggcattgttagaggcctgagtatttcgggaaatgaataaataaattcttgaccttgtaggaggtacctacagttcaacttactgtgcagcagctcagcagacactgctgggaaaacatctctcaaataaccttttgaagaaaccagagttttggttcaagttgatgtgactactttattggtatcatcacatcaatttgatgaatggtcctgaaagctagagggaaatatctattgaaatccaagaccttgggwtgtctgtattaaaagctctgggccactaagcaagttctcttaaattttaaaaggaattttaagtagttaacgatgaaatgagcattttctacatgtttgaatgtggcttactcaatgtgtgtatgcaaacatataagcatctgacaaataaaactgaaatattccagtactttttcagcttcattgagtaaagaacaaaaccactgaattagaaactcatgttttgatgacttcctattactgaaaccatgggaacaggatcggtaaatagagcatgggcttttgaggctttgtaaagctggtttcctccccactccctccattgttccctctcttgttccttccctctcttgttccttccctctcttgttccttccctctctcgttccttccctctctcgttccctsgttccctccctctctcccaccctccctcactccctcccttcctttcttccttcgttccttcgttccttccttccataaatgtgttgtgaacacttcttatgcaccaggtcctattgcaggccatgctctaggtaatgaggtacagcagaggacagagcagacaacaatccctgcctttatagagcttacattttaatgagttcaaattatctctgtatcttatgtgaacttggatctgaacttcatttctccatatgcaaaatgagaataattcttcttcttttatagggttattgtggtgattaacatgagacaatacaatactttgatatgggggctcaagcatgttctctctttgtttcgcctgacctggcagcccacatgggttttgctgctgtcctgcattctctgtatttgtcctctttcttgctgtttctctactttggtttttgagtgtatctgtgggtctcagtgcctttatttctatgtgcacccgagtcttcttatttgtgtgctttggcatgtgtgtctctctcactgtgtctttctttttatatgcctctgtatgtctagtttgtgtctttcttttttgatctgtgtgtgtgcgtgtgcctgtgcacgagagagagagagagcaagagagaatctgtgtgcatacatctctgtctctgcatttttctctcttacagtgtgggtttctctctgtctctgtgaatttgtctaagttttaaaatcaaagttctgtgaaaaggaatttgaaagaaagcaactttattccsgtgaactgtttgcaaactgtaagatacagcctttgctgtgaaacttaggtacattccagagaacaaagggaaggttgagtgtttatagcaacagttcctgctcaggtttccaatcaggtccatttatgcaaatgaaagactcaaacttgctgagttttgattggttgatgtagctgagttctgcttgatcaattcaagccacagcttattggttggttcaggaaaaatgaacaagaagagwcagctatgaaagccttagcartaggccagtgcagtagctcatgccgataatcccagcactttgggagtttaaggtgggaggatcacttgagctcaggagttcaagaccagcctgggcaatatagtgaggccctgtctctacaaaagtaaaaaattaggtaggcgtggtgacacatgtctgtagtcccagttacttgggaggctgaggcaggaggattgcttgagcccaggggttsaagaccagcctatgcaacatagtgagacctcatctctacaaaagtaaaaaattagctaggtgtggtggtgcatgcctgtagtctcagctacttgggaaggtgaggtgggaggattgcttgagcatgagaggttgaggctgcagtgagctgagattgycccactgtactccagcctgggtgacacagtgagaccctgtctcaaaaaaaaaaaaaaaaaaaaagaacctcaaactcaaagttaagcagatgtgtgtgagctttctgagaactcagagaacgtgtctgacctctagtcaaaaaacagctcattggctctattttatgtttaggcccagttagccactcaggatttatcttgaggaattgtctcattcaggttcatatttggatcggtacatgaatgtgtgtgagtgtctctctatgttcctctcacagtgtgagtccctctgtctctgtgtgtgtcttactgtgtttaggtttctataatgtcagtttgactctgtctttttttctgttttgttcattcatattcttgctcttgcctgccctttctccccttgctccctagctctgactctgtctggctctgtctctcacctttttctcttgttctgtgagtctctcttgctttctttctctctgagtctctcactttcactctctgtctttcctgcttttcgtcagtctttcacgctctctctgtctctttgtcacttcatatctttcacttgtgtgagtgtgtaggtaggtttttgtgtattcatttatttaattgtgctcattatgtttatgcatgtcctctcattcctatcccaatatagcttagatattcggtgatatttaggtagcaatctcatatctcaagaagaataaaaaggaatagagatttattctaaagaagccataaggggatttatggattgagaagtggagttttaaaaattacagatggatattaccaagatttggttgtatcttaggtgacgtaccactaatttcacagtatctcaaaactgtccagtataaaaccaaatataattaacaaccatcaggccctcatctctatgtctagatagtccagggtcactttttaaagctctctttgctgatcttgatgatttttcttcttcaatggttgtcattctgttgagcctgctattctatttccttgactacaatctaggttctcatcatcatcacccacatcatcttttgcctgaactacttcaggtgctatccctggccccgctaactttccatccatcatgccaggtgggggcaggttattgttccatcatctttctctccttgatgccctccactggcttccagtyttcttccagggttcaccaatagagtttcacaacataaacagctgtttttttttaaaggctcacctgaccaatattttgcccacctaccactatgcccaatgtgtataggaagccatgcttttgaatgctctgactaggcgattttctccactacaaatattaactcccagttatttctaatgggataaagccctttcctgagaaggaaacataaaaggaaaacacatgggaatctggataaggaaactttataaaccaatatttgtagcaccaatgtattgtccagttaaccagacgatgcttaacttgttttaatactaagaagtttttgctattttgactttgtatcatttaggaaagggttcagcaagatttttctgtaaagcaccaaccaagttagtaaatattttaagctttgtgggttatactgtctttctgacaactatttaattccacccatgtttctcaaaagcagccatagatgatccataaataggtctggttgtattttttttttttttttttttgcgagacagagtctcgctctgtcgctcaggctggagtgcagtggcctgatctcggctcactgcaagctccgcctcctgggttcacgccattctcctgcctcagcctcccgagtagctgggactacaggcgcctgccaccatgcctggctaatttttcctatttttagtggagacggggtttcacggtgttagccaggatggtctcgatctcctgacctcgtgatccgcctgcctcggccccccaaagtgctaggattacaggcgtgagccaccgtggccggcctaggtctggttttgttttaataaaacattatttgcaaaaacgggacatggctcagattgggcccctgcaggctgtagtttgccaatacctaatttagactttatgataatatcttattatgtattccatataggtaaaattttcattcctgtgcacactgtttttttttttttttttgagacggagtctcgctgtgttgcccagactggagtgcagttgtgtgatcttggctcactgcaagctccacctcctccgttcacgccattctcccgcctcagcctcccgagtagctggcactacaggcgccagccgccgcgccagctgccgtgcccgcctaattttttgtatttttagtagagacggggtttcaccgtgttagccaggatggtctcgatctcctgacctcgtgatctgcccgcctcggtctcccaaagtgctgggattacaggcatgagccaccgcgcccagccactcgttttttaaagctttttttctctctcacctttcatatatgtatatatgcatgagtgtgtgtgtgtgtgtgtgtgtgtgtgtgtgtgttgtgtgtctgtgtgtgagtgccaaaaatataacttttgggctttctacagggtttcatataatttgtcattattataataaataaaggaatcatattattttcatttacataaaattccatgctcataatttgaatcaagaaaaccaaaacctgaaacatgttactggtaactttcaagaaatatctcaataatctgtaaaataacaacagtaatttatatcacgtattttatgtaaatkatgtcatttatgtttaactcttttgtaagtgtcatgtttagattcttagttaccatttaaaacaagattttagagaattgttttaaagtattttgtgtatgtgtgcttactgaatcagcttaaagatgtttgtaaaattttagacttttattaattgaagaccttttatttgtaaatcttatctaaagtgcagttgaatagatttaaaattaaactttcatgaaatctgaattgaccatcattatgtacagcaaaaaatattatatccttgtcataaagttaattctagataaatgtaataggtaaatgtaaagagataagaagaaaataatatatagatttttttgcttataggatgggaaagaaaattttaaatcacatattaatttgaaatattaataagagcagagaatgatccatttaattattaaaaacattgaatgtggctgggcacaatccacctgtaatcccagcactttgggaggccgaggcgggtggatcacaaggtcaggagttcaggaccagcctggccaagatggtgaaaccccatctctactaaaaatacaaaaattagccaggtgtggtggcacgtacctgtaatctcagctacttgggaggctggagcagataattgcttaaacccgggaggcggaggttgcagtgagctgagatcatgccactgcactccagcctgggcgacagagcgagactcagtcttaaaaaaaaaaaaaaaaaaaaawataatgttaaaaataaaaatcaaattaaaagaaacaaatgctcgtaactattttaaaaagtgttaatcttcttaatacactattaaatgacaagcattcaacttggttaaaaataaaaagaaattaaacacaatatattttcttatcaaattgtcattttaaattaaatgaaatgtcatatttctaagaattcttcattgaagaggtmtccatctccctctcctcaataagatataaatttttagccaacaatttggtaacatatccataaaaatatttacaactattggcttcttccagggatctgtcctaatgagatgcaaaaatttatagataagatattcactctactatctataatgatgaacatttaagaacaatgtagcagttcaaaaacaggtgatgaaggggtaaattgtggtataattatatgataatcaaaagcatggaacatcatatatttgaatgataacaatttggaataatgtccagaatttattaataaattagaatatatggccatattatggtgattataacttttaatgtatatatagatatgttacataatatttatatagtgagattatatattatttcattttttatttttctgtattctctaaatgttgtatgatatgatatgtgtatatttcaacatcaaaagaaatacacattttcttttcccacataacactaaacaatagatcaattgatgtttcctcatacctttcaaagcatggtcttctgggttttctttaaaggaaagaaaaattttttaaaaagagatcttggacattagagaaatgaatttgatattttgggacaaaagtcttgatcctagtttagaaaatgtgattctctgtatcaactgaatttcttaggatgattgtttttatttagtaagcttgtatagctatagcccacacaagttaaagcctgtggaatttggtttataaaccaccttcatattggatttcagagaatgccaaggcatcttataaatgatgatacttgctaaaactcatctcatacctgaaaagcttccaagcattataccatataaaagattgttctctattcaagcaaaataagtcctaagatttgcaatgctgctgtttgacgcaggaaaatggcagtggaaaatccaagagctagttccatgccaggcaggcaaaatctgccatgcccataggaggcgggaactagaacagaactgctgtgggttatatttactgtgagaaaagaaccctctgtcttgaaaggagctgcagatggagtcttttctccatttgcagaataattaccttaaacctcatttatgtaggtctaaggaaatcaacaagtgagagcgtttcacataattccacatcttggctatcttattattttcaattgattttttttttttttttttttgagatagagtccctctgttacccaggctggagtgcagtggtgcaatcttggctcgttgcaacctcctcctcccgggttcaagcaattctcctgactcagcctcctgagtagctgggactacaggtacccactaccacgcccaactaatttttgtatttttagtggaggcagggtttctccatattggccaggctggtctcatactcctgacctcaggtcatccgcctgccttggcctcccaaagtgctgaggtgtgagccaccatgcccagcctcaaytgaatttttaaaaatcaaaacagtacttttacacagttataaaaatgaaatagtactcttaggataagaaatatctctgcattatcagtacttgatctctagaagtaagcatctttaattcttctaggacatttttagttattacttatctccatatttctcagtaaaatatgtattctactatttcttgatttttcagttttaactgtcgtctacctggcttcctactcacatactcactatccacacacatatcttctctctctgtgacaccaataaaattatgatagtttaaaaatatgtttataaccagtttttaaagtattgtaaagaagtgacaatatataaattttattcatagctgagacatactgtatttatttcattacaacttttctcttttcattccttataaataataattgtcccatttttatattttaaatttagctttctaatgtctatcacaaatccatctcaaactccccatcatagctaacatttctttgtgtgtgtgtgtgtgtgtgtgtgcctgtgtcactctgttgccccggctggagtgcagtggcgcgatctcggctcactgcaacctccaccccctgggttcaagcaattctcctgcctcagcctcctgagtagctgggactacaggtgcacgctgccatgcctggctaattttttgtattttttagtagagatggggtttcaccttgttgcccaggctggtctctaattcctgatctcaggcaatccacccgcctcagcctcccaaagtactgggattacaggcatgagccactgcacctggcgctaacatttcttaataagatttaataacatgttacgtgtttttaataaatcgtattttttaaaggcgtccctgctaacgtgctgaatcagtgagtcactgtcctcccaaatgtgaacaagattctgatttctcycagtataaattagttttgcttgtttcccaaaaacagaatctaaatgaaattatatatatgcattcttttgaccttgcttctttgactcagtcagcactatgtcaatgagattcatctttgttttgaggtatagcagtagttcattctctctcatcactttagagttatggtaggcaaaaaaaatacaaattacaaattaaaaattaaaaaatggccccttcaaatatgtccatgccctaattcctggaatgcgtgaatatgtgtgcagtagaaacattggcaaaagggattttgcagatgtgattacagttacagagcttaaaataggaagattatcctggtggatacaatataatcgtatcagactttaaagcagatgattttctctggctgcaagcaaggaagactcagcataggggaagttggagatttggaaaatgacaggaactcaatgtgtcatttgttgttctcatatatagaggcctatgtggaagaactggagagaggcctctatgatctaagagcagcccccagctgatagccagcaaagaaaagagagtcttagtcctacaccctccagaaacttgattctgtcaagaacctgcatgagcttggaagcagatacttccaagagtctcagtcctacaccctccagaaacttgattctgtcaagaacctgcatgagcttggaaggagatacttccaagagtctcccaataagaccctagccagtcaacactttcatttcagttttgtgagtcctgaatcacacaaaccagttaagttgatgtggacttttgacctacggacactgtgagatagtaacttgacattgtttgaagggcctaggtttatggaaatttgtatggcagcaatagaaaactaatagaagactattccattatgttactataacacaacatttaaaatatatctattttactattgatggatttggattgctttcaattgagacttaatatgattaatgatgctaggaacattcttatatgtgtcttttggcagatttatgtatttatcttggtagataattaggagtggaatgggtaggttgtattttatgcatatttcagcattagtagatattgctaatcaaagtggcagcagtaataggcactcctgcccatggtctatgacagtcccatttgttccatgtccttgccaacacttgttggaaaatttatagtgctatgctaaagaagaaatcataatgtttgtaaatgtttgttgctacttcatggtgttttgatttgtagttctctgatgatgaatgatgttgagcatattctcatatacttactggatgcttggaggtattctttgagaagtacctgctcaacactttgtcagtcattcaagcagtccataagcaacaccatagctgcttgactggctcaccatatttccataaaactggttagtaaggaaagaatgaacttaaatagatttatgcagcacaaaaagcatcataaccttctgttcacatctcatgtccacaacagttccctctccccacacatcctatggggaatgcagaggtgggcctaggtggatgctacatctgtagcataggtctgtgcctcagctgagaacacggcccttaggagcttcccagtcatttaaggggctactgataaacctgccctttctttatatctgagaaagagttaataaagatatgcaagtaaatcttcttgtatgtaaacaaattttctcccggaagaggagggagactttactatcatggaaggtaaataaattttctctgtgacccaaaaaccatctctagcttccaagcctgtttgccacacaaatacccttgaaaagatacatatagatatagatatatctatatatggttacataaatatacatatattatagtttggtgtaagtatatgcacatacatacgtgtattatataaatatatatcaaactatttatacatatatacttttataatataaaaatacgtatttttactgtattgcttttgctgcatagcataatttttattctgtcttatttttcttatacagttcaaaatactttttaaattttcattgtaatttttttttcttttacccatgggttgtttaaaggtgtattattattatgcaaacatttggagattttctagttttcttttttgtaattgatctgtggtttaattttattgtggtcagagaacatagtttgaatgaagcttaatgctttgaatttggcttagacttgctgtaagactcaacaaatgatcgatctattttgataaatgtttcatggccacttgaaaaaaaatgtgtactcttcagtaccttgttacactgttctgtatacataaattaggtcaagttggttagttttctttaaacttccatgttcttatgatttttttcccgcttattctatcagtaccagagagagaagttaaaaatatctcagtctattttagctctgtccatttttgctttatatatttgactatgttgttaggtaaatagaaatttaaggttgctatccatacagtgaattgacccctttattattattaactatccctctttatctccagaaatgttgctttacttaaggtctactttgtctgatattagtatagttatactagcttcctcttgggtgatgattgtatrgcttacctttttccatccaactactttcaattttgggcttatgtaatatttaagatgtatttttcataaacaggatatagttgagttttatatttttatgcattctaaaagtttttttttccatgattacatatttagtccatttacattttatgtacttatgatatatttgcttttatagcttctatcttgctattttttcttgttgtctcatctgttatttgttccctttcccccttaatcttcttttgaaataatatttttattattagttttcagtgattagccctttagttatacatccttttatatttgttttatttatttaagtatttttctttgagtaattacctggaaggatacaagattaattcttaacttaccacattctatcttcaaatagcatattttccacttctttataatgcaagaactttgtaacacttctcttttctggtcctcttcattccttcctgctttttgtttctttgctcctgtataatattgttttctttggtgctaagaactgcctttagtgttccatctgtaccgttctactaaaaacaaaattttccatttttatttgtgtgaaaacatgtttttcctttagttttgaataattctttagctgagtatagaatgctaggttgacaattattttcttgtactagctttaaaatattatattgtcttccaggcttacggtcattgttgaaatrtcagccataaatattcatgttgcccctttggaaatgatgtttctatttctttctggctgcttttaaaattctccctctctttttaatttttatatattttttcttcttagcaattttgccagaaaatgtccaactgtatttccctgctatttaacctgtctgaggttttaggttttatttatttattttttcatggcttcatgtctttctatcacttttggaaaattctcagttaaaatctcttcagaattgcctcttctccattcattttattattctatagggctccacttgtaggtatttttggcatgttctttgcgtctcatatgtcttttacttccttttacatatttttattctttaaaaaattaattctttaatcatcatatttcagaatgaggcactaaatgcctgatggcacatggctgggatttgtcaacaaaaggctcagattctagggtgactaagtgaggatccagacattttattgagatacttccagaagtcagtatcttttctcttggactgaccagtttccttgatagtaactgaacagtttcctgctctggtatatgatttggggtatcggaattctgatactagagcaggaaaagagtttagtgatctcatcttttagtatgtagactttcatttaaccctcctgttttcagtagtgttaacttgaaataaaaattacataatagagatgcatctctaagcaaagagcttatttggaaacaaaaaattgcaattcgggacacatagaccagcgtagcctctaggtgtgtctgaagaacaaaaggaaaggctggggttttattgggaaaatgaacaaagttatgtaagctgttttgaaggaagtttcattggtgatggcagtgtcttatgggagctggcgagttctgagtgtcaacagttaccaggtaagacttaaagttatggttaggtctttgtgcttttgtgtttgaattacaaaaacattttctggaacaggtatgcatgacctgggtgcctttcttcatggcctccaaatccattttagtttggtatgacgtgaaggactctattttgtaaaattaattttcacagtaagttcctcaacccaaactggtgtctgtctggctagacatctccagagattactttccagtctttggccaatgtgtaggaagggcaaactcccagatgctttgtctgtatgtagatattcagttatacaactgcttctgaaacaaatttcctgccaagctttctgctttcctcattctttttgatgcttgcttgacactttcaggaacccttgtcgagtgctaacctgcaggcttggatttcagccttatccattctgctcaatcacatgtccttttatctcttcacttttcagtttccaaaattacctctcaactcacttctctctattcttgagaattcgtagattaaaatcttcactttaaaaccatttaaatggtgtttagagaaactgaaataaataatgtgatccattaatcattttaaattatgggtaccaaagaagccagtttctctattttattgttgttgctgatttattattacatcttgttattttgcattttttggtgatgatggaggtaatcagagcaaataatggatttattgtgactacactgataatatatttttactctaattttaggtgagtgtaaaagttcatgttagttaaaacattacttactagatatagaacaaaatagaatcctgtatcttcctttaattctaaaatatgaatgaaaagtaaaactgtgagaatattgcacattctaaaacaataattacatatagttgccataatatttacaagtcaaatattactttgattctatggcctcaaattgtcgtttactctatgttaagcactgcgtattaactatacactacagtatataaggaagatgggtattattatcttttttaaaatagatgaataaactgagaatcagaggtaggagtcaacatcttgttcagaattgtatagctaattactgctaagcctggacatccaaacttaagtatgtttcatgttatcaaagtaatgatttttttcttcctgaaaaatgctttcttccttacctgacatttacccaaaaaaaaagcctttagtgatctgcaatttagratgagctgttcccagatatggaaaaacacaaactgtattattcttgaccagtgttactttcattaggatttggacacagttctgcaatagacttatacacatattttaacttcccttctgttattgcacatatgcagtttacgtctatgatatttttcatttaaataataataaagaaagaattagaaactggaactaattacaagtaaaacattttcttctaacagagagaaggagaaaaggatcataaggtgcgtttggcaattggaaatggcatacggagtgatgtatggagagaatttttagacagatttggaaatataaaggtgtgtgaactttatgcagctaccgaatcaagcatatctttcatgaactacactgggagaattggagcaattgggagaacaaatttgttttacaaagtaagtacagcattttccttattaaagaaatacatcggtgcggtggctcatacctgtaatcccaacactttgggacgccgaggtgggcagatcatgaggtcaggagatcgagaccatcctggccaacacagtgaaaccctgtctctactaaaaatacaaaaacaaaattagacgggtgtagtggcggacacctgtagtcccaactagttgggaggctgaggcaggagaatggcatgaacccaggaggtggagcttgcagtgagcagagattgcgccactgtactccagcctgggcgacagagcgagactctgtctcaaaaaaaaaaaaaaraaaaaaaaggagcaccttgtggtctgccagcactcttctagatactatgcttgtaaattgtggtaaatattatcacctttttttttttttaagttgagaatttctagaaatagagtagtggcctcagtgtgagagacagtgctataggttatgtgaacctcagttatcttctgtattttctctctcatatcaccataatgatgccttttcttgttctgtttccaaatttaatgatataatttataaatagcaagcataggccctgatatatattgactctttccgtatatattaatttgactctttccattttccttgagtgtttttattccactatttctatttatctttcatcgtttataccactcaattctatacaggcttttaataatttttaaactatattaagatagcactaaaatcttaaaagtagccaaataaaccaactttttaggaggagaagattgacagctgatttctcagtagcaaccacaaaacacaaaagacagtagacatttaccttccactggcttggaaaaaataactgtcaaactggaacttatactcaacaataattttttaagaatgcaggcaaaaataaagatagcagtctcaacctttgtaaagcaaaactggtatagctgcaagagaaaataaatcttcagtaaccttctataataagaaaccactaatcgacatatgaaagaccctgcatctaactactgctgtatatctattttattcaagcacttttgaaacgtttacaaaagttactgkgccagttaggtaattccaacaaatttcaaaggattgaatatatataaattatgctctctgaaaacagtttaattgttggtagaaataatttttttaaaagacaactagataacctcctatatatttggaaataaaacatttctaaatatccattcatcaaagaaaaaatcataatagaaattagaagatactatgagctaaatcataaagaaaatgttacattaaaaaacttgtgccttagccaagaatagctgaaaattggatggagctcagtaactatctctataagttaatttttaaaaggacaactaaaataaactcaaaggaaataaaaggaaggaaataataaagagcagaaattaatgacatagaaaaaatgtttggtgatgaatacaaaaataaatagaaatataatttttaaaaagtaaatcgattctgattgatagaaggcacaaataatatcaggaatggaaaagggaacattgctgctgatactttasacattaagacagtaaaagaggatatgttgaataagttcatatcaataaacytgaaattattagatgaattggataaatttctagaaatgtacaacttactagtattgactcaagaattattttatcacactaaatgaaataaattcatactccaacatcttcccttaatttcagatagctttcccactcaggataatgaatattcaaagagcaaataattcctctgttacgaactcttccagataatgcagaaggagaaaaaacttcccaactcattttttgactccaaacctgacgtaatagtgcaagaacgaaagtacttcctacagacatacatgtatgaggaaagcttttggttgataatctctctcctcaggtgtgtttccttagtggcctcacctgttctctgaaagtagcactatcctatagcattgyttttgacatttccagagcaccctactcaagccatatttagaactgcttttgaagagatctttaagaatcccataatgcgaactttggtgcttttttgtcactttcatccctaactgctttagttttttaggtgaaattttctgtataataaactgccatacctcaaagaacacctggaagcaacaaagtatttgcttttctaatccatggtgatttttttcagtatctggaagtaatyggcagacatgtgtttttcatgccacagcagctcactttttcagtctagttgcccattcaaagctggtgtaaatcacagtaatgctctaaaccaaaagaaggtgcaaactatttttataatgcattcttttagaactttgagggtatagttgacatctaagaaatgcactttattctgaacgaaagcattttggggaaagtaagtgctgattttactgagttttacgttccttgcagttaattttctcagttaattgcactggttccattacaaatttggtattgatattgagcccctttgtgaagctgagccattctaaagcaaccaacaagggtatgatgatttgtattttatattactgactttattataattttctaatgctttaaattttctgtcaactgtaataacgtcaatcatataaaaagtcatgattgtcttcaatttatttggaaaacctctgattttcaactcattttagttttctttttcagtttggaaatgaaaaaacaaagttgtgcctaatactttatgacttctagtctgtcttttatcattttattcacatgttgttttgttagatagcaggtaattagaaaaatttggttcaatgattatctcataattaagagaggagatttgataaatgtctgtcaaaaatgctaacctaatggaggctcatgcttattatctgggagggaagcagcctccagagataaaatgttacaagtgaaggagaaagataaggcagcaacacagagttcctataacccattgtctttatgtgctacacttactattttaatgcataaaactgaagagatattgtcccacatattctcccagggcaaactatataaaaaatttagtgacaacatatttgagagacaaactcaagtagaattatgaagtgctttctctttttctgtagtattttcacctggggaaagtaactaggaagagacaaacataaaatacatagataaagcttgaaaaaagggagaaaatgaatctaaataaaaggcagctgaaaaaaatgaatgcacattttatacataggtgaaataaagctcggaaaaaaaaagagaaaatgaatctmaatgaaaggcagctggaaaaaaaaatgaatgcacatcaaaatagtaagttccccaaaacgaccaggaaatgtttagaaaaacaattactcacaggcttgaaaacttgcaataatattctctttaaaaataagagcccagaaaagaaaaaggatcaaggagaaacataaataaacaaaatgaactaaaaagtaagcacgctcagctcaaagaaaaaaatagaggaaaaaatgtaaatattacacaaatgagcatcacataaaataaaaggaatgtaaacgttgttagggagaaagatgagtggaattaaggagtcccacaaacacaataaaaagagcaagcaaatgataatttaaaaattaagaaaaaggattttgaaaacatagacaatgatctgatgtgtccttaattggtgttcctgcagtaaagaacagatcaaagaaaaaaataattatttctaccctaatagaggaaaatttccttaaggtaaaaacttgaatctttagcagaagagtacactatatggggtagaataattatcagaaaaatatatcctggtaaaattatgaaacaaaaagaaccaaaaggagattttgaggtagcaaaagcaaaggatgagcaaaatgtaacacagatgagggtgggaaacatctcaggcattctcaaaataaaacactcaaggctagaaaaaaaggaaagaattggcttcacttaagaatttttgttctggctaagttgcttctcaagtatcaagtcaacaaagaggttttctcaaagttttaagaaatcagaaactataatacctgcatatttataggaatgcaatatttctttgtaaaattcactgaatgaaaaatcatggccaacttgaagataaaccataacttagaaatgaaagaatcaccttcagttaaaatgcctgatggtgaacattrgatcaattcacacgtagaagattgaacaactctgaattgtttatacatggaataaaacctgacaatgtaaaaataattataacactaacaaaaatgggagtgggggggaggaaaggaagaaatggttattctcctacctgtcatattggcaaatccatagataacaacagaatttaaaatttaccatctaaacttaaattttaaaataatatatgagattaataaaatggctcatttctttaaccattttcataagctgttttattgccttaaaagtaggtgtcttttagggatgaggaaagttagacaacttcaaaataagagaacagtccccacaagacsactcccatttctgacacaatttcaggagtcccaaagaccactctcaggtttgataatttgctaaaaggactcacaaaactcarcttattacagctaaaggatctagattataatcagcccagggatgtcatatgtaaggcagaatccaggagggtaccaagggtgaagcttccagttatgctgtgttgtggagtcagaacagcattactttcctggaattgtataataatacgcacgaactggtgccaaatggggacgctcataggaggcttgatgtccagtctttctgggggcttggttgtgtaattcgggttgactgctcacatagcttacttccatctcctgccccttgggaggtcaagctgggtgatccaaagcccccggcctacctcacattgttcatgtgcctcagagaccccatttctaaatcatagtgttaccatctagttgcccaaaggttttagacaaaaaaatgtactactctattaagaatgacattccaaggacttagagatcacctcccagaagccaggacctcttttgggggcaaggttaaattctttactacacagggactgatgataactctgttcccgactctactactatttcacttcgtgactttgacaagttacttttctctcagttcagagtttcctcatgtattaatcaaggaaattaactttgcgttccttttccaactcataaatttacaaatctgaatctgcaaagatacgtgggtgtggataaaatctcccagggccaatgcatagagccacataggtgtgtgtgcattgcacagttctgctatgaatgggaccccatgttttgaatgggaccccctgcagctgtgctccagacatgtacacatatacacatacataaacatgtacatttgggagattttaatgtgtggcatctattttttaaatttgtattataatgcagccatttttgtaatatcatgaggacctcttgaaggcaggaaggagaatggaaatatttccagttgagcattaatcctctgctccagagtacttctagaaaatgctgtgatatatttaattgcgtttgaattataaaattattcaatttctgactatcaagtcccctttttctgataacagacacagtaaacagtaatttgctgtggaatgaatctcacccacacacagttgcccaattaatctaaaagaaataacactaaagctgacatcacaagtcactgggcaaattttccaaaaaacaaagcatgttaaaacaggagagaaaagaataagtaatgaacagggctctgtttttgtttggccaagatgataaaggcagtcccggaacttctggactctttctttctactagccattaggcaagtggccaatatcctgttatcccaattacagacaaagaccaacaagatgcaagttcgtattttaataaacagtctttatatctagaataacaatatatttgctttgctgcctctttcattggctctaatcctaaaataggataatattaatttctacatcataggatgttttgatgattacattraatagaactcttaaacacttagcacagtgtccagcatatagttggtgcccaatcaatattaattgctctcatttatattttaattcaaataatgagttgtgattcaagttacatgcttattttcctaatgctaagaaccagaggtatttgtatttaatctttgatgataaataatactattgcatctatctcaatcatcttatcttttcccacttatttgttctatatttgttcatttctcttctcctgctttccccccattcatctttccttattattattttatctcacttcattttattacattcatgttagtttaccattttctaactgagcttgtttgattgctgagtagaacctcaattttcttacagaataaaaatgaggagggttgggcgaagtggctcacacctgtaagcccagctgcatggagggataaggtggtaggattgcttgagcctgggaggcagaggttgcagtgaaacaagttctcatcactgcactgtagcctgggtgacagagtgagacactgtctcaaaaacaaacaaaacaaaataggaggaggttggactaaaccagtctgcagttctcttccagggtgagaatttaggggacaaatgagcctgcatgatgtgataatatggacatgataggagcagagtagctgaagggatgagaggagacatccaatttttggttcttgatgcgatgggagttktctaataaatttatcatctcacaccaaaagagtgtggagaagcactgaatgttagtttaggagcgttacagtgaaaggctcaggggaaaggcttaggggaaaaggacaaagtggctgtcaagtaaacatactttttaggcatttgatgtgttttgacttttttttttagatactgtgaggaaaaaataacacaatttttgaattaatatgcttccattttagttctattaaaacttttcatttcaagggctattttaaataaatggctgcagaaaatggtccttttgcctgcagttaacagagtatataattgaatgcctggattgtttcagtatcttgattaaaattagtagtgttttgctaagtaaagtgtaccacaaaagaaatgaaagtaaatgccagtaaatgactgctgtttactaatacctttagttttgatttttaaatatttatttaatttgtcttcagtaaaagttgttttaataactccatattccaattatttatttcaattagcatagtctactacagtagactaaattgcttgyacaagtaactaaatgcacaagtaactaaatgcttgtttctatttgtttgatttttttttttgcagcttctttccacttttgacttaataaagtatgactttcagaaagatgaacccatgagaaatgagcagggttggtgtattcatgtgaaaaaaggtaagacttctatttgaagacatctcctcaagcaaagtttctgatctcctgtatacagacatcccttggtatccttgggggattggttccaggaccccgggtagacaccaaaattcatggatgtttgctccttatataaaatgatacagtatttgcctatgaggtgtgcacatcctcctgtatactttaaacaggttgcttataatacrtaatacaatgtaaatgctacataaatagggtcgtatggtattttttatttatattttttattgttttattattattttatcttttttaccaaatattttctatccaaggttggttgaatccacagatgtgaaaccatggatatggagggcccactgtgattattagtgaatttaaaaaggagaggatgactaggtccactgtataatttaactttggaattttaatgcaggtggaacaattttactattaaatgttaagagccctagagggatcactcagatggtaaattattaaaatacaaaagtggtaactatttggctcatactattcttaatccaccacttgtagtatgaacagtggcaaatttctaatgtcctatattgccaaactataatatagaaattagtgaattaatttatcactctagatataatgtaaagtcaggccaacttggatttaaacgtggtctctgacacttagaaatggtgcaactttagacagattactcaacctaagtcttattttcttcatatgtaaagtagaagtgacaatgtttattaagtgaggttattgtggaygattaaatgggatgtatatatattcctgggggacctggtatgtggcttgttactttcctctcctcagcttctccctctcactcccctcccttctctaccaaggtagactttcttacaattttaggttagaaattttcatgaaagcaagtacttcaattaacttgctgctgcatataatcaaattagaaaataaaatatagagatgtgcacttagaattgtttagagatccagtatggataaatcaagccaaaattaatttgtattgccttaaaatatgttgaaactgcatttcagaagtggcttcctaaatcttttcttcaaatgtgaagataaggtgacaaacctgtttttattttctggtagctgaaagactaaaataaaaaatgcaaactttgtctattaaaaaacaaatctcccaaatctctgaatttcaagcctactggcatttatcaaatatgtttctccaattctaatctgtagacactgcccatgggaaaataatttctgagcagagtgcaaagaacttaagtgcacttttctactgttctatttcttacaattatagtaatatctgatgttaaaacttgaatcccagaactgtgcttatgtaacctcagggtttcttaaaaagctggttgaccccaaatatctgtttttctattttggaattctcattatgagctactcaatattttttccattaaggcattgtgtcttcacaatgtaaattatgcccagacaggaaagatatgaatacactgtgacctatttaaacatttgcaacaattagtttgtcagaaaagaaactgtcacctgtgtcctaaaaaagaaaaaaaaacgtaagttttaagggagatataagagtcttgaaaaattctgaaatayagggaatgtagactgacagaatatatcacagaggtaaggctttggagtcagatgtacctggatatatatatatatatactccgactcctgcatttgacagctgtatgacattgggcaaattcctttttttacgcctcagttttttcaccttaaaatgaagatattatctgggcctttcttataggtttgtgatgagaattaaatggattacatatgtaaaacactcagaatcatgactattatgcaaaaagtgctcaataggtataattgtgatgataatgatggtgatgatgatgatatgatggtgttggtgatatgatgatatgatggtgatgatatgatgatgatgrtgatgatgatgctatcagactgctggggcagagaagatttgctttggccagtgacctatgtgcccttgaaagccagaatgcccaggagtgggagaaatgggagtcgagtaaagactgttggctgggtgcggtggctcacgccagtaatcccaacacttttggaggctgaggtgggaggatggcttaagcccaagagttctagatcagctgggcaacctggtgagacctcgtgtctacaaaaaaattacaaaattagctgggcctagtggcatgcatctgcagcccagctacttgggaagttgaggtgggagratcggttgagtctgggaagtcaaggctgtggtggaccatgatcatgccacttcactccagcctgggtcacagagtgagagttattttttttaagagcattaaaaagacagaaatcactctgtatcatagtttgctggactccaacttcatctagccrcatgaacactgcatcactttacagcaggcatagcaagtggacaatagccttgaagacttccagagcagtgattgctgctgtcctttgtcctctcgtcttctcttagaagtagcttttaccttgcagattgctgagaaaaaycttaattaatttgaataagtttgattggaaaattatttcagataatgtgtctaaacataactgaaactaataagtatcatagaataggaaaccttttcaatgtctcatctctttcccatcaaaaatttccagaatagcatcccagaggaataaactgttttattataataacatgtgtgttggatcagagatagtattatacagaaaccttgccacacaaagtcataaaaacttraatttgagttataggtccatttatttctctgagcgtggcaactattttaccyctctcggtcctagttccttgctggtgaaatagggattatatcaaaggatttctatgcagaataagcaaagtggcatttgcaaagggctcatggtaaatgcccaataaaaaatgctatcattattttattaacactatcactacatttgttatttatataacaaatgtcaatattatctgtggtaacatctacataatccaaaacaaaaatagccgttggtctatccacctgggaagtataagaaatctaatgaggcttttctttccattcaattccctttttattagtttttccaaagtaatttgtatttgtggtaatctatgaaaggatgtgctggatataggcaccaagggtaaatgatgtcaaatacagaaataggttcagaggaagctgagataagcagcattggttgtgctggccagatataatatagatacattcatggtgtgtgtaacaatagttttaatcagatggctgcaaaaatgtcgttctttcttgcaggagarcctggacttctcatttctcgagtgaatgcaaaamatcccttctttggctatgctgggccttataagcacacaaaagacaaattgctttgtgatgtttttaagaagggagatgtttaccttaatactggagacttaatagtccaggatcaggacaatttcctttatttttgggaccgtactggagacactttcaggtatgaaatgttatgggatccatagcttgttctgtaattgtgaaccatgcttctatagaaacatcagagaccacatatgctttagctttcagggcagacagagcccttttatctccatgtctcctcattaaaacatttattggccatctgtttctagactgaaccacaagttaaattttgatgtaaagttttatgattattttagtgaatcagtttagaacaaatcagtgagctcctttttaaggaaataaaactggcagacagatgtaaaatataaatggtagggttaaaacagaaagccaktttggtcaactgtagtctaattcttggcctaatgataaaaattttgaagcagcaaaaatcccctttctcacatttccttttttaattccctaagattattttaggcctatgaaattattttgctttactagtccaatgacttgaatgaataagtaacttcctacatccttgccttcttgtaccatgttataagctcactttatataaaattatttcaattaaaacaaaatattcattcaaaagcattaaaggagtcaaagggggttaacacctagaaatttaagtgggtcagagtcaaaggggttaacacctagaaactgaagtgggtcagtgtcctaaaagacaactagagctttgctttcaattcttaacaccagagaaaaggaatgtttcacacttcattgttattttacaaaataatatttttgtaatgataatccttgtagttattttatttttatgtatattataaaacatagaaggtaatttatacaatgagatataaagtrattttgactaaaagaccaatgctgattttgttgaaataccaacaaagtgctttcttagaaatgcctttcatcttgaaaactacaattatgttggtcagtaggtgcttgcacagtgccaaatgcaagacattaaaactaaaactgggtacctagtttttcaaatacaggtgcactaactggaatttgatttttttcatttagatggaaaggagaaaatgtcgcaaccactgaggttgctgatgttattggaatgttggatttcatacaggaagcaaacgtctatggtgtggctatatcaggtataaatatatttcagattttggaaagattcttagaatagaattgccactattctctagttttgcaacagtcttgctaattcaacattttaatttttgtgtattaagataaagattttattattgtcttggcaagtaatgccccttgaccaagctaacaaagttcatgatcacatcaggggaaaggtaccaactgaattttaatgcctgcgtgtattttttttttttttttagcaaagcttgaaaactctgatcaatgtctcactgcttggaattagttacagctttttattagtctattatttttctttttatgactggtgtttgtacataccactaaacaagaacatgttctattttaaatgtttaaaaatactgacttttagttaagatggctctttataaaaattatttttaaatttggactcattatccttatagttatgcatatgaggattgtctcatgatgttgaaaatgccacagaaaagtgaccaatttgaagtcataagacagccattctccattttttctgcaaatgcttttaggtgcaggagagatcagggatgtgagtgtgtggataggagagcagaagaagggaatgattacttaataaatagccactgagtgttgaagaaagattccaggacattctgacccctgtaaagatccacaggtggcatgataagcattaaatgatttttggaatcaattatggaaatacgagtttctagtttcttaacttaaaaaatawgcccttcatattttacattaaagcttaggatatgtatttctgctggaatatagttgcctttaaataaatgttttctttcttaatatttgttttagtgatggtaggatgcaaattcattgtaatttatagtgtttcccattccatgtatttcatttctgtagtataggcaattagagatagactctggccttccctgtccttaaatgatttctagggggtaaatcrtatgttcagggaaggatacagactagtttatgctcctgttgtcttattattactgaaatagatttaatgtctccatgtgtgccaattakcatgtacagaattatcttttaaagtttatttggtactyaaaaatgactctatttcaaactttttttcaggttatgaaggaagagcaggaatggcttctattattttaaaaccaaatacatctttagatttggaaaaagtttatgaacaagttgtaacatttctaccagcttatgcttgtccackatttttaagaattcaggtaattttagtggcggagtttactatcaaatataagacagtaaacaaggaagtagtttaattgcaaaataatattgtatcctttagatracatgtgagttatgtgagaggcgtggcgtgtagagttgatgcagatcratgccatgtttgaagcctaattataaagggggcatggtgaaatgctaggacgtacctgtctttgtcctaattatagaattgctctcttcctcttcagtcaggacctcagagcaaaatgatggtcccagtgacrgtggcaatccaaaaccacatcttacttttatcttgcgaagacatttggtgctatgtgcctagaattgggttccattaaggagacatcaaagagatggcaagatgtgtgcagaacctaaaggcatctggctttaggcaatcctgctttttaatttttattgctgttctgtccaaattccccctcacctggaccttccccatgtgagaaattctgagtttatttattttgagatgaggactttctcttgttagcttactggtataagtacagtaaaaagaaaacaaatttccttaactactgggtaactttacttactcatttattcaaccattcatgtatttaatattttgcctcaaatataatttcccaaaattattactcatcatctcttaacatccaaccacacagatttttttttctgaatacatttgttatttcactaatagactcctagaggagcaataacctgtgtcatattcaggtttcagtatttgccaagcaatcattgcagccaagtcactgcttattcaatgggacacatcctctgaactatcataatacctatttcatctctctttttgattttgagtttttacattgtctcagattattttaacaacaaccctctgaaacactaaaggtaagtaaatatgaaaaaagaagtaatatatttttattgaaattttattgagatagttgtagattgacacgcasttataagaaataataagagagaacttgtatatccttcaccttgtttcccccaaggataacattttgcagatctgttacaaccaggatgttaacataatctacccatcttattaaaaattctgctttacttacacttatatgtgtgcgtatattttctatacagttttatcacctgtgcaacttcatgcattcatgaccatagtaaagatatgaataatttcaaaatctttcccccatgttgtccttttacaaccatagcgagctccctcttgtccctcctcatcctcacccaaccccataagtaatatattttgatggagtagaaagttgacaggacaaataatattttaagagtttttttccaaggcaacataaaattcactttcattaaatagaaaaaatgttttagctcaagactactttagaagattagatcagccttgcacaaatttagaaagtattttaggatccttaagcacctaaaaagaacatggaccatgactgttatgtttattagagtattcactatagttagaaataaagcctgacagcagtcaaatatttgtttaataaatgaatgttagtaataaatgatctcataaaagaaatgcaaaagtaaaagttacttctgacaaaatgagtcaaacaagtattgtattacaaatctatttagcacaaattaaaaaatggaagaagcctttttgccaataattcacaaaaatataatattcagtgtggctgggataaaacgaacttggtcctttcattctgctcatggaaccataaattgttataacctctctagaaaacaatttggtaatatatgatcagactcttaacagtttgcatatattttgacttagtcaaaatgcatcttaggaagtaatcaaagatgtataaagattttaatattctaaaacacattttttatttctagtgttaaaaattttgatattctctaaaagttcatgaataagggcaaagttaattaaaatatgataattaaatgagaccttataaaacaattttctaagttnaattttgaagaaaattacaggacccaggaaaatatactttgtataatattaagcttaaaaatggcagaacnctaaattgtataaatacagtgagctgctaatttttaagaaaagagtaaaaggatatgtttncttgcacagccatatctggctgtgatgacagtgttggatcaggggagatggaggagggaagggagatcagggaagggggttcaaagtgaagttgactcaaatagtccaaaaggataaataaaaatggccaagctactcatagaatgttgtagggtctctacatgtcatctcacttaaacagactgtttatccatgcctgaaattcccacaaagggatacactcttatctcctttaaacaccttgaaacagagattcttaaactttctagactcatggcatctttaatgtctcatagcactcttgggtcaaaacaaatacctaaacatttgtttattcactagttaaggaaaaacagattgrtaagtatttaggtctaacaaatgagtagccacctgaaaaataatccatataaataagtaaatgctttcatttcrttttcaaataaccacaatcagtcactaaggagatgtaagttgggccacagttcttcagaccttggaattagattggactggacagggagagcctgatttcatgttccatgatgatttttggctgtacttgctttttatcccagcaactaccaaaaacccaattttgcaaagataatgacatcattgaatgtattacaaattactattgaaactgtgaaccttgagctagtagtttgtgactggtgactaacagatgtcactgagtttctcttgaaaacaagatatcctgtgaggaccttggaaattcactgaggtacctcaagttttagaccattcaagtaacccctctgggtatatttaagccatgttttagaacattctgcaccccgtctggctcttatagtattctgctttttatgatagatttgtgtgtacctgtagtagaaattgctgtcttttgtggcttttatctccttagcatcttatggcattctctatacataatgttatattggcrttgaattgaagagataacctatgtattttagacataattataatcagtttattatgttcataattcttatatattgaatgagtttatatttaagtaaagtttacaggtaaatcaaactaaagattttaatattctaaaatacattttttatttctagtgttaaattattagaaaatacagagatcactagatataaagtgtcataatttaatattacagtctatagtattaactatatatgtatatattatagttattaaatgattctactcatcctggtaattgctttacaggaaaaaatggaagcaacaggaacattcaaactattgaagcatcagttggtggaagatggatttaatccactgaaaatttctgaaccactttacttcatggataacttgaaaaagtcttatgttctactgaccagggaactttatgatcaaataatgttaggggaaataaaactttaagatttttatatctagaactttcatatgctttcttaggaagagtgagaggggggtatatgattctttatgaaatggggaaagggagctaacattaattatgcatgtactatatttccttaatatgagagataattttttaattgcataagaattttaatttcttttaattgatataaacaktagttgattattctttttatctatttggagattcagtgcataactaagtattttccttaatactaaagattttaaataataaatagtggctagcggtttggacaatcactaaaaatgtactttctaataagtaaaatttctaattttgaataaaagattaaattttactgaaatattttatttttatgtatcctgtcttataacccaataacataattttcattaaaaatgtgttttcagtatagtttgaagtcaggtagcatgaaacctccagctttgttctttttgcttaggattgtcttggttatgcgggctcttttttggttccatatgaagtttaaagtagatttttccaattctgtgaagaaagtcattggtagcttgatggggatagcattgaatctataaattactatgggcaatatggacattttcatgatattgattctttctatccatgagcatggaatgtttttccatttatttgtgtcctatttttttccttgcgcagtggtttgtagttctccttgaagaggtccttcaaatcccttgtaagttgtattcttaggtattttattctatttgtaccaattgtgaatgaaagttcactgctgatttggctctctgtttgttattggtgtataggaatgcttgtgatttttgcacattgattttttgtcctgagactgctgaagttgcttatcagcttaaggagattttgggctaagacagtggggttttctaaatatacaatcatgtcatctgcaaacagagacaatttgacttcctcttttcctatctgaataccctttattcctttctgttgcctgattgccctggccaaaacttccaatactatgttgaataggagtggtgagagagggcatccttgccttgtgccggttttcgaagggaatgcttccagtttttgcccattcagtatgatattgactgtgggtttgtcataaatatctcttattattgtgagatatgttccatcaatacctagtttattgagagtttttagcatgaaggctgttgaattttgttgaaggccttttctgcatctattgagataatcatgtgggttttgtcattggttctgtttatgtgatggattacgtttattgatttgtgtatgttgaaccagccttgcatcccaggtatgaagccaacttgatcatggtgaataagctttttgatgtgttgctggattcagtttgccagcattttattgaggatttttccattgatgttcatcagggatattggcctgaaattttatttttttgttgtgtctctgccaggttttggtatcaggatgatgctggccccataaaatgagttaggaaggactccgtctttttctattgtttggaatagtttcagaaggaatggtaccagctcctctcttacctccgataaaatttggctgtgaatccatctggtcctggactttttttggtaggtaggctattaattactccttcaatttcagaacctgttattggtctattcagagattggacttcttcctggtttaggcttgggagggtgtatgtgtcaaggaatttatccatttcttctagattttctagtttatttgcatagaggtgtttatagtatgttggtagtttgtatttctgtgggatcagtgatgatatcccctttatcagtttttattgtgtctatttgattcttctccctttaattcttcattagtctggcttgcagtctattttgttgattttttcaaaaagccagctcctgtattcattgattttttgaagggtttttcgtgtctctatctccttcagttctgctttgaacttagttatttcttgcttctgctagcttttgaatttatttgctcttcaaactatactacaaggctatagtaaccaaaacagcatagtactggtaccaaaacagatatatagaccaatggaagagagcagaggcctcagaaataacaccacacatctacaaacatctgacctttggcaaacctgacacaaacaagcaatggggaaaagattctctatttaataaatgttgttgtgaaaactggctagctatatgcataaaactgaaactggaccccgtccttacaccttatacaaaaattaagtcaagatggattaaagatttaaacataagacctaaaacaataaaaatcctagaggaatacctaggcaataccattcaggacataggcatggacaaagaattcgtatctaaaacaccaaaagaaatggcaacaaaagccaaaaattgacacatgggatctaattaaactaaagcgtttctgtgcagcgaaagaaactatcatcggagtgaacaggcaatctacagaatgggagaaaagttttgcagtctatccgtctgacaaaaggctactaaataataataatctacaaagaacttaaacaaatttacaatacaaaaacaacaccatcaaaaagtgggtgaaggatatgaagagacacttctcaaaagaagagatttatgcagccaacaaacatatgaaaaaaagctcatcatcactggtcattagagaaatgcatatcaaaaccacaatgagataccatctcacaccagttagaatggcgatcattaaaaagtcaggaaacaacaggtgctggagaggatgtggagaaataggaacacttttgcactgttggtgggactgtaaactagttcaaccattgtggaagtcagtgggcgattcctcagggaactagaactagaaataccatttgacccagccatcccattactgggtatatacccaaaggattataaataattctgctataaagacacaagcacacgtatgtttattgtggcactattcacaatagcaagacttggaaccaacccaattgtccatcagtgatagactggataaagaaaatgtggcacatatacaccatggaatactatgcagccataaaaaatgatgagttcatgtccttttcagggacatggatgaaactggaaaccatcattctcagcaaactaacacaagaacagaaaactaaacacctcatgttctcactcatgagtgggaggtgaacaatgagaatacatggacacagggaggggaacatcacacactggggcctgtcgcgtggtgggggactaggggagggatagcattaggagaaatacctaatgtaggtgatgggctaatgagtgttgcaaaccaccatggcacgtgtatacccatgtaacaaaactgcacgttgttcacatgtaccccataacttaaagtataataataaaaaaatgtgttttcagtttttgttttggtgtttttaattgtatacttccaatcaaagaaagccgactgactaaatgcaggcagtgatatcttctttatcttaaactcacattaagatgatagaaatataaaaatatgaaacagcagatcaggaaaactggtaagctcagagcacttaggaatttttggaagatatataaaagggataacctgatgataaaatccaacagatatgtctaaaccactcatcatactgggaaaaagtagactagaatagaaccataggattttcatcaagattaaaaacaaaaagggctacaggtttggacagttttgtgagtagttaatggggaaatttattataaggataatctaatgagcacaattgtacttatctcaagttggaagcaccaggctccagtatttccttcaagctagaaccacagaaatgactcttaataagatgaggtatcttctataggagggcattgcggagctggactgagagggggaagactgcccagcaagaagcccctgtgcccataaacccagttccatgtacaaccaaatggaaagttttccttgcttcatgcagtctctcacatgctaaagagattgctttggttggaactgaagttgtagagagtttaattttgtaaatgctcagaaatcatgttataaagttaaaacattttttaaaacgtaaaggttaaccacaaatagcatagaaataaaatgtcaaattttatgagaaatataattttgtaaaaaggaattttgaaagagaaacaaaaaaatagtaaatagaaaaaatacatgtaagcatactcatatcccaatatataaatgagaatggattaatttcctttattaaaacataaatgaatcaatagacttttttatatctgtgatttggctggttttttgcctttccaactaaaaatgattttgcctttacatagttttaatttgtaagtgttctttaagtactatgaatctgagtgaacacatttcttatttcctactctttaaaaactttggagatttgatcatgacagcgaagtaggcatacatatatcacccccttggatatatgggtaaactcctcctcctgccaaatccattgcaatgaaagacaaaatgttatagagagaacaatccatttgaaaatggagggttagggctaggtacggtggctcatctgtaaacccaggccttagggaggtcaaatggaatcgcatgagcccaggagcttaagaccagcttgggtaacatagtgagacccctgtttttactaaataaataaataaagctgagcatggttgcaagtgcctgtaggaccagctactcaggaggctgtccccaggaggtcaatgccgtggtgatctatgtttgtaccactgaaccccagcctgggtgacagagcgagactctcttaaaaaaattactaaaaaatataaaacaggtgagattagattagcaaagaaaccatgagggaagagtggggaaacaaaacatcaaacttatgcacagtgaaaaactacttcaaaggaaaaagaactccaaccacacagtaaacacatataaaaacaaagatggggcatctgtgtaattacagagtatcccaattattaattatcaggatacttaattgtagaaaattgagaccgtgaattttcttgcctttttcttacttatagaaaacttccagcatcagacaaaataattcatgacataaaaataataagtcgttaatttaaaaacttatttaagacaagmcaataaagattaaagtttttaaagagctagaaactagggagaatagttgtcacatttatagtatataaagaacacttacaaatataaaggcaaaataattttaatgagaaaaatgtgagaacaggcaatgtggggaaattttagcttaccagtacttctactgaggttataaataagtacagtcattctggaaagcaatatggcagtacttattaaaatgttaaaggtatatagcattcaacatggcattctacttctagaggacatggaatacctttaatacattatagacatgtgcacaaagagtcttaatgaatctttatctcttttaataaaaaaaatttgtacttatacatcaaaagaaagaataaatgtcaatatagtcatatggtagaatattatgtgatcataaaataataaggtgggctaacatatactgattcataaagccatactataaatttaaaaattcatattgctgaacaattcatacaataagataaattcatgtaaacattctacaaaactattttatatatatgcatgtataaatacatggaaaagtatctgaaaaatattatactaataacagtgtttatctctagtgaagaaagttgtatttaggcattgagaaatgtggagagttgtaaagaaatggaaggaagatgaaggaaataaattttaagttattcaggtgatataaatacttttaatataaaaatacttctaaagtatatgatgtaagagtttaaattctttttcatttaaacttggtgaaatagtgaaaactaaatatttgttgtttaagccacccagtctatggtattttgttacagaagcccaaacttacgaagatactcagcagacctaaaattgaaaaagtgcaaagaaaaccatacctaaggcattaaaatcaaactgctggcaaataaagaataaaacaaattcttgaaaggggtcagaaaaaaagtacataatggaataacaatttgaagtatgtctgacttctcatcaaaggtaggatggacagaagaaaacagaacaatatctttaagatcctagataaacaaaaaactgtcaaagcagaattctacgggcaatgaaa

SEQ ID NO: 95372 - DNA, 23848 bp, Homo sapiens
ggggttttccccagagccttcacagcactgtccactcacaccccagacgccaacctctcccgcaaacctcatgataaccagacagtggagattccccacccagccactgcatttgcgtcaatcattctttgtggtgggggctgccctacacactgtctgatgttgaaccgcatccctggcctataaacccactagatgccagcagcacacccccccccccccggcaggggcaaccaaaaatgtccccagacattccccaagtgtccccggaggtaggactgtacccagttgcgaatcacagcagtatagttgtgcccacttgtcactccttatcagaggaggacactgaggctcagaggtaaagacctttgcccagagtctcatggctgagacaggggtggtgctaagtgtgaaatttcactctctactagaccgtgtctgctcacccttacctaccctctccctttgctcgatttagaaaccacgaactggacacagtcaaagccctcagagaagacgcacaggtctctaagaactgagaccttcgccaaggaggcagcacatgagaaggctggagggacatgaccacaaccacacacagatcacaacctaagacacgtcacctctgccggctcggctggtcctcaccccacctaatgtgcaagcaggcccagtcccacctcccggccccacctcatgcggcccagagggttctctaggggaaggcagtagcggctgagaggactgaggagcaaatgcagacacgaggaacatgaaagtggctggaaggcggcacaggggtggtagccagaccactttgcagcttgtgtgaaggaaggactagggtgcctcagttgccttgtgtgtcaaatgatgataacaggcaggacctgctagccacgggcttaaatgagttcgagtgtgtacaagtgctgagagcaacctaggaggagaaacgaggggcacggaggatctgaggacgcagagtggcatgaacactgactcatgttttccagccccggtggctcaccaccatcccaaaagcaatatgccccaccaagcctgatgggatccctctctccacacaggctctggcaatgacactgatgaaatctagggtcagacaatgttgggccaaccccaaactctctccaaacccccrggcctccaggcagactccttcaatagaccctgtaaggctgaccaaaactcacatctcctcaaagcccagctcaagaacctgctggggctccctgctgcccggccaggaggccagattttttaaataccctagatgcaggccaaggggttctgaacttccatctgggggtgatgggcagatccaggagacccagagacagggcttcactctcttgtgaatggtactagagtctctgtctccacagtagggtcatccccccactccttccctcatgaagacaaaatgtttagagcactcagaagaagactggtacatactcaagaaaagctgtgaatgtgctgtcccctgagcctagaacactgacccctccctgcgccccagcaccacccaccccttagctaatattattattcagatcttagctctccgggaacacttccggccacccatcgaaacctccccatcccctcatggctcatgatgacttcactttgctacaccatctttgtaaacacagaggtatgtgaaattatcttgatcctttgcttgtgaaagtttggtcgcttgagagctagctgctctggatctgttactccgggatgcttccccagcccccagcggggagtcagcacccagcagtgaaataaaactgtctcaacgggctgcctacttgttgcacttgcccccacagagtctgtgcatgctaagttctcaccgaaaagcagttattactggtgccttctcctctacctctaggcacaaaccggagctgcctgaggcactgcctgtcccccactcaccagggccaactcccaacagtctcagctaagtgactggatggtaccaccaatcccctatccctggtatccaacccagcttaggtccaggaggacccagtctgtgctgaagcagacctgcagcaatcctggcccaaccagccaggaaggatggttcagtctctttgcgggactgctggcccagttcctactcctcctagaaccaagtggctagccagacaggcaagaagggcagggcccaggttggagggtgtcctgggaactatagggagactggggagaattagggtgacaacccatcattaaacccagaactggctgacaccacttgacccagcagtttgtggctcctgcctcaggtgctgaagatcccaaatcaaagtcccaaggacaccctggtaacagccttgcaattagcccagaaaggaacaaaagctgctgccatccgactgggggccaaagtggggcaaaaacagtctaggcaagcaaagtcaagtccagccctggtggtgccaggcctcctcagcttcccacggtcagcccacagttccatgactcctgacctcttggctcccaggagggaaatggggaagaaggggtgaccaggcctccgagaaagatacctccactgttccattccccggggacaccatggaaactcagtctgtcccaaaggggattgacccatcccccggggtgagcagaagggaaggcctggacggaggagaacgcccgccagggaatccagaacgaggagctccttcagtcaccctcctggaaggccacttgagtgactatgggtttgggctgagggtcagacaatcccagttcagccactgtctgctcatgtgatctgagacaagccacaccaccccgagcctcagcttcctcgtctggaccccagagaaggcctaagttgaactggtggtggtgagccatcaatgagctcatccgaccagcgagctcggcacagggcctggcccaggacgagtgtcccagaggtagatccctgggccagggtgtgagtgcctgatttgatccccttaactcttctctgtgccctgccttcaccccgtcgggagcctccaaaccaccatcaacagagttttacatgctcattccctctaattcttcacccccagggagatggcacacagaactcaggctcaaggagttggtgcctgggaggccatggtactaatatatacgatggttgctgtgaggtcccatccactaggcttgaaccaccagcttctggccacaaaaggtagagaaagaatgcaggatcctaaaatacccaggtaacgtctgctgggctgcctccctgtagatatataaggtgggggtgggcaagggccaccttgtgataaacaagatgcctaagctaggtgttccagactgtctccagctgcccacacaaacacccactggccagtgcctttgaacagttggcagaggcttgcccaaggggtagggtcaggactctagaggcttcagggatgaggtgtgagaaagacggaaccccttaacacttgagttgggggcggtggggggcgcatcttagtatataccttctggtcacaccagcttttcctgacctgcccccacatcccccctagcctagcccaaaaggctctgctctctcgactcccaaaactcctacagcagtccctcaccttacctgatcgcccccacatctagcctccccctccccacatctgagtcctgacctcatgtgacccccggaaaacatctctgggatctcctatccgcccccacacgaagtaactccgcccacacccgccgtgccccacttcctgggcttctcctcagccgcccccaggcctgtaacttgacccacccacctcctccagcgcccaggcggtacctgcaggcccggcccctccccgcccccctccggccgcgccgctctcctctcctcccccactcggcctggccggagcccgactcctcctccccctccccctccccctccggcatccacgagaacctcctcacttttccgcctcggaccctccaacttccccggatccccggtacctgccccggcccgacctggccccctccctcgctgggagacgggggagcggtccaggtacgatcctgccgcccccaagccctgaagctcgggctggacgctcaaggccgcccgcggtagctgggcctccacacactcgcctgcccgggcacagtgcaggctgcgggcccggctcctcctcggtccgagaaagcacccaggccctccccactcagccctcgggccgccccggctggaggaggccggaaccgggcctgaggcgggccgcctcacctgcgccgtggccgcgctccggggggtcccggcgggctccgcagcggcggctggggccgggcctgggcccggggcgcgccccgctgcgccggggcctcggcctccgcctccgcggcctccgcggcctccgcctcagcagcagcggcagccgcggcggccattcattgtgggccaggccgccccagccgagcgccgagcgagcgcaagccgcgctgccgccgcagccaggccagggaggagcggccccggccccgcccgcgcaccgccctcgggccccgccctccaggcgaggccagccgagctccgagcgcgccccttctaaccggctccgtctcctctctatgcccctgggggatcctcgccagtacgtcggctcagctcgatggttcgaatcctggccccgccaccttctagtcccgcgaccttgggcaagtcgctctacctttccgaactttagtttcctgtaaaacaaaaacaataatgactgctgtttattgtggcaggcactgcgttacattctttatgggaattagctcgtttaaactacacagtaacattttttagtgagaactgttacagacacactatagaaaataaaggcagctgggcgcggtgtctcacgcctgtaatcccagcactttgggagaccgaggtgggtggatcgcctgaggtcaggagttcgaaaccagcctggccaatatggtgaaactctgtctctactaaaaatacaaaaattagccgggcgtgatggcatgcgcttgtaatcccagctactcgggagactgaggcagaagaatcgcttgcacccgggaggcggtggttgcagtgagccgagatcatgccactgcactccagcctgggcgagactccgtctcaaaaaaaaaaaaaaaaagaaagaaagaaagaaaaggaggcacagagaaatgaagaaagctggtcaagatcatcacacagcaaggaagtgatggtaggtgccaggatttaaacacaggctcaaaagcgacaataagacctaagacttttatgatgcttaccggatgctaggttctgttagcattttacctgcactaactcgtttacttctcactacaacccagtaacaaatggtaaaaaaaagttctgcccattttgcaaaagcggtaacttaagttcagagttaacaagtcgcagggcgagctgagactggaacccaggtagccgggaccacttcgctgtcctgccttcatacactggttagaactttaccgagcgcttacaatgttagagtggttctttgcacactttccaggaatctgtcatttaatctttgctctatctgagaaaccacgattctcatttaataggtaagaaaagtgaagccgcgggagtaacctgcccagagcatgtgatgggactgagattcaaacccggtaaatccaactccagagcctgagtcattcctgcagggtgctctgaaataatgtgtatatagcacccagaacacagaagaggaccaataagtgttgggtttctccgcttaccgccccttttctgagccacaacttcctcatctgtgaaatgggactagggacgtgtcctctcccaggggatccactgtgattaacacccccggaacagcacgatcagcgcgcttcctttatggctttcattttgatcccggccgcccaccgtacgtttcctcattgactggccaaccactatcatgtgattcgcccacccactgtgccaacatggcggcrcccaggtcctaattcgggaaacgtgcaccttgactaattcggttttctgtggctacgagagcaggtgaggacgggctaggcagcgcggggagggattcggactcggggcgggcctgcacgagggcatcggctccacagggaccagtcatccccaaaacgaggggatatcagcttacygaggccgcaggttttcctagtccctacctcatagatatgtaggacatccccgggcccggaatgcggctctctgaccctctctgtgccctcccccgccccccgaaccaggcttggcgggcggaggcgccagcggatgtctcatgcaaggatcgtctctgtggctaagcctcactttccgctccgcccgggtgctctctagagcccggtttttcgagtggcagtctccagggctgccgaatacagcagcgatggagaacggcaccgggccctacggagaagaacgtccacgtgaagtccaggagacgacagtcaccgagggggctgccaaaatcgcctttcccagtgccaacgaggtcttttataacccggtgcaggaattcaatcgggacctgacgtgagcaggggtcagacgttagcctggcatcgrctagtgggtcagtgtggatggcggggkcggggtatgagctagtcctctgtctcccaccagatgtgctgtgatcaccgagtttgctcgcattcagcttggggccaaaggaatccagagtgagtggaggtccaggcttctggtgggcgggggtcacacaagtttatctccctgcctgggctcttctgccgcccaaatccagaggggcttcagccacatagcaggccctgggttctgctccttcagcctttccgcagggatttcagggacgatattttggagattaaggggaggtttctcagaggggaccttgttattctctgacttgtgcctctgggtggctgcagtcaaggttccaggagagaaggacacgcaaaaagtggtcgtggacttgtcagagcaagaggaggaaaaggttgaactgaaagagagtgaaaacctggcctcaggagaccaacctcgcacagcggccgtgggggagatctgtgaggtggggcctgagcataggagctggcagccctggaatttagcrggagacagagggctcctggagggggagagctataggaggtgggtggtgggggctccttggggcccagaagaggatggaggtggagatgtgagggaggttttctgcttactccaacaggaaggcctgcatgtgctggaaggcctggcagcttcaggcctacgttccattcgatttgccctagaggtgcctgggctcagatctgtggttgcaaacgatgcctccacccgggctgtggatctcatacgccggaatgtccagctcaatgacgtggcccacctggtacagccgagccaagcagatgcccggtaggttctgggcatcacagcctagctctgggacaagcctgcctggggtcaaattctggctctgtcacattctcactctgtgaccttgagtgagtgacttagcctctttgagccccagtttccttgtctgtcaactgagaaaattagttttacaggggttgctgtgatgagtaatagataattatggtatgatccatactctgtgccagaaataagtagcatcctggtctctgttttaacttcttacactccttttattcattcaaatgagccatagtatatccagtgtctgctatgtgtcaggcaccgttttcaagaactggaaatgcatcaggaaacaaaacatgcaaaattggtgaccttcgcaagagttggcaaactatagcctgtggggctcacagcctttttttgtttgtttgcttgtttgtttgttttttgagatgtagtctcgcccttgttgcccaggctggagtgcagtggcacgatctcagctcattgcaacctccgcctcccgggttcaagccattcccctgcctcagcctcccgagtagctgggattacaggcacgtgccaccacgcctggctaatttttatttttatttattttttttttttttgacacggagtctcgctctgttgcccaggctagagtgcactagcgtgatcttggctcactgcaacctccgcctcccaggttcaagtgattctcctgccttagcctcccgactgagtagctgggactacagacatctgctaccacacccacctgtatttatagtagagatggggtttcaccatggtggccaggatggtctcgatttcctgacctcgtgatctgcccgcctcggcctcccaaagtggtgggattataggcatgagccactgcacctggctatgccaggctaatttttatatttttagtagagacagggttttgccatgttggccaggctagtctcaaactcctgacctcaagtgatctgcccacctcggccttccaaagtgctgggattacagacgtgagccactgcgcccggcctagcctagtttatcaatggcccacaacccaagaatgttttttacatttttaaaggttaaaaaagaagactatgcagtagggaccacatatgactcacaaagcctaaaataccttctgaccttttacagagaaaaaagtttttacttttctgaccttactagaatccaaatagtaatcacagacaatgaaaagtaattagctgggcatggtgactcatgcctgtaatcaagcattttgagaggccaaggcaggaggatcgcttgaggccaggatttcaagaccagcctaggcaacacagtgaaacccgtctctacaaaaattttaaaatgaggtcagacgcagtggctcacccctgtaatcccagcactttggaaggccgaggtgggcggatcacttgaggtcaggagctcgagaccagcctggccaacatggtaaaacctcgtctctactaaaaatataaaaattagccaggcatggtggcacgtgcctgtaatcccagctacttgggaagctgaggcaggagaatcgcttgaacccaggaggtggaagttgcagtgcgccgagaacccaccactgcactccagcctgggtgacacagcgagactctgtctccaaagaaaggaaaaaaaaaatgtgttaatacatctataaactgcttgaaatggtgtcaggcagatacgtcttatatcagtattgttgttgttttagatgtgtggactgagttccacatggtgcttttcctaagtaggaaaattgtgcagtttaataaatgaccaaggccagtgcagtggctcacacttgtaatctcagcactttgggaggccgaggtggatggatcacttgaggtcaggagtttgagaccagcctggccaacatgttgaaaccccatctctactaaaaatacaaaaattagctgggcgtggtggcacatgtctgtagtcccagctactctactcgggaggctgaggcgcgagaattgcttgaactggggaagcggaggttgcagggagccgagatcacaacactgcactccagctggctgacagagcaagactccgactcaaaaataaaataaataaataaataaatgactgagccaggacttgaacttgggaatctggccccggagttcagacccaaaccactgtgctgtacgagttaatatgtgtaggggacagagaaggtacctggcgtgggaggctgaggacctggccctctttgcacccaggatgctgatgtaccagcaccagagggtgtcggagaggtttgacgtcatcgatctggacccctatggcagcccagccaccttcctggatgcagctgtgcaggctgtgagtgaaggaggtgaggtggggatggcactggggtgggagcagggcttggggtgttggagggttctcactgcccagcccctctctgcagggttgctgtgtgtgacctgcacagacatggcggtgttggcggggaacagcggggagacgtgctacagcaagtacggggccatggccctcaagagccgggcctgccacgagatggtgaggggccctctgccagccagccagggagaccgggggacaggtggttgtctgagtcccttcccaatacactttccccctcctcagacctgctcagcttcctccaggctgatggccagatgcatcccaggctgttaacgacaggcgtgtcttcaacccacatagttcctaagagcatggctgataatcatggtcatttggggacagtggctttggccaggacaggagtgcatggccacattattttagttttctgtattaaaacaacttttcaaaaaaaaawtttttttttaaaggtcgtttttccaggactgggtttaaatcctagctttgctggtagctctgggcaagtgacttcacctttctggtcctcgggtttttttgcatctgtaaaatgggcacaatgatggtctgaaggccgggcgcagtggctcacacctgtaatcccagcactttgggaggcctaggcaggtggatcacctgaggtcaggactttgagaccagctggccaacatggtaaaaccccatctctactaaaaatacaaaaattagccaggcatggtggcagatacctgtaatcccggctactcaggaggctgaggcaggagaatcacttgaacccaggaggcgaggttgcagtgagccaagatcactccgctgcacgccagcctgggagggagaccccatctcaaaaagaaaaaaaataggccgggcgtggtagctcacgcctgtaatcccagcactttgggaagtcgaggtgggcggatcatgaggtcaggagattgagaccatcctggctaacatggtgaaatctgatctccactaaacatacaaaaacttagccaggcatggtagcgggcacctgtagtcccagctgttcgggaggcggaggcaggagaatggcgtgaacccaggaggtggagcttgcagtgagctgagactgtgccactgcactccagcctgggcgacagagcaagactctgtctcaaaaaaaagaaaaaaaaataggccgggcgcggtggctcacgcctgtaatcccagcactctgggaggccgaggtgggcggtgttcaagaggtcaggtgttcaagagcaccctggccaacatggtgaaaccccgtctctactaaaaatacaaaaaaaaaaaaaaaaaaattagctgggcgtggtggtgggtgcttgtaatcccagctattcgggaggctgaggcaggagaatcacttgaacccgggaggtggaggttgcggtgagccgagatggcaccattgcactccagcctgggcaacaagagcaaaactctgtctcaaaaaaaaaaaaaaaaaatggtctgaccctattgagtgtctgatcaggattcaagaaggctgagtggcgaagtgcagcggctcatgcctgtaatcctagcactttcggaggccaaggtgggaggatcacttgaggtcaggaacctgggcaacatagcgaggaccccatctctacaaaaaaaccctaaaaattacctaggtgtggtggtggatgcctgtggtcccagctactctggaggctgaggcaggaggatcacttgagcctaggagttcaaagttattgtgagctttgatagtgccactgcactccagcgtggtccacagagggctcttgcccttgttcctaaagggtcctgtcatgaagtcagcccgggaaaygctgtctcctttcccatatcagagtctcacactagcaggaaagccctagccgttttgcttttttttcttttttgagatggagtttcactcttgttgcccaggctggagtgcagtggtgagatctcagctaactgcaaccttcgcctcccaggttcaagtgattctcctgcctcggcctccctagtagctgggattacaggcgcccgccaccacacccagctaattttttgtatttttagtagagacggggatttcatcatgttagccaggctggtctcaaactcctgaccagcctcccaaagtgctgggattacaggcatgagccaccacgcccggcccaggccccagcagttctacagcacctagtatccccacttcctgcccacagagcccttgggggctggaacgtgggtcctcagtacatgccacatggcacaccgataatgctggtcagaataggttggatctatgctttcctcactcgtttagtgcccccagcagtgccacagacagggactgttgtgattttgcagatgaagaaactgaggcacagagaggggatactcacttgttgagggtcccacagccaggactttcaggggtgggcttggatcccagggagctggccctgagcctgtacttgtgagtaccacatagggctcctggtggggtgggtggatagtggaggggaggctgacacccaccccccacccccaggccctgagaatcgtcctgcacagcctggacctccgcgccaactgctaccagcgcttcgtggtgccgctgctcagcatcagcgctgacttctacgtgcgtgtttttgtccgtgtcttcaccggccaggccaaggtcaaggcctcagccaggtcagcccgggggcagagagcggtggtggattgagagaggagacaggaccttgccctgggggatctggggcttcttaagggacagagccagtctaagggaggagttggggtgtcgtggtcacgctgggaactcgtggccactggtaccccccacagcaagcaggcgctggtgttccagtgtgtgggctgcggggccttccaccttcagcgtctcggcaaagcgtcaggagtccccagcggccggtgagcagggaggaaggagaagaagsggagtcccagggttttcctccctcccyaccaaccacccctctctgtttagggccaagttctctgcagcctgtggtccccctgtgacccccgagtgtgaacactgtgggcaacgacaccaggtagggctaggccaggggaggcaaaggagcaagaggktcttgaaggtcatagtccctgctcacctgtccccggtgcgcccccagcttggtggccccatgtgggcagagcccatccatgacctggattttgtgggccgtgtcctggaggctgtgagcgctaaccccggccgcttccacacctcggagcggatccgaggggtcctgagcgtcatcactgaggtgagagccgggctgtgacggggaagggggctccacctgtgcccgtccatctccactcatgcccatcctgtcccccatcgcaggagctcccggacgtgcctctgtactacaccctggaccagctgagcagcaccatccactgcaacacaccaagcctcctgcagttgcggtaagagcccctggggtcgggaggagcctgtcccagaccacagggtggcctggggcaagtccagggattctcatgcatagaacttgcgagggggtggggagaacccggtgcactgtctcattcctgtaatcccagtaccttgggaggctgaggcaggaagatcacttgaggccaacctgggcaacgtagtaagaccctatctctaacaaataaataaataaatatatatgtacacacacatacatatacacacacatacatacgtatgtatacacacacacacacacacacacacccattagcctggcatggtgatacatgcctatagtcctaactactcaggaggctgaggtgggaggatcatttgggccaggagtttgatgctaaagtgagctatgatcatgccactccagcctgggtgacaaaatgagaccctgtctctttaaaaaaaaaaaaaaaaaaaaaaaattaggccaggcttattggctcatgcctatattcccagcactttgggaggctgaggtgggcagatcacttgaggtcaggagttcaagaccagcgtggtcaaaatggttaaaccctgtctctactaaaaatacaaaaattagctgggtgtggtggcacatgcctgtagtcccagctacttgggaggctgaggcacgagaatcactggaacctgggaggaggaggaggcggtggtgagccaagattgcgccactgcacatcaacctgggcaacagagcgagactccatttaaaatataataataataattagaaaaagaaaaaggccaggtgtggtggctcatgcctgtaatcccagcactttgggaggctgaggcgggcgaatcacttgaggccaggagttcgagaccagcccggtcaacgtggcgaaaccccatctctactaaaaataccaaaatattagccaggcgtcatggcacatccctgtaatctcagctactcaggaggctgagacaggagaattggttgaacctgagaggcagaggctgcagtgagccaagattgcatcattgcacaccagcctgagcgacagagtgagactccacctcaaaaaaataataaataagaaggccaggcacggtggctcactcctgtaatcccagcactttgggaggctgaggcgggcggatcacaaggttaagagatcgagaccatcctggccaacatggtgaaaccctgtctctactaaaaatacaaaaattagctgggcgtggtggcacatgcctatagtcccagctattcgggaggctgaggcaggagaatcgcttaaacccaggaggcggaggctgtggtgagccaagattgcgccattgcactccagcctgagcgacagagcgagactccatctcaaaaaaaaaaaaaaaaaaaaaagaaaagaaaagaaatgaactctgtagccatgagcccttgccgaaggtagtcttacctacgctggtcagcttgggctttggggtcaaggagtccggcatctccctcataatccctgctgttccccaggtcggccctcctccacgctgacttccgggtctcactctcccacgcctgtaagaacgctgtgaagacggatgcccctgcctctgccctctgggacatcatgcgttgctgggtgagggcagggctgacctcatgcaggtgggagggcaggtggtggtcacctggaggtcccttgggcctagtattccctaacctctgacctctgcccccaggaraaggaatgtccggtgaaacgggagcgactatcagagactagcccagcgttccgcattctcagtgtggagcccaggtaggggcaagcacatgcaggagcggccagggctgcccacagacatggaagcacatgtgtgtgcagacaacacagatgctgccccacacagactcgtgcccattcttcaagtgagattcaaaatctgctgactggggctgggtaggtggctcacgcctgtaatcccagcactttgggaggctgaggcaggtggatcacctgaggtcaggagttcaagaccagcctggccaacatggtggaaccccatctctactaaaaatacaaaaattagctgggcatggtgtggtggtgggtgcctgtaatcccagctactcaggaggctgagacaggagaatcgcttgaacctgggaggcagaggttgcggtgagtctagatcgcgccattgcactccagcctgggcgacagagcgagactccatctcaaaaagaataaaaaaatagctgggtgcggtggctcatgcctgtagtcccagcactttgggaggccgaggcaggcggatcacgagatcaggagattgagaccatcctggctaacacagtgaaaccctgtctctactaaaaatacaaaaaaaaaaaaaaaaaaattagccgggcgtggtggcaggtgcctgtagtcccagctactcgggaggctgagacaggagaatggcgtgaaccccggggggcagagcttgcagtgagccaagatcgcaccactgcactccagcctgggtgacagagtaagactccgtctcaaataaataaataaataaataaataaaaataaaaataactaaatctgctgactgggctgggcgtagtggctcacacctgtaatcccagcactttgggaggccaagacaggcagatcacctgaggtcaggagttcaagaccagcctggccaacatgacgaaaccctgtctctactaaaaatacaaaaaaaaaaaaaaaattagccaggtgtggtggcacatgcctgtagtcccagctactcgggaggctgaggcaggtgaatcgcttgaacctgaggcagagtttgtagtgagccgagatcgcaccactgcactccagcctgggcgacagagtgagactccatcccaaaagaaaagaaaattagcattaccagcataccaggggtaactttttgtccattttgttcactgtctattcccagcactgagaacaatgcaggcacacagtcgttaaataaaaatgtttattaaggccaggcatggtggctcattcctataatcccagtgctttgggggccaaggcgggaagatcgcttgagcccaggaatttgaaaccagcctgggcaacacagtaattaagactccatctctaccagaaaactaaaaaaattagctgggcatggtggtacctgcctgtcgtcccagctactcaggagcttgaggcggaggcaggagggttgctcaagcccaggagttccagactgcagctttgatggcgatcgcaccactgcactccagcctgggcagcagagtgagaccctgtatctttattttatttttttttagacagaggctcactctcttgcccaggctggagtgcagtggtgcgatttcagctcactgcaacctccgcctcccaggttcaagcgattctcctgcctcagcgtcccgagtagctggtatcacaggcacccggcaccacgcctggctaatttttgtatttttagtggagatggggtttcaccatgttggccaggctggtctcgaactcctgacctcaggtgatccacccgcctcagcctcccaaaatgctgggatttacaggcatgagccaccgtgcctggccgagaccccatctctttaaaaaaaccaaaaatgtttattagatgaatgagagaatcctgacatgagcagacacctcgtgctgtgttgtggaggcggacaggccckgtggggagtggggacacactcgtgtggcagcttcccccagccccaacgccccacccctgcttccctaggctgcaggccaacttcaccatccgggaagatgccaaccccagctcccgacagcgaggactcaagcgcttccaggctaacccggaggccaactggggtccccggcctcgtgcccggccagggtgagtggtggtaaggtgggggtggggctcakccagggaaagaaggggtaaagggcagatggggtcccacctactcctcccctcgcacaggggcaaggcggccgacgaagctatggaggagagacgcaggctgcttcagaacaagcggaaggagccgccggaagatgtkgcccakcgggctgcccggctcaagacatttccttgcaagakgtttaaggaggtgaggtccctcctccctttcctccactgcaggacacatgaktctcccctttgggcaacagggagagaattgggggagctggggccaggcaagtgtttgggagtgggcttcccatcccaggaaaggatcccatcakgggctgctgakctccgggcaggggttcacacccaccatcttcccaccagggcacctgtcaacgcggggaccagtgctgctactcccacagccccccgacacccagggtttctgctgatgctgcccctgactgtccagagacctccaaccagaccccccctggacctggggctgccgctgggccaggcatagactgaaccaataaagagatgtcacgtcaccttctcccgattgcctgtggtttgtgtattggtccatacagctgcatgactgggatctgttcctctggggatcgttcgcccctgcctggctggagtgttgagtctgtatgggaggtaggagctgaccatctgcacagtggtcggcccctctgcagcgagggtcactgagccaccccagagccggagccagcgattcccgaagcggccacggggcggcagctgtgcgctcgctcccgcgggggttctgcccctcttccccctcccaccttcagcgctctccaggccacgggcttgcgcatagtggggcgctcctgcccggtagcccccacgtgtcttcgcgccgctgcctcctcgccgcctggtttctttggcccagctctccaggggccacagtggcggaagctggaccggaaccaggcgccctgtgcatccgctccagaccaggtgcttcctgccctgaggcccggggcgaggggggcgtgcacacaaagagggacctcgcaggctgctgcccagacacccagtgagggggagctgtacccctccctgccctccagagtggggtttagtaacgttaacgaagagtcctggggcaggatcccctctctggctcctgctcccttcatccccatctgtaatgaggctaatcttaggaccctccttgtagcgatatcagagttagcgcttaatttttttttttttttttttttttttgaggcaaggtctaggtgtgtggcccaggctggagtgcagtggcgcaatattggctcactgcagcctccacctcccaggctcacgccatcctcccacctcagcctccagagtagcagggactacaggcacgcaccaccacaaccagctaatttttgtattttttgtagagatggggttttgccatgtttcccaggctggtctcaaactcatgagcccaagcaatccgccagcctcagcctcccaaagtgctgggatgacaggcatgagccaccaagcccggcctttactgcataaaactttagttcctgcttctttggaggaaagcaatggaggtgttgatcgtggggtcctgggctccaccccattcctgggcggggggggggggggggttggtagtcctgctgctgggtgcctgcctgcctgggggctcttgcagttgcccagatacacagacgggccaaagcatgagtatcacaagtgggtggcagtctggtagctgctgctgcctggctgtgcccagagcctctccctgtgggaggctccagtagggtcttgaggtttaccaccaagccaggataactgccccccatgaaggggccgggtgctgtggggtgagggccatggaccaccaagttggagttatgtgatcctgtagccaagaggcctatagttgtggggacctgttgggcatctactggaaggtcacaccagccccagcaccctaggaaatccaacttccccaccccacccctgacagccatggctcttcctctcaccctcctgggcttggaaatgtgtggatactgtgctgagggcttgggacacctgcccaggctggacacccaaggccagactgttagaactgttcccctttgggtgccccactcccgggtaggggtggtggagaggagggaagggcctctgtaaaaagaggaaccaggctgggtgaggagaggaggtgggggcccagggtcacgcggccccaacgggccggaaagggctctccctcacccccatcagcacagacattcgggcagggagtgtgcaaagccaaagggcagactcggacataagaggaggcagcttccctgcctcagtttaccccctgcgtgcatccaggcacctccctccccggctgccctggggcccgggtccccagaggcccggggtccctacagtggctgggggagcggaaggcgaagccctgaggggtggcggaccgagtcctgccagcgccggctgggggcggggccgggaggcccgcgctgctaggtccccgcccgctggtttcctccggggtcagccaggctccttatcaggcgcggccaggcagcctggcccttatctgcactgggccagcatcctccggccgctgcgccgccaggggtgagagggaggaaaccgggccgccgggggcggggagaaggcgggccggcccgggagccgctcactttccctgggggggacctacgcggagacctcggctatcctggccttccgaggcccacgaggaggcgcggcccaacgccggggcctggagcattgaggccggaccctcgcgagacagcagagcctggcctgacgctggaaaccacaccctggcccagactgccagccctgacgggacagagccagggcactcaccaggctgcaagaacagtgctggggtaagaggggagcgggcctaaaggtggaggatcccgggcctgggacccagcctgcattcctttgttcattccttcattcattcattcaccagcagggacccactagtgaggggccaggcctgcttccccagggcctagctgaggaagacagggcagaggggccaacagtctcacaccttgctgggacatcctggactctggaaccaagagcaaacagggatgtcaaaacagtatgcaaaactgtggatgatcgcggggcattgtggtgcatgcctgtaatcccagcactttgggaggctgaggcaggaggatcacttgagcccaggagttccagaccaccctggacaacagagtgagaacctgcctctacaaaaaaaatttttttttttaaattagccgggcatggtggcacatgcctgtactctcagctactcaggaggctgagacaggaggatggctcgagcccaggaatttgaggctgcagtgcactatgattgcaccactgcactccagcctggacaacagagggagaccctgtctctaaaaaaataaacaaattttaaaaagcgtggatgctgatgaggatgggggcttccaagccagagggagggttggggcatgactggactggactgggcagtggggtcagtgtttgggggtctagggtcagcatttgaggtcatagtgtcagtagtggggtcacagggttgctatgggggatgtttgcagtgggagtgggggtcactcaagcaattatggagcactttcagggacagcaatgggaagaaccgcagggtcattcttgaggtgcagagggtcagcctgggtgggggctgggggccttccgtgaagggtcagagtccatcttggagggattccaagctcacatggcatcaatgagttaatgaggagtctctgggttggatctttagatctgaggataacagggttaatcttggggtttctggggatcccaggatcagttaggggctccctgtcttgttccctctccaggctgcagaggtgagggaattctggaagaaggaatatttgctcagaggctgggcaacagcgcccctcctgggtcacaaagagctcagggacagtgcgctgcctagcacctggggggcgcctcctactctaacgtaggacccccctcccgtgtcctggaagtttctgggcctgcccccgccatctgcctttgcctactgaaacttctcccctcctcctttccccctccccctccctccttcccatttgaggggtttcttgagctaagcaggtgggagcggggcacctagtcctcctccccactggctgccttctttcccacaggtgagtacccccacgtcggggtccatgtgcccgcctcaggcacaggcagaggtgggccccaccatgactgagaaggcagagatggtgtgtgcccccagcccagcgcctgccccaccccctaagcctgcctcgcctgggcccccgcaggtggaggaggtgggccaccgaggaggctcctcgccccccaggctgccacctggtgtaccagtgatcagcctgggccacagcaggcccccaggggtagccatgcccaccacagagctgggcactctgcggcccccgctgctgcaactctccaccctgggaactgccccgcccactttggccctgcactaccaccctcaccccttcctcaacaggtcagtggggatctggggtggggggcagtggggattgggggccagggtccttgcccacaaggcattagtgacccacgaccccttacagtgtctacattgggccagcaggaccttttagcatcttccctagcagccggttgaagcggagaccaagccactgtgagctggacctggctgagggtgagtgtgggtttgtgtgccttgtgggtttgtatgcctgtatgtgcacttgtgggtgcacagaaggcctggccgtctctgtgtggggctcatgtctgtcctctactccacctcggggagacgtgcttccagcacacacagagaacagcccacataggttctacccatgtgcaaaatcgcagtcccatagccagccccacacaaccaccgccacccaacaggccaagccatgtagccgcagtcacggcaaaacagagcatgccacaccagggcatgggagccacaaaatgacagctccactggaatgtgcagccacgcaagacagccacaagaccacagccatgcaagagacagccacaggaccacaaccacacacaagacagccacaggaccacagccacttaggaccacggccacacaagagtcagccacacaaccacagccactcgtgaaacagccacatggcaacatcacacataaccacagccatgagacataacaagagtctcacacagtcatacaagacacaggacacagacagtcataatgagaggacctctcagacccatgagtacacccagccagccgtacttgggcacaatcagaatgagggccccacggacagcttcccagaccaaacaaacacaaggaaatctttctttagggaatctcagtcattgacataaaggtgcccatagtcacagatacagcaggcccttgtccgtaggccgggcctgtgatgattcttgtctggatggctcttgggaggggtggggagagctgcccgtggaccccttgggtggagaaagccccagcccatggcctgggtttaagttcccacgagggtgctgcgtgtctagcgggagggcaggaggggccgccctttgggccatggcaccaacccggccctccttgtccacagggcaccagccccagaaggtggcccggcgcgtgttcaccaacagccgggagcgctggcggcagcagaacgttaacggcgccttcgccgagctgaggaagctgctgccgacgcacccgcccgaccggaagctgagcaagaacgaggtgctccgcctagccatgaagtacatcggcttcctggtgcggctgctgcgcgaccaagccgcagctctggccgcaggccccacccctcccgggcctcgcaaacggccggtgcaccgggtcccagacgacggcscccgccggggatccggacgcagggccgaggcggcagcgcgctcgcagcccgcgcccccggccgaccccgacggcagccccggtggagcggcccggcccatcaagatggagcaaaccgctttgagcccagaggtgcggtgaccgcacgcggcagcacctctgagccggagggcaccagggactcggcccagggccgtcaaggaaagggcagtggacgtgctgcgcatgttcgggagcgaactcccccgaagaaggaccagtgaagacgtcaggggcaaggtctcgggggtccggaagggtgatcatcgacccccaagggacccgcagacccttaaaaaaatcacccacaaccctctggaagtggccttgcccggtccccttcccaggggcgaggtcggcaaagcaacatggcagagcagtcataggacccaagtggtgcctcattttttccgggctggggtcgcggggggaggccaggaggggctggggaggcttcgcttttctcaccgtcggcccctccgggagacccaggggcagacgctcgtcgacggcgtctgct

SEQ ID NO: 95373 - DNA, 17665 bp, Homo sapiens
tcactctttaagttttccaggggagtccagggatcagtcaagtttgggagccactggctacactatcccttctccggagagatggaggtagacagtgccattatagcagttaggaggctgtcaggaagatcctgacactgaagatggtggctttgggagtggaaaaggtttagttacaccggtatactgcctcattttgctcattggcacctgatggtgggctagcctatacaaggctcttagtatccttcctagcacagcctcacagcatgttaattgctgctgttgttatcattggagagagcaggaatcagaggcaggtagacacaggttcaaattttttctccactttctagccatgtgactttgagcaagttacttacactctctgaaactgcttcatcatctatctataagatggggaagatgatgacaaccatcacagtaataataactatatcagaagagtgttgttaggctgaaagacaacatatgtaaagcacagtgctagcacagtgccaagcgtatagaaacactcagcagatggtagctggtagctgctgttaagcacttcctagaaacaggagccctatcctttagaagccaaatagacctggccgggtgcggtggctcacgcctgtaatcccagcactttgggaggccgaggcgggcggatcacctgaggtcaggagttcgagaccagcctcaacatggagaaaccccatctctactaaaaatacaaaatttgctgggtgtggtggtgccttcctgtaatcccagctactcaggaggctgaggcaggagaattgcttgaacctgggaggcggaggttgcggtgagctgagatcacgccattgtactccagcctgggcaacaagagcgaaactccatctcaaaaaaaaaaaaaaaaaaaaaaagaagccaagtagatgtggccttgctgaagcgtgggtacgccctcacctgaaggggccaagcagctatgcttagctgttctttccactgaagagtgtgtttttcccaggctgggagaggctgtgcttcgcacacctgtgcagggatctggggtggtggaaggtcaaggtacaaagagtgtaggggcttggggagctacctagtgcccttccaggtcccttatactgtcacctttgtggcaggagccacagaggtctgggctgtcacagtgagcatgtctctttccagggggagagggttgtggcagcggccggaccccctccccaccaggtgctttgcctaaactccagcacgtggagtttgtccagattgttcttaggaaggctttcatgggctggggaaggagggaagtcgtaggttggactgaatctcttccttcctcaagggactttcagtactccctagcctgagatggtagcatgagaaccagatcgaactcatatcttggtcctgatgtgtgactctggggcagtcacttaacctctctcagcctcagctgtcttctctgtaaaatgaagtttgtactggacctacctcgacctttgtgccaggttcttagcatatgggacctgggatggagttagcgctcagttaatagtaactcattagccaggtgcggtggctcatgtctgtattcccagcactttgggagaccgagttgggtggatcacttgagagcaggagtttgagaccagcctggccaacatggcaaaacactatctctaataaaaatacaaaaattagccaggtgtggtggcacttgcctatagtcccagctacacaggaggctggggcagaagaatcacttgaacctgggaggtggaggttgcagtgagccaagattgcaccactgcactccagcctggaaaaaaagggtaattaataactttacttgcaaccatagctgcttctccttctttgagccacccccaatcacccacttagcatccttcaggcctaaacctaggagcagtgcctggtcctctgtcttgttatgaccccaaggaacccacataagagggactgaacattttgctgggcaaggcttccctttgcttgggcagactccactcattctggggctgcagaggcaggaccattcagtcaagctgatgtgggattctgacctaaccaagtccccctccattagtcctcatagcccccacctcccatggggcagccctgagacaggctctgtgacaatccacagcagccctgtccaacagaaccttctgtgatcatggaaacattctgtggctgccaatctggcagccactcgccacatgtgtctatgagccttgaaatgtggccattgtgactgagaaactgaacttttaatggtatttcatttttatttttattttttttttatttattttgaggcagagtctcactctgtcacccgggctggagtgcagtggcactcggctcactgcaagctccgcctcccgggttcacgccattctcctgcctcagcctcgggagtacctgggacaacaggcacccgccaccacgcccggctaattttttgtatttttagtagagatggggtttcaccatggtctcgatctcctgacctcaggtgatccacccgcttcggcctcccgaagtgctgggactgcaggcatgagccaccacgcccggcccagaaaagagatgattaaacataaagcagccatgtgatgaaatggcactttgcctctgtggtcttcctcccccaaacccataactgtaatctaattatgagaaaaacacaggacaattccaatagagagccaggtgcagtggttcacgcctgtaatcccagcactttgggaggctgaggcgggcagatcatgaggtcaagaaatcaagaccatcctggccaacatggtgaaaccccgtctctactaaaaatacaaaaattagctggacgcagtggtgtgcacctgtagtcccagctactcgggaggctgaggcaggagaatcatttgaacccgggaggcagaggttgcagtgagctgagatcgcgccactgcactccagcctggtgacagagtgagactccgtctcaaaaataaataaaaataaataaataaaaattagctgggcgtggtggcacgtgcctgtaatcccagctactcagaggctgaggcacaagaatcacttgaacctgggagacagagattgcagtgagccgagattgtgccactgcactccagcctgggcgacagagtgagactacaacaaacacacacacacacacccacacacacacacacacaaattccaagagagggtcatcctgaccaatactcctcaaaactatcaaggttgctgggcacagtggctcacgcctgtgatcccaatgctttgggaggcttagatgggaggatcacttgaggccaggagttcaagaccagcctgggcaacatagggagacgccgtgtctccaaaaatttttttgagacagagtctcgctgtgtcgcccaggccggagtacagtggcgtgatctcggctcactgcaaactctgcctcctgggttcacgccattcttctgcctcagcctcccaagttgctgagattacaggcacccgccaccatgcccagcttattttttgtatctttagtagagacaaggtttcactgtgttagccaggatggtctccatcacctgacctcgtgatccgcctgcctcggtctccccaagtgctgggattacaggtatgagccaccgtgcctggcccaaaaaatttttttaaattagccaggtgtggtgacacatgtctgtagtccccactaatcgggaggctaaggtgggaggattgcttgagcccaggaggttgaggctgcagtgaactatgatcgtgtcactgcacatcagtctgggaaacagagcgacactttgtctcaaaaaaaaaaaacagataaataaattaaataaccaggccctccttatcccacagggttgttgtagaggtgacataggaacagaagagcaccaagttaaccaattataaatctatatagagagaagcagatcagaggccaggcacagtggctcatgcctataatcccagcattttgggaggctgaggagtggatcacctgaggtcaagagtttgagaccagcctgaccaacatggtgaaaccttgtctctactaaaaatacaaaaattatccaggcatgctggcaggcgcctgtaattcccagctacacgagaggctgaggcaggagaatcgcttgaacctgggaggcggaggttgcagtaagccgagatcgtgccattgcactccagcctgggcgacaagagcgaaactctgtctcaaaaaaaaaagagagagagagagagaagcagattagcagttaccaggggctgagggagtgtgactgctaatgggtacagggtttccttctggagtgataaaaatgttctggaaccccatagaggtgatggttgcacaacactgtgaaggtactaaatgcccccgaattgtttacttaaacgtggttaatgttatgtgaatttcagctaaacaatgttatgtagatatttggccgggcgcggtggctcacgcctgtaatcccagcattttgggaggccgaggcaggtggatcacgaggtcaggagatcgagaccatcctggctaatgcggtgaaaccccatctctactaaaaatacaaaaaaaaaaattaaccgggcgtggtggtgggtgcctgtagtcccagctacttgggaggctgaggcaggagaatggcatgaacctgggaggcagagcttgcagtgagccaagatcgcgccattgcactccagcctaggcaacagagcaagactccgtctcaaaaaatatatataaataaatagatatgtgatgtgacaggtttttttttgagatggagttttgctcttgttccctaggctggagtgcaatggcgtgatctcagctcaccgcaacctccgcctccagggttcaagccattctcctgcctcggcctccggagtagctgggattacaggcataagccaccatgcctggctaattttgtgtttttagtagagacagggttattccatgttggtcaggctggtctcgaactctccacctcaggtgatctgccagcctcagcctcccaaagtgctgggattacaggcatgagccaccgtgcctggcctctgatatgacagttctaatgccctttagtattctataattcagactcaggcctttggaatccaaagcccaggtttttctcacaaacccacactgcagagcggagtggtggaaaaaaataaaacctctgccttggaatcagacagatctaaactggagccctattttgtcatttgccaactgtgtgaccttgggcaagttaccgcaactctctgaacctgtctctttatctgcaaggtgcacgactgatgggactattcaaccagacccagtgcacagattcaggcacttgataagacattgaggctgcaggcagcgatcttttttctttctttcttttttttttttttttttgaaatagggtctcactctgctgcagaggctcaatcactgttcattgcagccttgacctccctggctcaagagatcctcccatctcagcctcctgagttgctgggatcacaggtgcaatccaccaccacacctggttaacatttttttttttagagatgaggtctctctatgttgcccaggctgcacttccttcttgtctcccttatcccagcgtccgactgaactgacggctttgctttccccaaccagcccgtgaagctgggctgagtacaaagtggtgggtatgagggtcaagattgtaagatctgaaaactccagaaaccatccctttggttaacagttgctaaggacaaatgcataacatattttccagtgatcccatgctggcaaatcgtcagggtcattcctgcaacagacagattcaaggccagccccaaactcagccaagagcaaagcaaacactccagccttatctgggcagggttgtgtggagactgactataagactatacctgagactggtcatctcagttcttttctcaccttgactgcaagatgaaactccttgtgctagctgtgctgctcacaggtaggcaagtctccccggctccacccgcctttctctcccaagtgagctaagatctcactcctctggaatgggggccacaggccacagcaaacagggatggccagccccgcagtctcaawtcgaggttcccagtggggcttaagggctcctctattggggttccctcaaggctggcactttttcaacctgcaagtctgaactcagattgcctgagctaagaaagcttgcctttattttcttttttccagacagggtcttgctctatcacccaggctggagttcagtggcatgatcatagctcaccacagcttccaactcgtgggctcaagtgatcctcccaccttactcaactaagtagttaggccaatctcccatttattttattttattttaatttttatttttattttactttattttatttttgagacggggctcactctgtcgcccaggctggagtgcggtggcgtgatctcagatcactacaacctccatctcctgggttcaaataattctcttgcctcagcctctcaagtagctgggacttgtagctctcaagtagctggcacacaccaccatgcccagctaattttttgtgtgttttttttggtagagacaggttttcaccatgttggccaggctgggtgacctcccttttagattctcctcatcctgctctattcttcccctttctaatgcagtatccagtttccttacttatcacatttattattattcttattattattgagacagagtcttgctttgtcgccaaggctggagtacagtggtgcgatctcggctcactgcaagctccacctgctgggttcacgccattctcccgcctcagcctccccagtagctgggactaaaggcgcctgccaccacgccccgctaatttttttgtatttttaataaagacggggtttcatcgtgttagccaggatggtctcsatctcatgaccttgtgatccgcctgcctcggcctcccaaagtgctgggattacaggcatgagccaccgtgcccggccttatcacatttattatttattgtttttctctcccactaggttgtaagctccatgaggttagagattattattattattattattattattattattattatatctgttcactgctgtatctctagctcctaggacagagcctggcacatagtaagtgctcaataaatattcactggataaacagtgcagatagtttaaaactatctgacctagggaggctgaggcaggagaatggcgtgaacccgggaagcagagtttgcagtgagctgaaatcgtgtcactgcactccaacctgggcaacagagcaagactccatctcaaaaaaaaaaaaaaaactatcaggcctagctgggtggcacatgcctgtaatcctagctgaggcggtagggtcccagaagaagaagaagaagaaaaagaagaagatatatatatatatacacacacacaaagatataaactttatatatataaagttttcattaaaaaaaaaaaaaacctctacccactttcactttaccaggttcctgggtccaacggtcttcagaggaggcagctggcaggggtcagggaggcagcgtgggacccgagggagcaggaaggcagtgtgtccccggggtgctggcagaccgatttgaactctggctatgtcttcttgcagtggccgccgccgmcagcggcatcagccctcgggccgtgtggcagttccgcaaaatgatcaagtgcgtgatcccggggagtgaccccttyttggaatacaacaactacggctgctactgtggcttgggggrctcaggcacccccgtggatgaactggacaagtaagtgatccgcctgcaggaaaattggagtgcctgccgggggcggggtggggcacacgccaaggatctcacgaggcatacaaaggggacttgcatatctgctaaggataacatattttcacctcttgtcaaataaacaaatatgttccaagaggaccctgtagcgaacgcaccccgttagagatggaaacaatgaccgacgtgcaaaacagtgggcgatgctkccctccagtggcagaatgtagcaacagtaaacatcacagcaactatccacgtgtcattttctagcagtggttgtcactgcaccttctgaatacaggattttactgtattcttgcaaccatgttaaaaatcgctttcaggccaggcgcggtggctcatgcctgtaatcccagcactttgggaggccgaggcgggcggatcacttgaggtcaggagttcgagaccagcctggccaacatggtgaaaccctgtctctactaaaaaatacaaaaattagccggacatggtggcgagcgcctgtaaccccagctacttgggagactgagttggaggtttcagtgagccaaggtcgtgtcactgctgtccagcctgggtaacagagcaactctgtctcaaaaaaaaaaaatgctttcaataaatatatgataaaaggacttatattttttcaagccataggatcatttctcctgaagcatcttggcgaagtcatccccacctgttcctgagagtgggcaggtgagggctgacctattgctctgcacttactcctatctcagctgtccctcccactttccaggtgctgccagacacatgacaactgctaygaccaggccaagaagctggacagctgtaaatttctgctggacammccgtacacccacacctattcatactcrtgctctggctcggcaatcacctgtagcagtaggtttatcccttccttgacctatgaattctagttggttctcagtaggccggggggaaataatagtaacaacagccatgatttagtgttaattttcttggttctgggcagtgtctcctttaatcctcagaacaacactatgggataggtacaattatcctcacttaacagataagaaaactgaggctcagaaggctgagctatttgcccaagatcacacagcttgtaagtggtgacagtttgggtttttttttgttgttgtttagagacagggtcttgctctgtcacccaggcatgagcacagtggtgcaaccataggtcactgcagcctcaacctcctgagctcaagggatctgctgacctcagcctcccaagtagctgggactacgagcgtgcaccaccacgcctggctaattaaaaaaatttttttgtagagactgggtcttactacgttggccaggcttgtcttaaactcctggcttcaagcaatcctcctaccttggcatcccaaagtgctgggattacaggggtgagccaccatgtgcggctacttatttctttacattccatctttccaatagaatgtaagatccacagaacagggattactgcctattttcttcctttcttttttgagacagagtctcacttcatcacctcaacctccgttcagctcactgcaacctctgcctcccgggttcaagcgattctcctgcctaagcctcctgagtagctggaattacaagcgtgcaccaccatgcttggctaattttttgtatttttagcagagatggggttttaccatgttgcccaggctggtctcaaactcctgacctcaagtgatctgcctgcctcagtctcccaaagtgctggaattataggcgtgagtcactgtgcctggccgattactgtctattttctttattgctatatccccagatctagagcagtgtctgacatatagtaggtgctcaataaataattgatgaatgcacagcctagatataaactttctttttctttttttaaaacaatcttgacaactttgcagaataaatacaatcttgcattctgctttttcacttatcaccttgttatgactttttcatattgcctcaaacctttattgttactgttttttcattgttactattttagtcactgaataatatggcttaatttgcttatacatcctcctgctccactttagaaggccaaatttacaaatctgatgaaagctatgaaccctctccccagagaaatacacacacacacacacactcacacacagtttttttttaatgtttgcaactaagacaagaaacctgcattagaggatgtttgttcatattaattaaaaataactcagttgggcacagtgactcaagcctgtaaccacagtactttggaagtccaaggtgggtggatcacttgaggtgagaagttcgagaccagcctggtcaatatggtgaaaccctatctctactaaaaatacaaaaattagctgggtgtagtgatgcatgcctgtagtcccagctactcgggaggctgaggcaagagaattgcttgaacctgggaggcagaggttgcagtgagccgagatcccaccactgcactccagcctgggcgacacagcgagactctatctcaaaaaaataaataaataaaataaaggatcggagagaaacaaaactaataagattcctgaaggtaagcagagatacgtaaattatatgtaataaagtttaaatgcattttaactgtaatcttattgtttattttggttataaaagtaaacaagccaaaagtaatgcaacttcaaackctacataaatatctattatggaaagtggaaggcatctataatcctactacccaaagataaccagttacatattcctccagatttttggggcatacactagctttttttatttgggaaaatttccatgtgcaggcatacctaatttttctaaatgtctatgtagtattccatttaaggatgttccataatttttaaaatacatgctttaaagtagagaaactaggttgggcatggtggctcacgcctgtatcccagcactttgggaggccgaggcaaatggatcacttgaggtccggagtttgagaccagcctggacaacatgatgaaacaccctctctaataaaaatacaaaaattagctgggcatggtggcragcacctgtagtcccagctactcaggagtctgaggcaggagtatcacttgaactcaggaggcagaagttgcagtgagctgagatcacgccactgcactccagcctaggcgacaaaagggaaactccgtcttaaaaacaaaacaaaacaaaaaaacacaggatgcccagataaatatgactttcagataagcaatggataattttttggggggtatatgtcccaaatattgcattcattgtttatctgaaagtcaaatttaactgggcatcctgatgtacttgtattcacttaatctgtcagccctaaatgtgcatcagtggaatggctgccagcttattccagttaattcttcttgccccagattgtacaaaacagggtccaccttggctcagtcctctcctttcatccctctccaggcaaaaacaaagagtgtgaggccttcatttgcaactgcgaccgcaacgctgccatctgcttttcaaaagctccatataacaaggcacacaagaacctggacaccaagaagtattgtcagagttgaatatcacctctcaaaagcatcacctctatctgcctcatctcacactgtactctccaataaagcaccytgttgaaagacctcatgtttggatattgttttattctctgtctataaactaggtctctgcctactcttttatttttatgtatttattttttctaggtggagtcttgctctgtggcccaggctggagtgcagtgatgccaccttgcctcactgcaacctccgcctcccgggctcaagcaatcctcccgcctcatcctcccgagtagctgggaccataggcatgcaccaccatgcctggctaatttttgtattttttgtagagacagagtttcgccatgttgccctggctggtctcaaactcctcagcttaagtgatctgcctggctcggcctcgcaaagtgttgggattacatgcatgagccgccgcgcctggctactctgcctagtcttttgtgagtatcatttcttccagccttggaagctaagttgaattagaaagacacttccaggaagcaagcaagcaccttgaaacctgagtaatgattaacgatcaccatctactgattatttactctgtaccaggactgtgtgtccataaatcctcttgacagccctgtgaggtattggcgctattagcaaatcttattttcctaagctgaggctcaataggagaggtcacttttccaatgctatcatctagtaagcagcagagaaggaatttgaactcggcaagtctaacaacagaaaacacatgctgaaccactgcccttccctgcctgaagtggtaggctttagtttgagccagaccttgcccccgtctcatgattctgcctccattttcaactgtattaaaccatttttctacaatgactttcttttttttttttttttgagatggagtctcgctctgtcgcccaggctggagtgcagtgctgcaatctcggctcactgcaagctctgcctcccaggttcacgccattctcctgcctcagcttcccgagtagctgggtttacaggctcctgccaccacgcccagctaattttttgtattttcagtagagacggggtttcaccgtgttagccaggatggtctcgatctcctgacctcgtgatccgcccgcctcggcctcccaaagtgctgggattacaggcgtgagccaccgcacacggccacgactttcttttctaaataaaagacttcaccacactctacaggctaattttgacactgtagtcatgaaatataataaacattaacaagccgagcatggcggcacgcgcctatgatcgtagctactcaagaggctgaggcaggaggatctcttgatcccgggagtttgaggctgcagtgagctatgatcacaccactgcactccagcctgggtgaaagagtgagaccctgtttcaagctactagggaggctgaagtggaaggatcccctgagcccaggagttggaggctgcagtgagctgtgatcacgccactgcactccagcctgagtgacagagagagacactatctcaaacaaacacacacacaaaacmcaaacaaaacaaaacaaaacaaaacaaaacaaaacaaaaaaccaataacagcttgcatttctggagcacttactgcatacttccttgttcggagttttccacatctcatctcattaaatgttcaaaccagctctgtgatattgatatttttgctcccatttcatggatgtggaactaaaaattcagagaagttaagtcatttgtccaagatcacacaaatggcaaaatcaggatttggccaggtctgtctggtggcagtgcccaagcttttaaccactaagtcacttcagcccaattcctctatgagtatttatgactacatttacattgaaattcaccagaactaagccagggacagtggctcacgcctgtaatcccaggactttgagaagtctaggtgggcagatcacttgaggccaggagtttgagaccagcctggccaacatggcaaaaccctgtctctactaaaaaatacaaaaattagccgagtatggtggcataggcctgtaatcccaactactcaggaggctgacgcaggagaatggcttaaaccagggaggctgaggttgtagtgagctgagatcacaccactgcactccagcgtgggtgacagagtgatactcggccaaagaaagaaaaaaaaaaaagaaattcaccagagcaagtggggagaggcagagaagggaactgaagcagaaaagcaaagttgaggccaggcatggtggctcacgcctgtaatcccagtactttgggaagccgaagagggcagatcacctcaggtcaggagttcgagaccagcctggccaacatggcaaaacctcatctctactaaaaaatacaaaatttagctgggcatggtagcgtgcacctgtaatcccagctactcaggaggctgagacagaagaatcacttgaacctgggaggaagaggttgcagtgagccaagataacaccactgcactccagcctgggtgacacagtgagactctgtccactatcaaaaggcaccattaagcagtttcagaccactggaaactgacagaacagccaccayttctgggtatgtggtgggcaatagaagaccttccatttgaagaagggagtgtgtgtggacttatcttttggcataatttctccctcatttatttatttatttataattttttttttgagacagattctcactctgtcaccaggctggagtgtagtggcgcaatctcggctcactgtaacctctgcctcccgggttcaagagattcccctgcctcagcctcctgagtagctgggactataggcacgcaccaccacgcccagctaattttttgtattttagagacagggtttcactatgttggccaggatgttctcgatctcctgacctcgtgatctgcccgacttggcctcccaaagtgctgggattacaggcgtgagccaccacgcccggtccctcattttattcatccattcaatgattatttattgaacacttactctgggccaggcaccacacaaaatgctgaggatacaatgtattcggggctggccacaagacaatgatttagtgttagtatctgtctacaattcagtctgctctgagactttcttccctactcttcaaactggcatccttgtatatattatgctgtatgctccagacggtgtcatgtcttttgcacaattatcttgtcatccttgaagttctatagttgtaggtactgttatatccacatctgatggatgaggaaactggcttaaagatgcaatggattgccaaaagtcactaattcctgggtggcatagctgaccttggaacccaaatccagataattcagagaagtgctatctttttaattctttttaattaaaattaattctttttaagtctttttaattctttggcaggcaagaatgggactattctcaaattcaaattcaacaagcataaaccgaagaacccttctttgcatattgtgctatgaagaatttcaagggatgcaaaatcaagttagacctggccttaatcttcaacgaactgtgaaggccataaaaaatatttcttcagtggaaagaaattgcaagtccctgttggatggaagaaaagtgggcttttaggaaaatggtgcttacttcttcttatttatttatttatttatttagatgacagaacaaacgagagagagagagcagtcacagggctactaaaggctctaaagatatcctctgatgtaaaaatctctcttgggccgggcgtggtagctcaggcctgtaaatcccagcactttgagaagctgaggcttgcttgagtccagcctggacaacacggtgaaatcccgtctctacaaaaaatcagcaaggtgttgcatggctgtagtcccagctactcgggaggctgagatgggagtatcacctgagcccagaaggttgaggctgcagtgagactgcactctggcctgggtgatagaatgagaccctgtctcaaaaaaaaaaaaaaaagaaaaaagaaaacaaaaaaccaacaacaaaataacctacctctttttcattatcaaggcttgggaaagagagaataaattcccttaattatctttaaatgagcatttgtatgaaagtaggatacggaaaactagttgaatgtctaggatgatttgaatgaagaaacaaggaaataagctggacagagtaatttgatggagagattacaatttctagcaaccgcattgtcttcacattgtctagcgcatcacataagttcattaaataattgttcagagacggtagtgtgacgtaatgtttcgccgaagccaaggagaaaaagccacgtggccttatttaccttttcgtgtcacgtgatgctgtgtgcccaacccgatcaacctctagtccacgccccccaatccgccgccacaggatgtgattgtgattggatatcttatgagcacgtggctctcgatctctcttttctattggtgaatggcggcccagccgtcggtctacttctgccccttcccggcccaggccccgcccctctggcgcgcacagaaaacccgagtctgcgcaggcgcagtggctggtaatggtcacactaggtggcgtccgcgtgaggtggaggtgtcagcggctcctgtctgcagcttcctggggtcctggcggcgctcttctcctgagccagaatccagcaggaaggacagaatgggcgctagagtgtgaaaagagggcgaactcacgtggatgtgactctccgggtcgctcttccctgtcacccagctcctcctgccggtttcctgtgggcatcgcctgcattgcttttatcccggggacggattagggggtagggaaagtggggtgcagggaacaaaggggagctgagaggagaggtggccaagcagagaggcaaggggatgttgggcgagccacaggcctctgaggcgccccaaatctacacttaaatttccacccccacattgaagggaaaaaaaaaaccgaagagatttggtggtgtaacagccatgctttttgcatgagtggtttcctcccttttcctacctcgtgaaggcatgttcatctttcagaacccagcctgggtcacttctggaagtttcttgagctttgtccttcttccgcaggtacagctgctgttaccccaccgggtttctacagcagaaagtccgagagcgaactcagaactggacagactggccttcattcctggcctagtcaccctcttggtgaccttgggcaggttacccgaaataatagtgctcttatcatagggttgtgggaattaagtgtccaaatatgttgtgtaaatgcttcctaagtgcttgttgtatagtaaatgttcgataaatactgttttcctaaggggaaggagaggaaaggataatgcactttaatttttcttgagaaagtctttattacattaagcaagccttgatttgtaatctttttctatttttttactttttattactattatttttattttattttattttttgagacggagttttgctcttgttgcccaggctggagtgcaatgatgctatctcagctcactgcaacctccgcctcccaggttcaagcgattctcctgcctcggcctcccaagtagctgggattacaggcgccggctaccatgcccagctaattctgtatttttagtagaggcagggtttcaccatgttggtcaggctggctggtttcgaactcctgacttcgggtgatccacccgcctcagccctccaaagtgctgggattacagactcacataagccaccgcgccgggcctattattattattttatgtatatatatgtgtctatataattttttttttgagacggagtcttgctctatcgcccgggccagagtgcagtggcatgaccttggctcactgcagcctctgcctcctctgctcaagcgattcttcagcctcagcctcccgagtagctggggttacaggcactggccactacgcccggctaatttttgtattttcagtagagacagttttcaccatgttggccag

SEQ ID NO: 95374 - DNA, 38111 bp, Homo sapiens
  misc_feature (1)...(38111): n = A,T,C or G
agtattaatgtaaatgatccacgtaaaccacgcagcacagcgctcattaatgtaactgcaaatgagagccatggaaaagggcaggtaggagctataaaagaaagtggagcctgtccccgagtaacccagccgatgagagcaacgactctccccagcagcaggggcagtcgcccccgcccactgccgcaggcccgtccttaccgctcttgggtttagactcgccggctggccccgccgaggcggagcggggcggctgttgccctttgctgctgcccgaagaggcggaggagctgttggagccgctgttcttgtccatgtcggaggcggtggcggcggcgttgggggagctcagcggcatcaacgggggcctcggcggcgacggcagtcgragcggagcgggcgcggcggggacccaggctcatggcgttcagggccggcgggggtcggcggcggcagcggttctcggccttcatggcgacatttttccctgtttccttccttggcttctcaaactaggaagagaagcggcggacggggctgttaagcccggcggcagcggcgaccgaggacgaggaggccggggctcgggagtccgggccgggcctggcggggcggaggctgcgggggaaggggaggcgagggaggttgcgcgagccccgccggccggccggccggacacgctctcccgccgcgaggcaggggagagggctggctgtctcggtgtcggggactagtgtctccgacacagcaacggatactcgcccctgggccgaggccgacctgctccgggaatggcgacgagtcgccaaacagcatctcaaagaacccggatggactgtatatatagtggagagggggtgaggtattctgggaaatgtagtttttgcctacatccgggtctcgtggtttgttttttggtttttgtttgtttgtttgttttggttttgttttttttatttcctcccccacctccgccccaaccccactgtgagggcattcaaaataatgggacttgcagttgctccaagtccaggtttttcacttagtacactaaaaatacagtaacaataataatatacactgataataatgtagccaaacattggaatacctgtggaactcctttatagactcgtttgatttatggttctttttttttttttttgaggcggagtcgctctgtcgcccaggctagagtgcagtggcgcgatctgggctgactgcaagctccgcctcccgggttcacgccattctcctgcctcagcctcccgagtagctgggaccacaggcgcccgccaccacgcccggctaattttctgtatttttagtagagacacggtttcaccgtgttagccaggatggtcttgatctcctgacctcgtgatctgcccacctcggcctcccaaagtgctgggattacagacgtgagccaccgcgcccggccaatttatggttcttattctagcgttaataccaattgatttatggcctttagtctatctcatattaggaataataataataacgttaataatgacaataccttacatttaatatcactttacggcacttcttcatacagtacatcactttatttctttagcctggcgtggcggtgcgcacctgtggtccccattacccaggagacagaggcggaaacaggccataagcagtgtttcatgcgtgtaatcccaacactttgggaggcagaggtggaaggatccttggaggccaggagttccagaccagcctggggaatatagcgagacccctgtctctaaagaataaaaatattttttaaaaaattagttgggcagccgggcgtggtggctcacacctgtaattccagccctttgggagtctgaggagggggcagatcacttgaggccaggagttcaagaccagcctggccaacatagcaaaatcccgaccctattaaaaatacaaaaattagctgggctctgaataaaatagtttgaataaaactaactttaatttaaaagagagaaagaaaaaaaaattagccaagcatagtggctgtggctgcacacctgtagttctagctactcaggaaactgaggtgggaggatcacctgagcccagcagttggaggttgcagtgagatacgatcgtgccagtgcactccagtatgagtgacagagagggagaccctgtctaaacttttttttaaaaagtagaaagagacaaaaagcagattagtcatttcaaaattacttttcttgtaaaggtttaagcagaatggacttccttatgtggggtaaaactgaccagtttggggatttgatgatttctcagaaggtcagataaacaatttcgtttaggcgtggttgggtagaaattcaccttgagtaactctgttttggtttggtctactgtgctgaagctcagtgcaaaacaatgggctcctataaattgtatttaacagctgttaacattatcacatttaatcttctcaataactaaattttagactaagtgtgcctgtagtcccagctactcaggaggctgaggagggatgatcacttgagcccaagagtatgaatccagcctgggtaacacaacaagactctgtccctaaataaataaaatttaaagatgagtaaatggactccaaaagtccagataatttgcctattatcacatagctaacaagtgatgttcttacctatgagacaagcagttcctcattttacagatacagactgagatttagaaaatcatgcatatggggccgggcacggtggctcacacctgtaaccccagcactttgggaggccaagccgggtggatcaacaggtcaggagatcgagaccagcctgaccaacatagtgaaaccccgtctctactaaaaatacaaaaaaattagccaggcgtggtggtgcgcgcctgtaatctcagctactgaggaggctgaggcaggagaatcacttgaacccagaaggcacaggttgcagtgagccaagactgcaccactgtattccagcctgggcaacagagcgagactccatctcaaaaaaaaaaagaagaaagaaaataatgtatgtgggtcaggtgcaatgtaatcccagcactttttgggaggcctgtaatcccagcactttttgggaggcctgtaatcccagcactttttgggagttcgaggcgggcagatcacgaggtcaggatttcgagaccagcctgaccaatacagtgaaaccccgtctctcctaaaaatacaacaattagccgggcgtggtggcgcacacctgtagtcccagctacttgggaggttgagggaggacaatcgcttgaacctgggaggcggaggttgcagtgagctgagattgggccactgcactccagcctgggtgacagagcgagactctgtctcaaaaaaaaaaaaaaagaaaaaaaaaggaaaatcatgtatgtggccaggcaaggtagctcaatcccaacattctgggaggctgaggcaggaagatcacttgatgttaggagtttgagaccagcctgaacatagtgaaaccaattctctactaaaaattaaaaaacaaaaaacaaaaacatatggtttacagatatagacgctaagactttgggaatcataccacacctatttgtactttggaaaattacaaatgattcccttccaaccatagtagtttgagattcaaaagatcacatagacatgctattaaggaaatgaccagggccaggtgcggttgctcacgcctataatcccagcactttgggagattgaggtaggcagattgcccaagcccaggagttcaagaccattcagggcaacatggcaaaaccctgtctcaacaaaaaatgcaaaaatcagcccagtgtggtggtgcacacctgtagtcccagctactcaggaggttgaggtgggaggatggcttgagcctgggagggtgagaagtgagctatgattgtgccactgcactccaccctgggtgacaaagtgagatcctatttcaaaataaagaatgaatcaataaataagtaaataagaccagcctagccaaaatggtgaaaccccatctctactaaaaatacaaaaattagcgccgggagtggtggctcagcactttgggaggctgaggcaggtggattacctgaagtcaggagttcaagaccagcctggccaatatagcgaaaccccatctctactaaaaatacaaaaattagcctggcatggtggcgcatgcctgtaatcccagctactagggaagctgaggcaggaggatcacttgaacccagaagacagaggttgcagtgagccgaagtcatgccactgcactccagtctgggcaacagagcaagacgctacctcaaaaaaaaaataccttccaacagtccttgtcctacttcactttttacaggttttcctccacatatcatatgaaataagagaacagtgaaatactgttggtctggatacttaatctgatgtgcagaaggaacagccctaaatcctgagatccattcttttatataactagatatggaagatataagattctttgatgagactttatttatttatttatttatttatttatttatttttgagatggagtctggctctgtcacccaggcttgagtgcagtggtgcaatctcagctcactgcaaccagtgactcctgggttgaagggattctcctgcttcaacctcctgaatagctgggactacaggtgtgcaccaccatgcctggctgatttttgtattttagtagagacggggtttcaccatgttagccatgctggtctcgaactcctgacctcatgcaatccgcccacctcgggctcccaaagtgttgggattacaggcgtgagccaccgcacccagccacttaatttcttttaacaaagacatgagaattatgaatacatggatgaatcatttcgcccttgtatccttccttttttttttctcatcactataccaacgaggaccttctatcattcttaaaataaaagagaaagaaacagaaatcccagcgcagtacttcccaaacgaaagcggttaggtgtccatctgtcaggctatattaaaccaggaagagaattttcatttcaaaacagtttcttctattggcgctttctcctcgtgaaatatttacaggaaacatacatttaaaatggaatgaaagcagaaacatacagtaatccaagcaaaactcaacaacgtccgttctttattttgcacaagacggtctgcattacccttgccattaaaaaaagactgaaaatctggggctgaagtaaaacacccatgacatgccacctggagctaggaatgtagctttgtgtcagcaggagaccaagtgtgagtggtggttctggcttgctaagtggataccagagctttcgttcccatttatgagcttcctaggttcataaaacggacagaacaaagaagtctgtcctatgtttrtttttcagagtagtgtaacatatgtttctcaagaatggtctgcatctttagcatcagaatcgccagagaaatttgtttaaatagagattaaagggatataggtcagatcaaaatctctggtagttggggacccaggaatcttcattttaaaacttaaaccaagtgattcttacgctcaacaaagtgtgcaggaattggcccgtgatcttggctttttaaccacaccatgcctcaatttcccccttctgcacaagacaacaagagttcctggatatcttgcgagttagtacttttctgcctagccggattcagagacatggccgctaagaggtgacccggggctcccctgagatcccctgattcctggtgaattgtaaattcaatttgagaagagagagaggaagggatttccgatacttagagaccaccctttggatcctagagataatgccggcacaactgtgtatcagatttcagggcgcgttcggctaataatgttgccggccagccgccgtcgttcgtggagtgacgcaacaaggcgtactctctggscgttgtcactcgactaccaagatggcggcccccgggagctgtgcyctatggagctattgcggccgtgggtggtcgcgggcgatgcggggctgccagctcctcgggcttcgtagctcttggcccggggacctactaagtgctcggctcttgtcccaagagaagcgggcagcggaaacgcactttgggtttgagactgtgtcggaagaggagaaggggggcaaaggtgaaaggggcgagagggcggatgggagggatctgaccgtccatggtctggtttcttctggccagttagggttgatttaacatycaattagttccagtgttgttgtctgtgcagttatgattttttttttttttggagacagaatttcgctcttgttgcccacactggagtgcaatggtccgatcttggctcactgcaacctccgcctcccgggttcaagcgattctcctgcctcagcttcccgagtagctgggattacaggcgcccgccagcacgcccggctaacttttttgtattcttactagagatggggtttcaccaggctggtctcgaactcctgacctcaggtgattcgcctgcctcggcctcccaaagtgctgggattacaggcgtgagccaccgcgcccagccagacgccccctttttaaaagcagaatactgatgactaaatcccatcaactgagcgtttgtgatgtgccaggcaacgtacagacattattttcaattctcattttcaacattccagtagtgggtattgttattaccatattacacgtgaggaaattgagacttaaaggttaagcaagaagttgcccagttgaacatatcagtaagtggcggaaccagtattcaaacccagtttaatctgagtctgaagcccccgttctttacctctagagaaaaataggggtttttttggttgtttttatttatttatttatttatttatttattttgagacggagtttcgctcttgttgcccaggctggagtgcaatggcgcaatatgggctcactgcaacctcagcctcctaggttcaagcgatcctcctgcctcagcctcctgagtagctgggattacaggcatctgccactgtgccctgctaatttttgtattttcagtagagacggggtttctttttttttttttttttttttttttttttttttgagactgagtctctctctgtcacccccaggctggaaggcagtggcgcgatctcggctcactgcaagctccgcctcctggcttcacgccattctcctgcctcagcctcccgagtagctgggactacaggggcccgccaccatgcccggctaattttttgtattttttttttagtacagacagggtttcaccatgttagccaggatggtctggatctcctgacctcgtgatccacctgcctcggcctcccaaagtgctgggattacaggcatgagccaccacacckgccaatgtataatcaacattttacaatgtataatcaatgtataatcaacatttcacacagtggcaagcaaggaagaagttaactactgaactaaatatgaattccagattggggactgagattgcagtacagacagtcctcgctgtgcacagtaatgcaagactgtgaaaatgtgcaagctgaagtcatacacaatgaccttaatcaatgggaaaaattagaattgttttatgacctttaaaaattatcaaccatcaaaaaccctgtcagttataaatgtatagtgaaatgaaaaaatatatactgaagttgatatttatttacagccaggtgcgatggttcacacctgtaatcccagcactttgggaggccgaggtaggcacttgaagtcaggagttcgagaccagcctggccaacgtggtgaaacctcatctctactaaaaatacaaaaaaaattagccaagcatggtgacgcacgcctgtaatcacagctaattaggaggctgaggcaggcaaatttcttgaacctgggaggtggacgttgcagtgatctgagattgtgccactgcactctagcctgggcgacacagtgagactgtctcaaaaacaaagaaaaaaaattctaataaaaaattagaaaccttgagaattaaattcttttatttccttgtaaaaaaattgccaagagtaggctgggcgcagtggctcacgcctgtaatcccagcactttgagaggccgaggcgggtggatcatgaggtcaggagattgagaccatcctggctaacacggtgaaactcygtctctactaaaaatacaaaaaaattagccgggcatggtggcgggcgcctgtagtcccagctactccggaggctgaggcaggagaatggcatgaacccgggaggaggagcttgcagtgagccgagatcctgccactacactccagcctgggcgacagagcaagactctgtctcaaaaaaaaaaaaaaaaaaaaaaaaaaaaaaaaaattgccaagagtagtttgagcactatttgccaccttcttgtcgtatgaaatatcttttctatgccttggcaaattgccatatttctttctaagtttttatctacttctgatattttatcctttgtgctttcaatgttatgaaatacctccaagaactcctttaatgtgaaagtttttgctggcatcacttcttctgggacatcttcaacctttttgtcacagctccatttcttgttcatgttggtaagttcatcttcctgcagttcctctggctgtatgtctagagtctctccagtggcagcagtgtcaatattcccacagtcatctatttctcctataactccactgacactcaatttgaatttcacttccagcattatcagcattttcatttttgttgctcaattccctctttcatttatccagttatgccacgtgtgctttatcactgaaagataargaggcaatacaagtacatgctttactgtytgtgaactgagtaactgatgcagtgaccagtcacctaaagtctgggaaagaagtgcgtgattggttgctgaacatgttgtgtatctgttatttacatagtgatttgtaggctaaagaatgtattttatgtaattactcatatttaatataccattgtacttgaattgtggtattgggtgactggtgttgtttagctaaaccacagtaactgaaattcatgcatattggaacatgcaaagccaggactatttgcttatttatttatttatttatttttatttatttttttggagatggagtctcgctctgtcgcccaggctggagtgcggtggcacgatctcagctcactgtaagctccgcctcccaggttcatgccattctcctgcctcagcctcccgagtagctgggactacaggcgcccaccaccacgcccagctagtttttttgtatttttagtagagatggagtttcactgtgttagctaggatggtctcgatctctggacctcgtgatccgcccgcctcagcctcccaaagttctgggattataggcatgagccactgcgcccagccttgtttatttatttttgagacaagttctcactatgctgcccaggctggggtacaatgtctattcacaggcacaatcatagcacactgcagccttgaactcctgggttcaagcagtcctctcccattagccccccgagtagctggcactccaggtgtgtgccaccatgccagcaaggaggactatttataccgagtggggttagccttagtgtcccccagacaccccaaaagatgctcaaaagagcaggctgggcgtggtggctcacgcctgtaatcccagtactttgggaggctgaggtgggcagatcatgaggtcaggagtttgagaccagctggccaacatggtgaaaccccatctctactaaaaatacaaaarttagccaggcatggtggcaagtgcctgtaatcgtagctattcgggaggctgaggcaggagaatcacttgaacctagaaggaggaggttgcagtgagccgagattgcgccactgtaccccagcctgggcgacagagctagacgccgtctcaaaaacaaaagtccgggcacggtggctcacacctgtgatcctaacactttgggaagccaaggygggcagatctgaggttaggagatcgagactatcctggctagcagtgaaaccccatctctactaaaaatacaacagattagctgggcatggtggcacgtgcctgtagtcccagctacttgggaggctgagccaggagaattgccgggaggcggaggttacagtgagccaagatcacgccactgcactccagcctgggtgacagagcaagactccgtcccaaaaaaaatttaaaaaaaaaaaaggaaagagcgcacttggaaatccgaaggttgagaataggcgttgaagtttgagttaaaggcgggctctgtagtctgattcagcagaagagagtcatgttttcaatctgtgtagcacatttcatctgaggaactcaaagcatctcctcttcattatccaattcagccttctggcagggagatagggagctggcactgatatagccgtcttacgggcagagaaactgaggtgaaaaacagttaaatgtaactttaaggccgggcgtggtggctcacgcctataatcctagcactttgggaggccgaggcgggcggatcacgaggtcaggagatcgagaccatcctggctagcatggtgaaaccccgtctctactaaaaatacaaaaaattagctgggcgtggtggcgagtgcctgtagtcccagctacttgggaggctgaggcaggagaatggcgtgaacccgggaggcagagcttgcagtgagccgagatcgcgccactgcactscagcctgggcgacagagcragactccgtctcaaaaaaaaaaaaatgtractttaaagggaaacacttctgagagtcttggatagtagactctttctctctttagctatcccagattccacagtctgtgttgatcctatggagaagactcatgagagccctctaaattgtgacttagccctgattcacagcttggcatctaggtgcccaccaaattgtacctgaggttcttctcagtgatacaggcagacatgagccgaggtctttccttccattaatcatgcatctttcatctttattttgaaacagagtctctctctgtcgcccaggctggaatgcagtggtccaatttcagctcactgcaacctctaccttccaggttccagtgattctcctgccccaaccacccgagtagctgggattacaggtgtgcacaaccatgcccagctaatttttgtgtttttactagagacagggttttgccatgttggccaggctagccttgaactcctggcctcgagtgaaccaccccccttggactcccaaagtgctrggattacaggcaagagccaccgtgccctgtatgcatacttctaatggatcttgtcttttattataataaccatgagaaaaattccaatttcccccaccctatcctttaagaaacagaaacatctatttagtaccaggtatatggatggcatttttacaaagtagtagtcctaagtaataataattaagacagcagaaaagaggttgatttcttccatgaagtacatttaagcctcttattaaagaggtaatgtgatgccatccacgacttaggagcagcagcggggagcaggctgtggagaggaccagtgcagacatggccaagtctaagaaccacaccacacacagccagtcccgaaatggcacagaaatggtatcaagaaaccccgatcacaaagatatgaatcctatttttttttctttgagacggagtctcgctctgtggcccaggcgggagtgcagtggcgccatctcggctcactgcaagctccacctcccaggttcacgccattctcctgcctcagcctcccgagtagctgggaccacaggcgcccaccaccatgccggctaattttttgtatttttagtagagacggggtttcaccatgttagccaggatggtctcgatctcctgacctcgtgatccgcccrcctcagcctcccaaagtgctgggattacaggcatgagccaccgcgcctggccgataagaatctcttttttttttataagaatctcttaagggagtggaccccaagttcctgaggaacatgcgctttgccaagaagcacaacaagaaaggcctaaaaaagatgcaggccaacagtgccagggccacgagtgcacgtgcygacgctatcaaggcccttgtaaagcccaaggaggttaagcccgagatcccaaagggtgtcagccgcaagctcgatccacttgcctacattgcccacccccaggcttgggaaatgtgctcattcctgcattgccaaggggctcaagctatgtcggtcaaaggccaaggccaaagatcaaaccaaggcccaggctgcagctccagcttaggctcccaaaggtgcccggacacctacgaaggyttcagagtagatatctctgtctgccaatgtgaggacagaaggactggtgtgacccccctggactgccatctgcatggggctggggtcctcctgtgctatttgtacaaataaatctgaggcaggaaaaaaaaawaaatcaataaagaggtaatgttaaggtgtagatttgggcatcaagcattacgacttagtttcaccttgcaaagccaggtcatttcaggggaaaaaagcttcctccttttttgtttaggatttttctaagggaattctgttaatagcactattgtgtgtgtttctcccatgtcagtctatcaggtgtttgaaagtgtggctaagaagtatgatgtgatgaatgatatgatgagtcttggtatccatcgtgtttggaaggatttgctgctctggaagatgcacccrcttcctgggacccagctgcttgatgttgctggaggcacaggtaatgtcgagtttggtatccttcactaccattgagcatgttttacagaaattagtctctcttgtaatgagctagctcacctaacacgaggcrgaagatggtgattgaaaatctgcatacttataacttctgagaaaggcacgcacttatctttttgactgaatatcaatcaaaagcatagaataacagttttgtgcctgtcacttttttttttttgagataggagtctcactctgtcgcccaggctggcatgcagtgtctcaatctcagctcattgcaacctctgcctcccaggttcaagcaattctcctgcctcagcctcctgagtagctgggactacgggcgtactccaccatgcccagctaatattttgtattttagtagagacggggtttcactgtgtttcccaggctggtctcgaactcctgagttcaggcagtcygcctgcctcggcctcccaaagtgctgggattacaggcatgaacctggccggtgcctgtctgcctgtcacatttccttttttttttttttttggagatggagtcttgytctgtctcccagactgcagtgcagcagcggtgcaatctcggctccactgcaacctccacctccggggttcaagcaattctctgcctcagcctcctgagtagctgggattataggcatgcaccaccacgcctggctaatttttgtattgttagtagagacagggttccaccatcttggcctggctggtcttgaactcctgacctcatgatacacccgcctcggcctcccaaggtgctgggattacaggagtgagccactgtgcccagctgcctgtcacatttctaaaatacacagattggctggcgcagcggctcacacctgtactcccagcactttgggtggccacggtgggtggattgcctaaggtcaggagttcaagaccagactggccaacatggtgaaaacccatctctactaaaaatacaaaaaaaaagccagtgtggtagctggtgcctgtaatcccagctacttgggaggctgaggcaggagaattgcttgaactggggaggtggagggttgcagtgagctgagatcgtaccattacactccagcctgggcaacagagcaagattccgtctcaaaaaaaaaaamaaaaaaacgcaggattacaaaggaaaaagtcaaatttttgaccagtgacatttcaccatctaaatgactgttttatcttctgcttaacctttaacccccttttcttcttttttaggggatgagagaagccttttatcactttatataagtttttgaggctgccttttctgcttgatttgctatcacatcaaatatcaaaagtttgtgcacagtcctttgttacttcttgtacactgagcatttggagagaaaaatgtcatgattttacacaatgcgtcttggtgatgtcatcgtacatgttaaattacattagaggctgggcgtggtggctcacgcctataatcgtagcactttgggaggatcacctgaggttaggagttcaagaccagtctggccaacatggtgaaaccccgtctctactaaaaatacaaaaattcagctgggcgatggcggggtgtggtggctcatgcctgtaatcccagcactttgggagcccgaggcggtcggatcatgaggtcaagagatcgagaccatcctggccaacatggtgaaaccctgtctctactaaaaatacaaaaattggtcggttgtggtggcatgcgcctgtaatcacagctactcaggaggctgaggcaagagaattgcttgaacccaggaggccgaggttgcagtgagccgagatcaagccaccacactccagcctgggcaacagagcgagactctgtctcaaaaaaaaaaaattaaaaataaaataaaataaaaatagccggcaaggtggcgggcgtctgtaattccagctactcaggaggctgaggcaggagaatcactggaacccaggaggcagaggttgcagtgagccgagattgtgccattgctctccagcctgggctgcagagcaagactctgtctcaaaaaataataataataataaataaatacataaaattacattagaataatatataatgtaataatttgataattagtaacgatagagtaatgtataatgataaattacaatagaataatctctatacttgaaacatatttatctgtagctatgttggtgtgatcctctccccaaatggaagctcagagggcaagaagacaccttgctctgtagaggktaatttagcagaatctaccaaaatctaaaatgcatataagcctaggatcccacttttttttttttttttttttgagtccaagtctcgttcttgttgcccaggctgaagtgcaatggcacaatttcggctcaccgcaacctctgcctcctaggttcaagcgattttcctgcctcggcctcctaagtagctgggactacaggcatgtgccaccacacccagctaattttgtatttttagtagagacggagtttctccatgttggtcaggctggtcttgaactcccagcctcaggtgatacacccacctcagcctcccaaagtgctgggattataggcatgagccatcacgcctggcggatcccacattttcaattcttttttttttgagatggagtcttgctctgttgccccggctggagtgcaatggcatgatctcggcacactgcaacctccgcctcctgggttaaagtgattctcatgccttggcctcccaagtagctgggattacaggcgcccatcatcatgcctggctgattttgtgtatttttagtataggcaaggttttactatattggccaggctggcctcaaattcctgacctaaggtgatccgcccaccttggcctcccaaagtgttgagattacaggcctgacccactccgcctggcctcacattttcaattctatgtcgcctaaagaaaaacttccacaaagatttagtcacatatacgctcattgcatcacatttaatagtaattaaaaattggaaataacctatttcttccyaataaggacatggctttaaattaaggcatatccagtctatgaaatattgtttatctatttaaaacaataaggaaaacttacaagtaatgatggaaaggttgcaaggacatattaagtgggaagaataagaaaacacgtggtataacaatgtatacaatatccctgtttatgtttttaaatgttgttatatgcatacctataaatatattgaaatatcgtgctcacttcagtagcgcatatactaaatttggaatgatacagagaagatgcacaaaataattaatatattgaaatatatggccgagcacgttggctcacgcctgtaatcccagcatttgggaggctgaggcgtgtggatcacgaggtcaggagtctgagaccagcctgaccaatgtggtgaaaccctgtctctactaaaaatacaaaaattagctgggcgtggtagcacacgcctgtaatcccagctactcaggaggctgaggcaggagaattgctttaacctgggaagcggakgttgcagtgagctgagatcgtgctactgcactctagcctgggaatagagcgagcctccgtctcagggaaaaaaaaaaaaagatataaaataaaaaatgactggagaatgactggagaatacctaattggttggacatatgggagaaacaaggatatatttcttggaaatagtgtaggaaaaacaaagacaaggaaacagcttttttttttttttttttttggaaacggtcttgcactttcgccaggctggagtgtagtggcgtcatctcggcttactgcaacctccaccccccaggcctcaagtaatcttcccatctcagcctcccaaatagctaggaatacaggcatgtgccccacacctggctaatttttgtaatttttttcgtagagactgagtttcaccatgttacccaggctggtctcaaacctctgggctcaagcaatctgcctacctcagcctcctgaagcctgaagtgctgggatcacaggcgtgagccaccgagcccagccggaaacagcattataagaaaggaaatatagggccaggcgcaatggctcatgcctgtaatcccagcactttgggaggccgaggcgagtggatcacctgaggtcaagagttcgagaccagcctgaccaacatgatgaaaccctatctctactaaaaatacaaaattagccaggtttggtggcacatgcctgtgatcccagccacttgggaggctgaggcaggagaatcacttgaacctgggaggcagaggttgcagtgagctcagatcgcgccattgcactccagcctgggcaacaagagcagaaactccatctcaaaaaaaaagaaagaaagaaaaggaaatatagaaaagagaggaaaaaagaaaggaaataggattctacaaagcactggatttgtcctgaacaatatttaccaggtcacagtattataaacacttgatttggtttttttttttgagatgtagtcttgctctgtcgcccaggctggagtgcagtggcgcgatcttggctcactgcaagctctgcctcctgggttcatgccattctcctgcctcagcctcctgagtagctgggactacaggcacccaccaccacgcctggctaattttttttttttttttgtatttttttagtagagacggggtttcatcatgttagccaagatggtctcgatctcctgacctcgtgatccaaccgcctcggcctcccgaagtgctgggattacaggcatgagccaccgcgcccggcctcagtttttattttatttatttatttatttatttttgagacggagtttcgcttttgtcactcaggctggagtgcaatggcgctatctcggcccactgcaacatctgtttcccaggtttaagctattctcctgccgcaggctcccaagtagctgggataacaggcgcctgccaccacacctggctaatttttgtatttttaaaaatgtrgagacggggtttcaccatgttggccaggctggtctcagactcctgacctcaggtgatcccccagtctcagcctcccaaagtgctgagattgcaggcatgagcccagcccaatttctttaattaaaaaaaaaagttagtgttgaaatgagtagaaacttccacgttcacacactcagctatgattgtgcctctgcactccagctagggtgatggagtgagtccctgtctctaacaaaaagaagaaaggacttggctttcagccacactgcatccagttagctaacacaggtactcctgtgcctctgttacccctttgggttttaggaaatgctgtttcttccttttttatttttgttttagtctgcatctttcctcatgttggcttcccacaggtgacattgcattccggttccttaattatgttcagtcccagcatcagagaaaacagaagaggcagttaagggcccaacaaaatttatcctgggaagaaattrccaaagagtaccagaatgaagaagattccttgggcgggtctcgtgtcgtggtgtgtgacatcaacaaggagatgctaaaggttggaaagcagaaagccttggctcaaggatacagagctggtgagtcctgcagaaggcagacacaggggaagtatttgtatctttatagaataaggtggaatatgtaaaatattgaaatgctttatcttttggctttcagaaacttatagatgggcaggttgaagatgatttgcatggctgaatctagtttgtgtgctgttatatgcattatgtatgcatagcagcccattgagtgagcttacccagccctatgtgactgggatcactagatcccaagtaagtcaagaatcttacccaagtcacacaacttctcagtggcagatcccaaattggagttgaatcttcagatctcagctctgagaccctgagacagaarttttgctgtcatttcccagcagcttcagggtgacttcggtgtatcattcccattcttgaaccattccattctcctgtccatactaggatagtttgattgctgtgcaactggacctctcatctcctgtaaagaaagaacttctggctgagcccatggctcacacctataatctcagaactttgggaggccacaataggaggattacttgagcccaagagttccaggctgcagtgagctatgattgcacctctgcactccagcctgagtgacagagygagaccctgtctctaaagaaacttaaacaataaaaaaagaaataacttgcccttcagccacaaggagtgcagttagctagcagcctccacctattagcacatcagcctctgcctcagtttccaagggaggccaggctcttttgtggcagctcgtagccaatggctgaacactgtgggactactagggcctggatattttccaagcaagactctttaacagccagcctttgttctggaggtccctattgggtaggctgagcctttgtcagatctgcattaaggtctaaaggcttttcttgctcagtctttcttcctctccctttgtctactctgtgtttcccctgccacacacacaaaaaattattatactccttggtccatctcagcatgtttctcagaggacccatctgatacactcaaagaaacactcgtgaacagtactcctcacacttccccactgtggtaaatacgaacagcagataggcagatgactgcatgcctatctctgtgagattactgcaagctcaaaatggatgatttgtgtgctagcttaaaaatgtaaattgtggcagcgaggtggctcatgcctgtaatcccagcactttggaacgctgagggtgaaggatcgcttgaagccaggagttcaagaccagcctaggcaacatagtgagactctgtctctacaaaaaatttaagttagccaagtgtggtggtacacacctgtagtaacagctacttgggaggctgaagcaggaggatcacttgaatccaggaggtcgagactgcagtgagccatgatcatgccactgcactccagcctgggcaacagagtaagaccctgtctcaaaaaaaaagcaaatttggccaggcgtggtggctcacgcctgtaatctcagcactttgggaggccgagggggggtggatcccctgaggtctggagttcgagaccagcctgaccaatatggagaaaccctgtctctactaaaaatacaaaattagctgggtgtggtgacacatgcctgtaatcccagctatttgaaggctgaggcaggagaattgcttgaacctggaaggtggaggttgtggtgaaccaagatggtgccattgcactccagcctaggcaacaagagagaaactccgtcctggcaactgcaccctgttggcccagtttttgttgttgttgttgttgttgttgttgttgttgttgtttctgagacagagtcttgccctgttgcccaggatggagtacagtggagcgatctcgggtcactacaacctctgcctcccgggttcaagcaattcttgtgcctcagcctcccgagtagctgggattacagctgcgcagcaccatacccggctaatttttttgtatttttagtagagacggggtttcactatgttggccaggctggtctcgaactcctggtctcatgtgatctgtccacccatgcctcccaaagtgttgggattataggtgtgagccactgcgcccagcccagcttttcagagccgctattctgccctcttccatgctggccagggaccacagatggccactgtgaggggcagtggtatataacaaagaacgtccctcaggtcaacatcagcatttctctccttctcctcccccaccatgagtgtctatggttattttagctcaaatcttcctcctcttcctcctcccacccccagaaggagctgcctagacgagctgcagcccacttggcccccaagctgaagggctcctttgttaaccatcaatactggtcagaaggcggacagtcgctagtgtttttagacaaaggcactatgtttccttactcctactgacaaacatgtttcccttctctctggtactcagccataaagaacggaaaacaaagatattgaaatgataagcagtgttccatttctggaatcatctcttccattgcatagcctgcccgtcgagctctcctaagcaccaagacaaatgcatctgtgtaggaattattaagtgccccatagtacagatttatctttcctccttgttttatcaatctccaataatcatacctttgcaaaaacatcatgaaaagtagaaactaagtaggaggaccctagaaattatttaataaatataaaagttaatgtgtggtcgggcgcagtagcttatacctgtaatcccagcactttgggaggctgaggcaggcagatcacctgaggtcaaaagtttgagaccagcctggtcaacatggtgaaaccctgtctctactaaaaatacaaaaattagccaggcgtggtggtgcgcgcctgtaatcccagctactcaggaggctgaggcacgagaatytyttgaacccaggaggtggacgtcgcaccactacactacagactgggtgacagagcaaggctctgtctcaaaaaaaaaaaaaaagttaatgtgtaacttaactacttttttttttttttttgagacggagtctcgctctgtcgcccaggctggagtgcagtggcgcaatctcggctcactgcaagctccgcctcccgggttcacgccattctcttgcctcagcctccgcagcagctgggactacaggcacatgccgccacgcccggctaatttttgtatttttagtagagatggggtttctctgtgttagccaggatggtctcgatctcctgaccttgtgatccgcccgcctcggcctcccaaagtgctgggattacaggtgtgagccactgcacctggcccttaactacttttttttttaatgtatagcatggttatgtgttttatttatattttttatgtagcactttccttcccaaatggaagaatcnnnnnnnnnnnnnnnnnnnnnnnnnnnnnnnnnnnnnnnnnnnnnnnnnnnnnnnnnnnnnnnnnnnnnnnnnnnnnnnnnnnnnnnnnnnnnnnnnnnnnnnnnnnnnnnnnnnnnnnnnnnnnnnnnnnnnnnnnnnnnnnnnnnnnnnnnnnnnnnnnnnnnnnnnnnnnnnnnnnnnnnnnnnnnnnnnnnnnnnnnnnnnnnnnnnnnnnnnnnnnnnnnnnnnnnnnnnnnnnnnnnnnnnnnnnnnnnnnnnnnnnnnnnnnnnnnnnnnnnnnnnnnnnnnnnnnnnnnnnnnnnnnnnnnnnnnnnnnnnnnnnnnnnnnnnnnnnnnnnnnnnnnnnnnnnnnnnnnnnnnnnnnnnnnnnnnnnnnnnnnnnnnnnnnnnnnctatcgcacctggcctggaaaagtattaagaagaaagtaaatgttaaccataattccaacattcacagttgcccctcaatatggtaatgtttccttcctttttcctaattattccctttttataaagttgagaacatcctatatatacaatttatttatttatttgtttgtttatttatgtatttatttttgagacagagtcctgctttgtcacccaggctggagtgcagtggtacgatctcagctcactgcaacctccgcctcccggttcaagcgattcccctgcctcagcctcccaagtagctgggattacaggcaccctccaccaagcccagctaatttttgtatttttagtagagagggggtttcaccatcttggccaggctggtctcgaactcttgacctcgtgatccacctgcctcagccttccaaagtgctggggttacaggcatgagccaccgcgcccgtcctacaatttagtaatcctgctttaatttactatggtatcaaaagatttctccaagtcattagaaattccttgaaatcattatttttattttattttattttattttatttttgagacggagtctcgttctgtcacccaggctggagtgcggtggcatgatctcggctcactgcaagctccacctcccaggttcacaccattctcctgcctcagcctcctgattagctggaactacaggcacccaccaccacgtctggctaatttttgtatttttagtagagatggggtttcaccgtgttagcccggatggtcttgatctcctgacctcatgatctgcccgcctcggcctcccaaagtgctgggattacaggcgtgagccaccacacccggccaaaatcattattttttatgctattcttccatatggatgtttcatgattcatataaccaataaccaattgagaattctttttttccccaatgttttgcatgtagcacaactttgtgacattcttatttgtaatttttgcatggattcattcgtttactgactgtataaccttagtcaagtgtttaaactctaataactacttcgtactaggaggtgatatgccatagctgttgaaaacataggctctgggttccagtccatctgtgtgaccttgggcaagcaacctttctctttttgctttttattttttcgagatatggtcttgctgtgttacccaggctggtcttgaactcctgggctcaagctctcctcccacctcagcctcctgagtctctgggattacaggtgcatgccaccgtgctcagctcagactttaaacctttctgatgttcactttgctgacctgaaacatgaggataatggtagtaactctctcacagagttggtatgaggatatactaagataatctatctaaagatgtacataaaataacacagaccctgccacttgataagggccctctaagcagtagctgtgatgatgatgtcaatgtcctttccctaaaaatcaaatcactgggtcaaaaggcatactttctttttttttttttttttgagacagagtctcgctctgtcacccaggctggagtgcagtggcgcgatctcagctcactgcaacctccacctcccgaattcaagcaattctcctgcctcagcctccccagtagctgggactacaggtgcatgccaccacgcccggctaattttttgtatttttagtagagacggggtttcaccatgtttcgatctcctgacctcgtgatctgcctccctcagcttcccaaaatgctgggatttcaggcgtgagccaccacacctggccaggtgtacttatttttaaggcccttgttagatactgttaatttgctttccagaaaggttattttcatttaccttcctctatacagtcttctttttgtattttacatctaattcgctgtaggttgtataatgttaaagtctaatcaagatccttggaggacacagccaccctgataggggcctctggtgatctctgaatctcagacctagacacgctgatgctctatgattccaataaaaccagtaaaactctgctaaattctgtacttagagtaactcagttaatacttttagtaaccctatagagtaggcactagtttttaactccattttacagatgaggaaacagacaaagtagtttattcaagaatacacaggccaggcacagtggctcacatctgtaattccagcactttgggaggccgaggcgggaggattgcttgagcccaggagtttgagaccagcctgggcaagatgacgagacctcgtctctacagaagaaatttttaaaaactagctgggcagggtggtgtgtgcctatagtcccaactactggggatactaaggcaggaggatcctttgagtccaggagtttgaggatgcagtgagctgtgtgccactgtactccagcctgggtgagaaagcaagacctccccatgtctaaaaaaaataataatgattgattaaaaatataaaaggaaaaatatgtatatataaggaatatggtgaagctgggattagaatccaggcagcctaaccacccaggacttgggctctccagctcaatgctctacatgaaatgaattcactgggggcaggaaaaacagctacccacactgagaccyggaactcactttctstttcaggacttgcatgggtattaggagatgctgaagaactgccctttgatgatgacaagtttgatatttacaccattgcctttgggatccggaatgtcacacacattgatcaggtatgaatggctgcatcctcagcttgtatgastctcaggaaattacctctgttgtagagctacagtgagtgaggaaagaaggagagttttgttttttgagatggggtcttggtatgttgcccaggctagtctcaaactcctgggctcaagcagtccttccacatctgcctcccaagtagctgggattacaggaaccttacaggaacccaccaccacacccagggagagagagagagagakagatagatagattttttttttaatcttaaaaaagataatgtttaagggcttggcgcttgagtggaatgcctgtttgaagtttagggtcctccatcctttaagttgacaaattttctagtcacaaaattgaaaaagactgaaaccacagagctgatctccatagaagtctgtcttacttggattggtattcacatctttgggatttgtcttgctctggccttttgtgtatttcctcatacttgtgaagctgcctgaccctgtgaatttgcagaaaatcagagacatgtcagaggctgacaaagacaagggccctcaaacactgttttgacaaaagatagctggattcatggcttttctacaggaaaaggggaacrttcagctcttaatctgatggagctcttctttgttcctactttattttttgtagagatggggttttgccatgttgcccaggttgatctcgaacccctgagctcaagtgatcctcccacctcagcctcccaaaatgctgggattacaggcctgagccaccatgcctggcctttattcctactttaatattctgttcaaaacacttgaagaccatgtgcaaggcaaagagtttcatttcagtaacatggtctctggttgcctgggtcctctggttaagtggtaagttctttatggtgttcatcagcttggtttgcatcacctttcctatgtcagtagccagtttattattttgttgaatgaaaacttttttttttttttttgagacagagtctcgctctgttgccaggctggagtgcagtggcgcgatcttggctcactacaacctctgtctcctgggttcaagcaattctcctgcgtcagcctccggagtagctgggactacaggcgtgtgccaccacgcccagctaatttttgtatttatcagtagagacggcatttcactatgttggccaggatggtctctgtctcttgacctcatgatcctcccgccttggcctcccaaagtgctgggattacaggcgtgagccaccacgcctggggaaaaaaattttttaataggttcaaagttcaaaaggcacaaaaggttatatgtgacaatctccctcccatccttgcctcctctcccattcagtgcttctcccttcagacagtcaccagcttcttgtgtatctttgtcaagatgttttgtgaattggttatgattcacataactaataaccaattgatatttcttttttttcctatgttttgcatgtagcacaactttgtgacatccttatttgtaatttttgcatggattcgatcatttgtttactgactaaccttagacaagtgtttgtgatgttttgtgccaaggtgtatatactattttctttctttttcctttttttttgtttggagacggactctcactctgtcacccaggctggagtacagtaacgtgatctcagctcactgcagccagttgagagttcaacctcagctggtcttgaactctttggaggcctccaggctggcctcccaactctttaggaggccgaggtgggcagatcacgaggtcaggagatcaagaccatcctggccaacatggtgaaaccccgtctctactaaaaatacaaaaattagctgggcgtggcggcacgaacctgtagtcccagctacttgggaggctgagttgggaaaatcccttgaacccaggaggcggaggctgcagtgagccgagatcacaccactgcactccgcctgggcgacagagtgagactccacctcaaaaataaataaatagatagatggatagaataaaagtaaacaaatatttcttggagatttttccttgtaagtacataaagagcactggctctttttatttttttattttattattattattattttttgagacagagtctcactctgtcacccaggctagagtgcagtggagagatctgggctcactgaaacctccgcctcctgggttcaagtgattcttctgcctcagcctcccaagtagctggggttataggcatgcaccaccatgcccgactaattttgtatttttannnnnnnnnnnnnnnnnnnnctatcaacatagcaagacctcatctctgctaaaaataaaaataaaaaattaactatacctgcatgcccagttaattttttaaaataaaaaaaataatttaaaattaaaagttaatttaattaattaaattaattttaattattttaatgaatttaattaattaaaagtaattattgccactgcactccagcccaggcgacaaagtgagattccatctcaaataaagggttaatgacatgatggtatgttcattaacgaaaattctgtggacactaaaagtggttttcttggccggtcacagtggctcacgcctgtaatcccagcactttgggaggtaaggcgggcagatcacttgagctcgggagttcgagactagcctgccaacatggtgaaaccccgtctctactaaaaatacaaaaaaaagctgggcgtgcgtggcgcgtgcctatagtcccagatacttgggaggctgagggagaagaatcgcttgaacccgggagcagaggttgtggtgagttgagatcacaccactgcactccagcctgggcgacagaacgagactccgtctcaaaaaaaaaaaaaataagttgaatagattccatttatatttatatttcataatttagtctcttattaatcgttaaagatgcttctaatcttgtgctattcaaacacttgtcttttgacaactgtttgaacagcaaattttaaaatgacttcatttcataaaatagaatgtgctgggcacagtagctcacgcctgtaatcccagcacttcgggaggccgaggcgggcagatcacttgaggtcaggagtttgagaccagcctggccaacatggtgaaaccctgtctatactaaaaatacaaaaattagccaggcatggtggcgggcatctgtaatcccagctacttgggaggctgagacaggagaattgcttgaacccgggaggtggaggttgcagtgagccgagattgtgccactgccctccagcctgggcgacagagcaagactccatctcaaaaaaataaaaaaataaataaaaatagaatgcatcccaatgagttgagcagaagacattggctttatagacacagaaagactgaagaaagcagagaagcaaagaacaaagagtgtattattcatcctttcaaaactrcttttcttgaaaggctgtgatagggaggcagaataataaaaaaaaataggctgggcgtggtggcccaagtctgtaatcctagcactttgggaggccaaggtggaaggatcacctgaagtctctagttcaagaccagcctggccaacatggcgaaactccatctctactaaaaatgcaaaaattagccgggtgtggtggcatgtacctgtagtcccagcaacatgggaggctgaggcaggagaatcacttgaacctaggaggcagaggttgcagtgagctgagatcgtgccactgcactccagactgggtgacagagcgagactctgtctaaaaaaaaaaaaaaaattttaaacaggagtgttggagaaattgactgtatctctttctcctgatctctctagaaggtcagctgacaacttagtttcagtttggtgatgtggaactatggagtcaaaagttgggtgactccatcttgattcttagtctggtctgttggaacctagtgcagaaacaatccaaaacaatggcttcctatactttttatttaaaagtgaataaccggccaggcatggtggctcacacctgtaatcctagcaccttgtgaggccgagacgagtggatcacttcaggccaggagttcaagactggcctggccaacatggtgaaaccctttttctactaaaaacacaaaattagttgggtgtggtggtgcattcctgtaatcccagctacttgggagtctgaggcaagagaatcacttgaacccgggaggtggaggttgcagtgagctgagatcatgccattgcactctagcctgggcaacaagagcgaaactctgtctcaaaaaaacaaacaaataggctgggtrcggtggctcacacctgtaatcccagcactttgggaggccgaggctggcagaccacctgatattgggagttcgagacaagcctgaccaatgtggagaaaccccgtctctactaaaaatacaaaattagccgggtgtggtggtacgtgcctgtaatcctagctactcgggaggctgaggcaggaaaatcgcttcaacctgagaggcggagtttgtggtgagccgagatcatgccattgcactccagcctgggcaacaagagcaaaattccacctcaaaaacaaacaaacaaaaaattagcggggcgtggtggcaggcacctgtagttcagctactcaggaagctgaggcaggagaatcgcttgaacctgggaggcagcggttgcagtgagctgagatcacaccactgcactccagtctgggcgacagagcaaggctccattgcaaaaaataaaaataaaaaataaaaaataaaaaaaaaagtgaataacccacgtacatgtcattccyacagtagaagcatttctgtaagctagattccttgaagtaaaattgctttatcagagaggatatccattgtgattttgaaaggtaactctaaacttacccttcatgcaattgtaccaatctgtagtcagtttagattaccccagctaactttgtctagtcaccggcagcagaatgcctatagcatttgggatacgtagggttattgctgctgttacagcttcccaagtgagaasaaacaagaggtttgtgggccatgataacttttttaatgcctgcagaagctaaagctgtcttggcctcatggaaytgagtgaggtctactgaggagtgtgtcctgttgttccttgtcttgctcaggcactccaggaagctcatcgggtgctgaaaccaggaggacggtttctctgtctggaatttagccaagtgaacaatcccctcatatccaggttggcattgttaatagggctttatcttcattgtatagccaaggtktcccaccccgaaatggattgaaaatagccagtaagctataagcatgaactttgtagttcagagtaccagaggtcagccagttctgaatgacaatacctaggccacaagagtctcaaaccagacccaagttggcttacatatgtatattaagaaattgacttagaagcccctatttaaaaatcaggaaatgcctggtccaatggtagtgggttatcagaacttattagtggcaataacgttgctactcaacccccctctgataaatttgactggcttaaaaaaaaaaaaaatcaggaaatttgggccaagtgcagtggctcatgcttgtaatcccagcactttgggaggctgaggcgggaggatcacttgaggccaggagttcaagaccagcctgggcaaccgtgagaccctatctctaaaaaaaaaaaaaaaaaaaaaaaaatttaaatcaggaaattttccataaaaatctgaatttccagcttcacttgagaaatcagatacatggcagccctgggtaggcctatctccccacatgccacagggaggtctgagtagtaactgtcccttctccacttcataatacttcctaactgtacctgtcagcacttctactggtcttgtacctgacccacttaattcaggttcttgcttgatccctataggcatttgagtttgtgaccccaggtttagtccttctttcttcttatctagggaagaagtgagrggcatgttctaatcttcatcttttacctttttgtttgcctaggctttatgatctatatagcttccaggtcatccctgtcctgggagaggtcatcgctggagactggaagtcctatcagtaccttgtagagagtatccgaaggtttccgtctcaggtatgaaacttctatagctttaaacaaaggccctacagtgatatccaggctaccctggctttatcatctttccttgtgtttcaggaagagttcaaggacatgatagaagatgcaggctttcacaaggtgacttacgaaagtctaacatcaggcattgtggccattcattctggcttcaaactttaattcctttcctatcatggagcatgaaccagtcatatcctgttgaaagcctggaactgaaggataatctggcaaatgagacagcagcagagcatctcctcttaaggatacgtgccttggactcatgtttgaatcgaacagtctcraagtggaagaacaaattcttgtcacttttttacagctttctttggagctgcttcagtccatctcccagaggcatttggtctgtatctttgctcaactgctaatttctcttggctgtagggtgtgtggttaaggtacaaccacccctaaagctcagttttgaagtgagtgtatttatagcttctctgctggtgctgccttctagagggatgatagatcatttgaacccartgacaatttttaacyagaaaatttaattgtacctgaatcaacctttcagcctaggacgaagtytaggcccaagtcagagtattaatgatcatgagaattgtgtgctgaaccagtaaacgagtttaccttttgatggtacttgtcattttttcttgaagggggtaaggaaaatatatttttcttttacttttttttttttttcgagatggagttttcctctgtcacccaggctggagtgcagtggtgcaatctctgctcaccgtaacctccaccttgtgggttcaagcagttctcctgcctcagcctcccaagtagctgggattacaggtgcgcgccaccacgcccggctaatttttttgtatttttagtagataagggattttaccatgttggccgcgcctggccagaaaatatatttttcatcattctttcagtcctcttccataaaaagctactatgtaggttgggtgcagtggctcacgcctgtaatcccagcacttacgtaggccgaggcaggtggatcacgaggtcaggagtttgagaccagcctggccagcatggtgaaatcctgtctccactaaaaatacaaaaaattagctgggcatgatggtgtgctcctgtaatcccagctactcaggaggctgaggcaggtgaatcacttgaacccaggaggtagagattgcagtgagccgagatcgtgccactgcactccatcctgggtgatagagagagactctgtctcaaaaaaaaaaaaaaagaaagaaaccttttcactaagtccttgttggaaaataaatgtaccagcaaaatcctgctttcatgtcttatatagggagcttttttgtaagagtacacttgttttatagcaaaaaaaaaaaagtttgaaaatgatgtaagctaaccttcagtactcagagatggagctgagcagacttcttgtctccttgttatagtctactgttgtctttctttttcattttttgtcattttcttttctttttttttttttttgagacagagtctcgctctgtcacccaggctggaattcagtggcgcgatttcagctcactgcaagctccgcctcccgggttcacgccattctcctgcctcagcctcccaagtagctgggactacaggcgcccgccactgcgcccagctaatttttttgtatttttagtagagacggggtttcaccatggtctcgatctcctgacctcgtgatccgcccgcctcggcctcccaaagtgctgggattacaggcgtgagccaccgcgcctggccttgtcattttctaaacttctccctgaatacagtccactgtttgatgttaaaatgaggccataaatttttttaagagacagggtctcgctctgtcactcaagctggagtgcagtgacctgatcatagcccactacagcctaaactcctgggctcaagcagccctcccacctcagcctcttaaatagctgggtctacaggcatacgccatagtgcctggttaattttttaatttgtaattttttttttttttggagaccgagtctccctctgtcacctaggctggagtgcagtggcgtggtcttggctcactgcaacctccgcctcccaggttcaagcaattctcctgcctcagccttccaagtagctgggattacaggtacctaccaccatgcccagctaatttttgtatttgtagtagaaacaaggtttcaccatgttggccaggctggtctcgatatcctgacatcaggtgatctgcccacctcaagcctcccaatgtgttgggattacaggtgtgagccaccatacctggctgccataattttttttttcttactagagacagggtctccctgtgttgcccaggctgctctcgtactcgtgggctcccaccttggcctcccaaagtgctgggacatgaggcactgcacccagccataaatattttgagtgtggatgaatcataaggttttaaagaggccttgctaagaaactgcagaaattggtccggcacagtggcctatgcctgtaatccgagcactttgggaggccaaagagggcagattgcttgaatccaggagttcgagaccagcctgggcaacatggcaaaatcccatctctacaaaaaataaaaaattagccagatgtggtggtacacacctgtggtcccagatatttggaaggctgaggtgggaggatcatctgagcccgggaggcggaggttgcagtgagtcgagatcacaccactgcactctagctttggtgacagagtgagaccctgtctcaaaaatgaattgcagaaatcagtctgtgacttggctaacagtttgtggataacatagttcaaaggtatgtgaaagggcttcagatacgctgcttcctgacccagcacagtaaggatcatttacgtgccttcacttacaagatcttgccctgtcactaaaaagcttctagatagagctagctatatacaactctctcaaagaacagcagctaagagcatttgataaatgcttagaaaaacttagcttacattttcttttcagccagctggagcctattggcttttgaaattaacaggaaggaacaggcactggaaggagcttcataaaccatcaacccagtcttatctccatagcaacatggttttctcacatctgaataaaaaaacaaaaaagctgccaacttgacagtaaatatgggacagatcatattcaactaaaactcccagtgtctagctatcagtcttgaatcagcttttgggtctgtagctagagacagatcatccgttctgagtagggcttaactggacaaactaaagctttggaggccaaattccctgtgggcttcaaatagaaatatagccaggtcactaaagagggaaaagggatagaaaaaatatgagttaggccaggttcggtggctcacacctgtaatcccagcactttgggaggccgaggtgggcagatcacgaggtcaggagatcgagaccatcctggctaacatggtgaaaccgtctctactaaaagtacaaaaaaaattagccttgcgtggtggtgggtgcctgtagtcccagctactcgggaggctgaggaaggagaatggtgtgaacctgggaggcggagctttcagtgagccgagatcgcgccactgtactccagcctgggcgacagtgagactccgtctcaaaaaaaaaaaaaaaagaaaaaatatgaattaaaccgggtgtggtggctcgtacctgtaatcccaacaccttgggaggattgcttgagcccaggaattcaagaccagcctgggcaacacagggagactccagctctacaaaaaattcaaaagttagctaggcatggtggcatgtacttatggtcccagttactttggaggctgaggtggcaggatcacttgggcccaggaggtcgaagttgcagtgggctatgatcacaccactgcactccagcctgggcaataggagtctcaaaaaaaatgaaagttagaaaaaaggaacattttcggtctgtttatataaatacaaacataaaattaccccagttgcagtctcctgtttattccacagtacctcatccttttttgcagacagcagggaaaaaactggcacaatagtcaaaattgccaggtttggtggctcacgcctgtaatcccagcactttgggaggcagaagtgggcagattacctgaggtcaggagttcgagactagcctgaccaatatggtgaaaccccatctctactaagaatacaaaattagccgggcatggtggcacatgcctgtaatcccagctacttgggaagctgaggcaggagacttgcttgaacccaggaggcagaggttgcagtgagctgagatcacgccattgcactccagcttgggcaacaagagcgaaactctgtcttaaaaaagtcaaaatcttgcacctctaccctgaaacccttccaatcctaaagtagcacaactttgctaggattcttaaaaccacacattctgaagaaaaataaacttccaaatatgttactgacctaattctactcttacaatgggagttatcacccatcaattccaatctatcgccctcttctgtgtagcagtcacctagctgcttagaaatccctatggcatcttagagatccatgggaaaacataggctaactacaagtcaggacccttcttgcagtttcccaagatgggtgtgggttgttccagcctgtcttatttcctttccacctacaagtctgccatatttgcttttctacgactgcagtcctcttaaaattgatagcaggaaacctctgatagctacttgtccccagctttaattgggtcttttcaggaaaaggtatcaattcacacttgttcctgaccacagcaaagcacagcacagcaggctgataaagtctttgcaggaatttacattattagaagagcatgaaaactgctgctcagaaacatttactttcccctaaggccaccttctttctaggcaggggagggggctagacaagggtcctggaatccatttcattatcccaactttgttttgagcttatttccattttatagccatagaaagcttcaagtactactacatacacatccatcaccacaacctgaggccaaaggcccagaacattctatagcaatgtcttaacaaatatccttaaacattgatttttttcagattaggactaaagatttaatttaaatgtttctttatcatgcactgcatttctcaacatgcacaacagttgcaggatgggtgagagaatgtgactaaagagtactgaaataccccacagaaacttaacttctgtaaggatggactcatccccaccaacctgggcatctgatcaagtgaccgtcttcaacgctgttatttgaacaaattgtaattcacacacatacacatctgcatcagatttattttttaaaggaatggattttgagagaaaacaacgtgggcagaagtatggaatagaaaataaatacaaatgtaggctattctgctaattgttttataaccacgacaaactagtacagagaatgccctgtacaaaacacaacaaaggttcaaacatcgagatgttcccttagcaaggctgaaaatttcagtctctggtatttggaatttaggctgcagtccttgtttttggatggatcactgggtgtgtggcacagtccatgcttttaaccagatttgaacagaagaatggccacttggcccaggtagaagtagatgaagtgtttggtttcatgtgtcacataactaccgaagttcctccccacgatgcaatgccaggtgggattgtacttcttgtcaaattcctggaaaagacaaaagaaaagaactaggattttaattaccagaggtcagtgtttgcctcttggataagccagagcctgtaggggcagaaaggaggaacgtcagcatctgcaaattcttagaatgaaagaatgttccccagctccaagccgcctacatagtacattaatacaaacatacttgcagtctgagcgaagatgggaatggaggctgaggaggtcaaaggacgaaaggtcagccctaaagacagggtgttttgttattatggtaattacaccttcataccttctataatattcattgacagacggtgacatcaacaggtgtagtttatcatgttctgtgtagagaactaaactaccctactgtatttgccatgcccccaattccaagaaaacggcaaaaaattagcccatcccattcctcatcacaaagatcttaactgcacccctgcaacacaagacttttccaataggacaaaacttcaaacagcattgtataccaaatgattgcggatcaaaattaaatttacaggaacacaatactgaagcactccactgttgctgtaaaaactgctggaaacagaatctgtcaactggccaaattttatccttaattattatccaaacagccgtcctcttcacatctatccggatgatgctaatctactaccctgtccactaggttagcaagttgtaggaacaactcttcaccatttctcccaccctaagaggtactggggagtagaatgcctgtggggggcattgggtggcaacggttatctttctctgcaaaatt

SEQ ID NO: 95375 - DNA, 332332 bp, Homo sapiens
aggaaactcaaggatatgctcattacagcttaacaagcttggagcccatgaaggagctagtgaagctggtgacaggggtcagctggtccaggggatgctgaataggccagatgggcaaatcacacygtagacaaagagctttccccctatcctgctgggccaccaccctgacctccaaacaaacactaagggcacaaatttgttcccccttatcagctgcttagctcagcagctgctgccatrgctttctgtttccacatcttgcctttttctaaaagttgcctttttgtctaacttctatgtgaggcaggaggcggccaaggaacccagggcataatgaagaaatggtgyggtagccatcagaggactgagttcttgaatagagtgtttcaggaggggcagaaaatagattttttaaaacaacttctgggaaatgtggaggcccgcaaaatacacaaaaagcactggttactagttctctccctggtcactgaggataacacttccttcttggaactcctactacgtggtagaagtgggggcatgtctaaaatggattgtaaattgtgactaaagcagccatgaaaataagagctggccaggctaggaacataagtgggccttaagagttagcttcagactaaatgagaatcagccagggtttctgaggagtaatgcagtctattgtgtccttctctctggaagcaattatgtttggtgcaaccactacttgaaatagtttataaacaaacatttcaaggtgattttgtgataacactctgcaggggtaactgaactccgtggaccacctctcttaggaatgtggttatttaaaagatgttttcttgttaaaattgggtattaaaagttatgacaatgcaacagaagaatagagaaataggatgtaatgcaacagagaaataagaaacgtgttttctgctacccaacaaaatggcccctttatttttgcttttgatattctcagaatgtcagagaactgtttattcctacttaatagaaaaacagaagtcaacaagccaaagtgtaggacagggaaagcgtggcagggaggtagggagcaggtcaagaagagagggagaatcagttaccttggaaacaactccaaaggaagagtcagaaggacaggatgcagaagcttcgtggccccattggctcccccatgcccttttttaactcaagccccttctatgccacagtcctcccatatttaggtaatcagactcaattcagtaggcattgattgcacacaccctgtcctaggtgttgggtaggatgaaaggttgaagagtggtgatgaggatgacgattggagatcagagaaccactgttcattgagtgctggccatgcagcaggcctgaccaaacacgagcccttagtgtcctgggaccaccatggcacctgagcctgggtttaaatcccagcccacttcaggtgagttatttaattttcctggattttgtttatgtgtaaaatgaggataataatggtaccaatctataacagatgggtccagttgaggagacagaaccacacaaagtatatctcaacaacaggaagttaatataaagaactggtttcccaggtgctgcagggctggatgagaagaaaaggagtgctgaggcaatcacagatggtaaccggagcatgcaggtttcatctccagggttggaggaacaaagggaagtggttgcaccatcagaagctggacctgaggtgaaaaagacttgctgctaagtctgcggaagcctgggaagcctgattctaggctgtgaaaaggggctggaggctgggcccaatggctgatgccgggtaaatggctgttgctgggcggatgctgcagggaaccaacagcgagcaaacagaaaggagaacatttcccctctccagccctcagtctccctttagtgccccctattggcagaaatgaacaagaaccctgctgccaaagaatgggtttatagggcccaagcttcagccataagccagagyagaaaaagctagatctggagctgagcaaaatggcatgatagctcgtgaggctaaatgacttagcatttataaagtgcttagaacagcacctggcacrtaggtggtaagtgtatgctataatgcattttaaataaataaataaatccagcaaaaaacaacgtgagaagtgatgttaggatctcagttttatccatgaggatggtgaggcttaaagaggtcacataaaatgctcaaagtcactcactggtagagagtccagactatctggatttaaaggtgttcacttttatgagcctctttgcacaataggagagattttcaaaagtgcaataaaagtgaataggagagataaaaatagcagagtttgtgggcatcagggagggagggtaagctgctggttggcactctcggaaggctcattggaggaggtagtgtttgagtggaattgtaaaggacagacagggcttcaactggcagatgctggaagcagaggaaactgctgagcaaaggcccagagttcagggcacataagcagagtgatgagtatgcagaccaggaagaaataaatgatccccataattctcctttgctgcaaataataataataatgatagagttgaagtgcttacaaatattactagcagcaatatgaatttaaagagttctttggggcaatcatgaacattaaatgttgtgcagaatattacgaataagtttgtgaagcaatgggattaactgaaaaataatgaattttatattcacctcctttttaaaatccatgtgtaaggtcattaacatctgctttcagaagataagagatcttgttttaagatagctgactgagttaaaaatctgacttgaagccattttgtgcccttttaacaatgtaccaaatttagtttcaattaattccactccttggaaggttatgcacaaatttgaaccacaattatatttaattcaagaaactgagttaattctaagtgccaggcactttcccaggtatagagatgcaaagaattataaatggtggttgtagtcatcaaggaattcacaatctagtagggaaacaggtagatatttaaatctctgtaatcaaaatggaaaagcaaaagtattaactatacctggaatatggaactgttggctggaggagatggaatgagattccttctctgccatcccaagaagcatcattacaatgatggcagaagtcagtaaatgggatatgaaaggagaggggccaagacaaattatggagacccattagttctatatagtgctggaccagatcaccagatcacaagccaacttcctggctggctaaggaagtcagagttgtatggagttggaagaagatctgtaatgtttccatggttctgaacctggtctctgaaatcctatattcagctctaaaagtaaggaagttgccacaaaagcagaaatggaaaccacacgtgccaataaaaacagctcacagtttctgatcacccactacgggctaagcacttcaacagaaaatgagtattatatttagacttctagttagtggtccctaggaaccattctccccttcttccttttagtaatagactccccactgaacttcagtagagcacatacatgcctttcctactacaaacaatattttccagccctccctgtagcttgatatgaatgtgtgacttagtttttaccaatggaatgtgagtagaagtaatatatacaactttcatgtcacttccacagaacagatttgctttggctgggcatagaggttcacgcctgtaatcccagcactttgggaggccgaggcaggaggattgcttgagcccaggagttcaagaacagcctaaacaacacagtgagaccctgtcccaattaaaaaaacaaatcgatttgctttccctctgtttccttgttcccgctttccacggctgggatgctaacatggtgttagcgctgtgtagaggcgggcaacagctacagaagagcctggcagcaaaagagaaaacctgggtccctggacaactgtatggaactgagaagccaccacctcctcttgctactgccttctgtcactgctcctggtggacctgcctttaaccttttctttcctgtcaccaaagaacaaacacacacacaaaacaacattgtagaattatgcctgggttaagagaatataggccacaggtgaggacatgtaagagacttttatatgtaaactgtacaagctttagtgaattgatgctataaaaattatgttcgcttgtttggaaacctttgttgtttacatcctggtttcaaatgactaaagttacctattagatatcctccaggggagggaaaggtcattgtattcagcaagggcaaactggttcaacaatcaatttccaaatatttgcatgcactagataccaaagatggaaacacacatgatctctgccccccaaagatgttgactggtgggaagaagtgccaatataaaaatagtgttgaaaggatttagttaatactattggttgcacacaatcacacatctgacacaaactggtttaaggcagaaaaaaagatcatttataagcttatgtaaatatgcagtccaagagtaaacctgacttcagggatgtaaaccctactggatgagaatcttcatggatggggcctggaaagctgtatttttsccccatccttatttcctaccaggtaattgtaattctgttttggaaataactattttacgtagatcattcaagttgaaaattagatattacacagggaggagagagactgcaggaggagacgattattcctgaagggatgagggaatcctgaactcaggcaggagcaccccttagcacattatgggccatgatgtctgcttggtacttacaacggggctaatgctggcaccgggagctttgaaggggtgtcagcagaggaccgtgccaactgtctgtcagtaagtctaagggttcacgatccttatgaaagtggctgccacttcccttcacctaacaactatttattgtgcaactacataccaggcagtgagctaggcagtgaggacacacaggttcacaggcaaagagcctctcttcatgaagcttacattctagacaggagatagtcagtaaacaatcagaaaaacaagcgcgctactgactgtgttaagttctctaaagagaaaaaccccttcactctatagttcctagtgcaggctgacattgaatgggatagaggaaaggccttcgagttgacaacttagtggagaactgagaggtgggaatgaagtagtggtttgcaaggctggagtatgagccttccaaggagaggcaatagcaagtgcaaaggccctgcagtgggagggaaccaagtggggtgaagacacaggaaggatcaagtatggccagagatcagtgagaaggaaagagtagagtaggataagtctgaagaggctggcaagagccagtttatgggaaatcttgtaggccctgaaagtttggattttattccacacacaacaaagtgtttgctttaaaaggaatctcctgactactgtgtggagaaagtataaaattaagtttggggctagatggaccccaagatccctgtctggccccaataacccatggcaaactccatggggtcctcagragtcctcttagtaactgtggctcctatgtcaatgatgcttaatagaagtatccgcaaaaacagaaatgttctgtatctgcatacaagtggctcttgaactggaaatgtggctagcgtgactgcagaactggatgttaaattttattctatatagactaatttatttacgtttatatagccacacgtggcgaatggctattatattggacagcacaaggcaacactgagcaccgaatgcctgaggatttctactccaaatcctgaaggcacgcccttccccgaatgttgggagagtgcgaggatatgctgacccctaaacgcaaatccccctctgtgcatttagtcttgccaagatggagagtctcaggcgggcattctgagctgcttcttgtcactggggaaaaccacgtgcacgcagtgctgaggcgccccacgcgcgtcctcaggggaagccaggcactgagaacaaaggttgtgggaccgctctttgaggaactcaccagctccgcgagctcgcggccgccagcgcggtccacccattggcgggagaggactcacagaccgcagctcctcaccccgcctgctccgcagcgggaccgcgtagacctcagctccccgagcagcgcaggtgggccagggaaggagaggaccgaggcaagccaccacgcgggattaggggtacggggacccctcgccgcgcagtcgcctctttttcacagggatgggggcaggggtggcgccggctgtcacccgcaccggatctgcttccagggcttggtttcgctttgcctggctcttggctaggcctggcgccccgcgcggagccgagcaggtggcagccgaggagtggcgggggctggaacatttaaccctttgggagcacctgccctctcccagagggcgcgtccccggatcaggcccggtgccccgcagcgcgcgtgggtcctggctggctggaaggaggccctgaccttgctttctctcccgtgccaggtctgccaaggaccatgggtgccgckctggggacaggcacgcggctggctccctggccgggccgggcctgcggcgccctcccgcgctggacacccaccgcgcccgcccaaggctgccactccaagcctggcccggcgcgccctgtgcccctgaagaagcgcggatacgatgtcaccaggaaccctcatctcaacaaggtaatgggccagagggcaggacggcccgcgttgcgatcccgtggctgccgsaaaattgcgccccgccccctggacccagaaaggatcctcccgggcgcccttccagcggtttttctgtttttgccttgcaggggcttgttgtgacttggtttggctttcttgtccctcctctcccttttatgcgtggagagaggcgaccagtaatgcagggagcctaatttcttctgcagtaacaacacagaccaggtttagatcctcgcggtcagtctgacctgcggtcagctctccccttgatgcttactaattttattggtcttgggcagttcatttaacctacatgagcctaggtttccttatctgtaaaagagatataattgtcttaggaatgtcgtgagatctaaagagaaaatgcgggtagaaaatgggggtacgttagaacagtgcctggtacccagtgggagaataaataaggttatgattattattctgagaaaaagattaatttgagagcaaggatggaaaagtctagacttatagaaattttcgagcttgcaggagcattagagatcctagtttaaacctcttcttttacaaaaaacaagacaaaggaaacttgcccaaggtcaccagctagttagttctggctctgccactggaatccagatctccaatgctttggtcgagttcaacccaccgctagctcttttgtatttgtttttgggaatagagtttagtatctttggttcagaggattgggtgagagaaatagaagcaaggacagatttagtcctgtctccccctacctcctcaaattaactcacatatctcatttaacttatctgaggcccaactttctccagcctaaaatagatattatgatagacccaccatttctatctcatttggttattgtgacaataaaatgaatcactgaacttgaaatcatattttaaactgtataaagtgctgaataacaattactgcaaaataaatttttttttcataattgctctgactctggattgtgaaattcaggtgaggcagtctgtatggaaaagatgtttttgagaagtaggaacaactatataatgtgaagtattgtgactgtttcctacagaactaatagaagcrgctaaggaaaaaaaaatcaaaatcaacctctatcacattggagtcctgctctttccaaaagaaaccttaaattgtttggacgctaccactttccaaagtgttcaaggtgtttgttatcaccttgaattactttgctagtaagcgttagaaaatacaaactggcttaagcacacaaaggctcctttatctaaagaatctagaggaagggttgcaggcacggcttgaaccacaagcccagatggcattgctcaagatgcagattctctctggctctctactctgcctctctgcaaggtcagtttcatcctcaagctctattcagtgaagtctctcacttcgttattgccacagtcctccatctcctgttctcacaccacatcatccaggaatagaaagatacttttattctggtagctcttggggaagagaaaataccctttctctgacgcctcagaaagcgaatccttctgccttrttgactctgattagattctctcttcccattcccaaaccaaaaccaatcaccagtaattaaagccggtcagagcccacccctggagttaaaatggggtttaaggtagggccacccacaccatctggcttggaataaagggaatatagatcctcacagtaaatatggatagtgtcatcagaaggaggaggaatggatgtagaaagcaaaacaataaattcccactacaggctccaatcattgtgaaaataattgccttagaattactggcatgttaccaaccagcatttattgctttgttaagtagttaagaaaatgaaggaagatctttaagtctttttttaaaacctaggttttggtcccctgaaatcattcttgcccctgtcgtttgcctctgatgtaaatttttttctcccaagtactataaataagttgttgatatggtttggctgtgtccccatacaaatctcatcttgaattataatccccataatccccacgtgttgtggaaggaaccctgtgggaggtaattgaatcacgggggtggttcccctgcatgctgttctcgtgataatgaatgagttctcacgagacctgatggttttataagtgcctgacacatttcccctgctagcgctcattctctctcctgccaccctctgaggaggtgccttcgccatgattgtaagtttcttgagacctttccagccatgtggaactgtgagtcaatcaaacctcttttccttatcaattacccagtcttgggtatttcttcacagccgtgtaagaaccagactaatacaggtgttatccataaatctaaggacctgacctttccatgatgttaaacaacatcttttatatrttcctgaagtcagctgatgcttgtctgggataagaagggtatctagaaggaggctgacagcctgttggcatcccctattcactcacccttggggacagaaggggagcaacagagggagtgcttcctgggagttactgtgagtgcccttctcttcccactggagtgccaccctctggctgttctgttgtcctccagtgctcagagagtctccatggaaggcttgagccttggtactttgcatcagccaggtgggaagatagtgctgaggttaaatagaacaatgaggttattactgaggaagcaaaatggaagtgcagttttgaaagagtcttcaatgctgtgcttagtgttcatgtctgtgggtggatttttttctgttagaaggagagcccttccaggccaggtaatgagattcgtccacctgtgtttggcatggggtagtscctgaaagatctagcttaacattaaattcttggaatgtgttcactagatttgcagctcatttcgacagattaggagtggcatttaagtcgcagctgtatgacagagggtggtcaggaggtggaattatctgagagaagaggtgccgaccagggcaagcattgctgctattgtgcattcactgggttctggtaccagctccatcatgctctggccatgtgatctgtgatgaatctcataagctcctctgcccgtgttacactactgctttgaggatcataggagacagcccccatgtggtaaatattaggtgataatgaggatgatttccataattggggtaggaaggcccctcagagatgatctagtctggaattgttcagactatgagttacaaactatgagacatgaaattagcttagtggatctaccagcaatttttttaaagaaatgtattagaatgaaatagaaaaatagcaaatgcattgaagttaataaagatggatattttatcaggtcagcatgtaaaatgactatttttactgtggattgtagtaacaaaaagtttttgaaaataattgttctcatccaacattttcattttccaaagaaaagagaagccaaggaagaagccaagcaactccacagagattatcattggtcatagaagtggacagaggcagcctgcctgctgtatttgagtctactgaataatgatggcaattcacaactgcatagactgatttaggcatattcctgatggtgacagaattgatactagatgattccaagctccctccaggagtctagattttctaaatgatgcaaattaactacgcatgagcttctatttttctttttaaaactaatattctgcttttcttctaaaatttatgtaatgacctcttctattgtccatacggatttggcaacagagtaaatctttggttatatgacccctcttttactcacattaaataggcaactatcagccccacttcacagggttaccttcataggaagatgccatccccattctataactgtagcaacatgttgatgggccatcaacatatttctgacctccatttacctatagtgtcttttaggaagagccgtcctattccccacttgccaaactagatctgagtcccctcctatttgtcttatcacactgttgccttctggcactgagcacactattacaatggctggttggtttgccttccacactagaccatgrggacagacactctgtcttgtcacatggcattagctctgtctracttgaaatgctcaataaatatttgttctttaaatgatttcaatcatgtcatggcccctttcctctcaacttcattaatctgaatgtcactacttcacagcccaatgctcttgctgcctaaataaatgcctacatatggcccatttgaaggaaatgcacctgcttgactctcatcttcccagacttcagggcatttaactgaaggagtgcattatttcccagaacacaccaatcttccccctttgatccgtgtgtgccagcagtgattttttttgccacgaaattccactgatccttcacctgcttctctgtagttttttcatctcttgagcttgatagtcagggaaagaatgaatggaaagtgtgcttagtcaagtcactgtgattatggaccaggacatttcacgtagtggggcctcagagactgcaaggcaccacgggtgatggccttcccaggtggacttgatacatttagagcagtaaacctgcaaaggcttgaaggacagtgctgcagtgttggctgtacatctgagactgcacagatttcagctgaatcycttctgtattcaatgatgatttattagacttccacacagctaggatttgcctttgaataaagtatatgattttgttctctgctagcttagaacttgatcttgtcttctttggatgaggggaggttgttactatggatttggctcatcaatcaggagatgttaagtgtgttgtatggataattagaagtttattggtgatgctggaaggcagattacataatatatcttctcgagatctctgcttcagrtatgatgtaaaattgtgcctcctagttgagagaaacartggattattgtgtaaatattagctccataagtggcaatttactctagatttgagcttgtacaaagactcagttgcattgaagctcaaatactgttcagatatgttggaacaaactagcagaggcaggttgaaatcaaacttttctctgttgaatactgtcctagcttcacaggattactaagtattggtattggggctttgtttttagaacagctcagagaatgtttattagttgctacaggttaggcaatgacaacaatgtgaaccccagatacagaggcttaaataagatagaagtatatttctctgttaggaacaagtctgggcaagcaatcatgagttgatgtgtggtttgactttgtttctctgccatccagtatgcattttacatttcaaagtccaggatgacaggtcttacctctgctrtgaattccacgcagaagccaattgggaaggggaaatcccttttaagggcacaacttggaagttataaatatcacttctacttacattcagttggccagaagttggtcatatgctacatttagctgcaagagaacatggaaaatgtaatctttggctgggcacccatgtattcagctaaaaattctacattattaaataaagggaaattggaaaatgaagatactaccacaaaatgttgatatgaagctttcattgtttcactctgtcaattttaccccagcctttaaaaatttatctgtttctctatatccccactaccatcagcctttttcactcctttgccatctcatatctagattatgcaagaacctctgaattaatctcccaatttccagtcctcttcagtcttcagtcttctcctctagatgcttagatcttggtcctatccttgaccactctctttctttcagaccccttatggaatccaccagaaaatcctgttaccctgtcttcagactaaatctggaatccagcccctgttcaccatgggtcaccactgattgaagcctccagcatctctctgcttaatgcctgcagcagcytcctggctggtctcctctttccctttagygcctctcatttattctcaacacaatggccagggtgatttttttttaaaactaagtttcaacatgtcactctttgcttaaaacctggccacatccaagtcttcatgatgcctttcatattgatgctctctaacttcatctcttgctactcttctctgcctcactcactgccccaaccccattggcctcctcagtcagttgtgctcctacccagactttgcactgactgatcctccttcctagagcacaccacccctccatagccacatagttaactccctccctttttcaaagtttctcactttctcaatgatagctgctttgaccgacacatgtgaattcatgaacagtcctttcaaccttcttgctctccctacacatcctgctttcccccatagtatttgacacttcctcatatgctatctaactgcttacttagtatgtctattgcttattgtctgttcacttaagatccacttaggcagggactttgtctgtttgttcattgatgtatcacaggtacttagttggtgctcgtaagcagttagtgaatgagcgagtcattcaaagagacatctgctaaggctccctcctctcatctcttcccttcaccctgccttttgccaaggccccttctttcaccctggtgactctcatcgcccagtgtcctcatctgtggtgttgacatgcccatctggagtgtgtatacatcttacatcagccctttgggtgcccagaggcccactacagaatgaagtgctggaggagcacagcacagagatattaactgtttatctccagctttaagcagagcccagggaagaaggaggtcctattcagaagacacaggtggtgccttggaaccagaggtggacaaggacaattcttgagcccacggaaaacacaaaaggagatgtttagggaatagaccagagttaggagaccccagcatctgtcagcatctccactggaactcccaccctccactctgagtccttggagacttcatccctgctcggaatttctgtatttccactgttctgtaggacccctataaaagtcaaaggaaaccactcagagcctctgctcccaagggtctgaaaatcaaggaaatatggaatggggtgcccggaacacaagagggagatttgctgttcctggaacctgaagatgatactcagaaagtgttttctcataggcatgttgtaaataattgaatcatcctccaaggaaagtatatcgtgttaagtaagcatttgtgtaatcattattaagactttagaaacattggcttatgttaatgaatgcttaattcaaattgcaaaatactaagtagactgtatactcatgaatgttattgtaaaaagatataaatattaaagggcttggaagtaaatgtgtgaatatgattgtgttatgtcagtgagattatgggagatttatttcctctttatgtacttttcctttaatgttccattttcttttcaattttaggttacagtttctgtygggaattgtttctagagccaagtaaataatactcagaccaactttgggaagctggcccatctgtaacatataggtggagatccctctgaagtcgtctcctttcaagcttttattattagttatcttctagaggcaataaagtaataacaaaatgttaacagaggagcctgctgcctgttctaaaagcagttgtaaacagcaatatctagattacgtcagcagcaacgctgaagggtaaatcccatacagaaatatgtgttttgcccagacctgggccaactgacatcttaagtcagtctaagtctgggctccatatatggcgtttttttggacactttttcaggctcatctctagtctccctgtttccaatttatgttggcctttgtggaccctgaggtttatggccttattttacttcacatttttgtcatttctaccaaaggtttctttttatcatctactcttttctttccaaatgtcagtattatagtgagaggggggaaaaaaggccttttgatttctatggccattgcaaaaggatcactaatgtgcagcacttttgtttgcaaagacatggattacagtcagtttcaaaaaccttcactttgatgtgtagaaagtatatcgggaaatcctttgggggtggtatccgactgcctctctgatgcagagcacaaaagatgctctatgattgtgaggaaaatgtgatggatatcctacagttgggtgtgccgaggtcagtggttaaaagcatgcattcattttgtatctgaaaggttgccatgcagcccagttgaaacacaattcctaccaaaaggacacagtaaagagtamaatgcacctgtcatttgaggagagggatttttgatagaaagatccacagcttttgagaaacttgaatgagagaaagccaaagctgcattggctttctaaaagtgattcttgaaaactagaggkattttagaagatacagttgaatgatcagcaacttgagattattatattttaaaagcattttgtcttgattctgtgtcatcttttggtagtgagctacatgaagcccattacttaattggtcmtgaaacatcttcctctgtagtgtggaattctggagaaggcagtctctgttgatcactttgttttgttctattttgctttgctctttcagaaaactgaaggagggagtctacatctctataaattggcatagcttctgagttatgaggctgcccagggacttcccaacaggagagggattgccaagtgtacagtggagctagggttccagtcaaaatagacattctgcattcttctttctctggttttgaaagaggtgttgaagattccaatgcagattcctattatactgagttttctttggtaaygttatggagggaagtcaagtaataacagctaatgtttttaggacatgcagtgtgctaggaattgttctaagtagtttatatatgttaacccatttaatacaataccacaacattttgaggtagacactgttattatattattcctgttttaaattttattttcatttttatttttttacagacagggtcttactctgtcacccaggctggagtacagtggcacaatcatagttcactgcagccttgaactcttgggctcaagtgatcctcccacctcagccacccaagtagctgggactacaggggcaagctaccttgcacagctaaataaaaaaaaaattaattttctgtagagacaaggtcttgttatgttggccaggctggtcttgaactcctggcctcaagtgatcctcccacctcagcctctcagacactgttattgttcttwtatgacagatgagaaaaccgaggcataaggttagctaacttgccctaggtcatacaactcatagtggcagaactgagtcttgaactcaggccacctgattttagggcttatcccctacgctgtactaacacttctagtgtgcaggttccctcttatctgggactagtgcatgaagtctgatgtgctgtggcctttccagagaaataactagtgtattycctgttccctgytgtggacttctgattagcttttttcacttccactggctctgttagaattgtagattcttagagctggagagaactttaaagatcactggatgcctttttctctccctttaactttgtgtaattctcccaagactcatttgtttgtttaatttattcaatagtcattttctgagttcctgtttagttttaggcagtggagacaccgtggtcaatacaatacaatacaatacaatacaatacaatacaatacaatactctgccttgaaggagcttatagcgtaagaggggtgcaagtgaggaccagttagtaaggggcaattctaattcagtggttagatgtaacgagaggtgcattcatacaagtgctatggaagcacagaagagaggtgcagaaacacttccaatggcagtgytggcaaggctgacacctgtggaagtgtcagaggtggtagatgaagatggtggaggagaagctatttaggtcagataatgagacagaatggcattgtctctgagtatagtcatccattgcttttgtagctctatgtgcagaaattgagcaatagacatgtaccctgtaagagacctcatcttcagaaagctaaataatatcatgacatttctaattctacaaatagaattaaagacatctctccagtactttgacatgctctttggttttgttctttccctcacttttgtgttgcacaatgcctgggtgccccatccataccggatccacttaaaaactttggcatgcttcagggttcagcatctccagggtcacctctgctatgatgccctcctcgataacgccacatggcagtaattcattcatcctctacatttctttggcatgtagcatttgtagtmgtcatggctctttccacatttggccttagtgtacatttattagcacatgtatcgccatcatgtgcrtgtgttttcttcagatccaggagactgtcgtgggcatctcatagccagcatgcartgccttcctgatagtgtaacctcagtaaaaattagttacatgaattgcctctacattcccttctccttgatgtatcagaaactatatggtgaagactgatgatacatcagccccatctgtcagctcttttgaaaagatggtgaaaatcttgacctgaccctcttttagatcwctccatggggactggagaattttgaaagccacaaaaaatcttttatttcatcatacaaattttggaaatacatttctttaagagagttttctgctctgatgttgtgccaggtgcacttcctctaaagaatagcatcttttgtgatgagattatcaattctcatccgtgggctgctttaaagacattaaatttagacctgttctaacttggaacaggttagaggatttggggagtaaaggaaagtagtcagctagaatcaattttgtgtgacaccctcaaggggcatagcctgtgaccaggtattaggcagcagagctcaaaggctaaaaatcgagggaattacactcagaacaatctaagattccaatcccatctctgccattctctagatatgggatatttctctgaacctccatttccttgtctgtgaaagggatgacaataaaacatatctacttgacaarttgctataatgattaagtgaagtaatgtatgtaaagcagatggtaagtgtccaattagttcttgattaatgcacatcctaaagcttctgttgcattcctaacacattgtgaagccctgtgtgggctgcagaagtcacagatgtgatagagtttacatctggtacatgccccctgaaagcatccagtccggaaggagaggggaagactgaaggatcaaactcactttcgatggccatgggctacatctaattttggcagacttgacaggagaagagtgagtcagagaacaggcagactgggtggagactttagtgatgatttcccagtactggatagagcttaagcctggataatctagacatttgcctgagagaagcttaaattaaaatgtcactagcagcagaaattcaagtgtcatttaaagagctagtagttctggaagttgaagctggtgttgaagatagtggatatcatcagtagtctcaggattttgtcccaacattttggtatattctaaccmaggtttaaaaactaacttaaaaaaaaaatagatccagccaaatttggatctatctatcgattgattggtccatccatccattcagctatcatctatgtctctatctaccttcctgcctgtcaccattataacgctcccagtctcatgagattctgatagtgagacagsaagttaagagaatgtctaccatgggaatttaggataaaagttaaaatgttgtttcatagccagctaaatagggtatggctgggccaacttcacccagctagcagttagacggggcaggaagttttaagatagtctccatccacactgccacgggtagttaataaatacttgcatacacaatgtgaaccaaacttttctcctctgttggaacacaagatgatcatccccccagaagacaaagaggtcatcttgactagcatttaggctttgggcagataatatcctagcattttatcactagtctacataagttttcagaggccctgaggggttgatgtcctgtccaggaagtaagtggtgaaggggaactccctccttgagtgatgtctgtctcttctacctaccatctttgaaaggtagctctttgcctgccatcttgaaatagggtcttgaatcagcctcagtcaacttaggcagagggcttttgagtctctccataaaaaaacttgaatattaaaacaatgcagatgaagtgctttaatattaaacaacgtatgttgcaaacctaagcatctgttgaggtagctcctgctgtcgctcctgtgtgtccgtttctgatgactgtgtgagttcccagttgccaccctccttttgaattttatgtatttctttgcagtaacatgatcttgaaaacattacacaaactgacagaaagcttagccttcatgtcatactctcctttcttatctcttttatttttggtctattctaggcagtagattttttttgactggtaaaatcacttgaggtcacaaggacagtgaatagcaatgcagttgctgttgatgaaacaggagtagagatggttggtgtagagaaaaacctattaatagccatttttagaaacagacttttaaatccacccatcagagctgaaasatttcccctgttctcacactcccagagctggcagcagcttctcctcatgtctgaggagcctagccatgcttgtgggagatgatggcatgggtgccagtggggcagctggccaggtggtgccaggagcgagggcctgccaagcagaggggcagtcctgcctctggtaactggctttgactgcaggactggagggtccaagcatccttagccactctcttgttaactgagctattcaatgttctgtgatctactactgtcaactggacagagtcrgctgcctcctctggggctcaaaattactggcacaatcacattaaaaataataacaatcacatataatgcctactgtgccagttactcttacaggtgtgttacatatattatttgcaagcagaggaaaaattgcaggctgagtgcagtggctcacacctataatcccagcattttgagaggctgaggcaggtggatcacttgacctcaggagttcgagaccaggctggacaacatgatgaaaccccatctctactaaaaatacaaaaattagctgggctggtgacgcatgcctgtaatcctatctactcgggtggctgaggcaggacaaatgcttgaactcgggaggtggaggttgcagtacgccaagatcgcgccctgcactccagcctgggcgacagcatgagattgtctcaaaaaaaaaaaaattgtgaagaaggtaaactttgcctacatctctcccatctcctgttttcatggcctcttcttccttaaagaccgcctcatatatgaggcatatcctgaggttcttcatggtacccctaagatgctgagggttgccaacctaagaagagctattcatcttacattatcctgcttcctgtcctagaactcatgtcttctttacttgcatccctgaatccctgtccatccatccatccacccaatgtttactgagcacctgctatcttctaggcactgtgaggtattgagaataacatcataagcttgccagctatgattcttcttattgctgagtgtacaatctagtgagaaagacagataataaataagtgaacgaacaacattataaagatggttattattttttttctaaaggaaaatgatacctcaggagtctttcttctagtttggtcacaagttaataccatagcaagcatgtaattgtgaactgcagggctgcattatcttttttttattattatactgaagttctgggatacacgtgcagaatgtgcaggtttattacataggtataaacgtgccatggtggtttcctgcacccatcaacmcatcatttacattagctatttctggtaatgctgtccctccccttgccccccaccccctcctacaggccccaatgtatgatgttcccctccttgtgtccatgtgttctcattgttcaactcccacttatgaatgagaacatgtggtgtttggtttgctgttcctgtgttagtctgctgagaatgatggcttccagcttcatccatgtccctgcaaaggacacaatctcattcttttttatggctgcatagtattccatggtgtatatgtgccacattttctgtatccagcctatcattgatgggcatttgggttggttccaagtctttgctattgtgaatagtgctgcaataaacatacatgtgcatgtgtctttatagcagaatgatttataatcctttgagtatatacccagtaatgggattgctgggtcaaacggtatttctaattctagatccttgagggatccccacactgtcttccacaatggttaaattaatttgcactcccaccaacagtataaaagcgttcctatttctccacatcctctccagcatctgttgtttcctgactttctaatgattgccattctaactggcatgggatgatacctcattgtagttttactttgcattgctctaatgaccactgatcatgagcttttttttttttcgtatgtttatcagccgcattagtgtcttcttttgagaagtgtctgttcatatcctttacccactttttgatggggttatttgcttttctcttgtaaattttttttattattatactttaagttttagggtacatgtgcacaacgtgcaggtttgttacatatgtatacatgtgccatgttggtgtgctgcacccattaactcatcatttaacattaggtatatctcctaatgctatctctcccccctccccccaccccaaaacaggccttggtgtgtgatgttccccttcctgtgtccatgtgttctcaytgttcagttcccacctttgagtgagaacatgaagtgtttggttttttgtccttgygatrgtttgctgagaatgatggttcccagtttgatctatgtccctataaaggacatgaactcatcatttttatggctgcatagtattccatggtgtatatgtgccacattttcttaatccagtctatcattgttggacatttgggttggttccaagtctttgctattgtgaatagtgccacaataaacatatgtgtgcatgtgtctttatagcagcatgatttataatcttttgggtatatatccagtaatgggatggctgggtcaaatggtatttctagttctagatccctgaggaatcgccacactgacttccacaatggttgaactagtttacagtcccaccaacagtgtaaaagtgttcctatttctccacatcctctccagcacctgttgtttcctgacttttgaatgattgccattctaactggtgtgagatggtatctcattgtggttttgatttgcatttctctgatggccagtgatggtgagcattttttcatgtgtcttttggctgcataaatgtcttcttttgagaagtgtctgttcatgtccttggcccactttttgatggggttgtttgtttttttcttgtaaatttgtttgagttctttgtagattccggatattagccctttgtcagatgagtaggttgcgaaaattttctcccattttgtaggttgcctgttcactctgatsgtagtttcttttgctgtgcagaagctctttagtttaattagattccatttgtcaattttggcttttgttgccactgcttttggtgttttagacatgaagtccttgcccatgcctatgtcctgaatggtaatgcctaggttttcttctagggtttttatggttttaggtctaacgtttaagtctttaatccatcttgaattaatttttgtataaggtataaggaagcgatccagtttcagctttctacatatggctagccagttttcccagcaccatttattaaatagggaatcctttccccattgcttgtttttctcaggtttgtcaaagatcagataattgtagatacgtggcgttatttctgagggctctgttctgttccattgatctatatctctcttttggtaccagtaccatgctgttttggttactgtagccttgtagtatagtttgaagtcaggtagcgtgatgcctccagctttgttcttttggcttaggattgacttggcgatgcaggctcttttttggttccatatgaactttaaagtagttttttccaattctgtgaagaaagtcattggtagcttgatggggatagcattgaatctataaattaccttggacagtgtggccattttcacgatattgattcttcctgcccatgagcatagaatcttcttccatttgtttgtatcctcttttatttcattgagcagtggtttgtagttctccttgaagaggtctttcacatcccttgtaagttggattcctaggtattttattctctttgaagcaattgtgaatgggagttcactcatgatttggctctctgtttgtctgttatttgtgtataagactgcttgtgatttttgcacattgattttgtatcctgagactttgctgaagttgcttatcagcttaaggagattttgggctgagacgatggggttttctagatatacaatcatgtcatctgcaaacagggacaatttgacttcctcttttcctaattgaatgacctttatttccttctcctgcctgattgccctggccagaacttccaacactatgttgaataggagtggtgagagagggcatccctgtcttgtgccagttttcaaaggggatgcttccagtttttgcccattcagtatgatattggctgtgggtttgtcatagacagctcttattattttgagatatgtcccatcaatacctaattcattgagagttttcagcatgaagggttgttgaattttgtcaaaggccttttctgcatctattgagataatcaygtggtttttgtcactggttctgtttatatgctggattacgtttattgatttgcatatgttgaaccaggcttgcatcccaggggtgaagcccacttgatcatggtggataagctttttgatgtgctgctggattcagtttgccagtattttattgaggatttttgcatcgatgttcatcaaagatattggtctaaaattctcttttttggttgtgtctctgcctggctttggtatcaggatgatgctggcctcataaaatgagttagggaggattccctcattttctattgattggaatagtttcaggaggaatggtaccagctcctccttgtatctctagtagaattcggctgtgaatccatctggtcctggattttttttggttggtaagctattaattattgcctcaatttcagctcctgttattggtctattcagagattcaaattcttcctggtttagtcttgggagggtgtatgtgtcgaggaatttatccatttcttctagattttctagtttatttgtgtagaggtgtttatagtattctctgatggcagtttgtatttctgtgggattggtggtgatataccctttatcattttttattgcctctacttgattcttctctcttttcttctttattagtcttgctagcagtctatcaattttgttgatcttttcaaaaaaacagctcctggattcattgattttttgaagggatttttgtgtcgctctctccttcagttcagctctgatcttagttatttcttgccttctgctagcttttgaatgtgtttgctcttgcttctctagttcttttaattgtgatgttagggtgtcaattgtagatctttcttgctttctcttgtgggcatttagtgctataaatttccctctacgcactactttgaatgtgtcccagagattctggtatgttgtgtctttgttctcattggtttcaaagaacatctttatttctgccttcattttgttatgtacccagtagtcattcaggagcaggttgttcagtttccatgtagttgagcagttttgagagagtttcttaatcctgagttctagtttgattgcactgtggtctgagagacagtttgttataattttttgtcttttacatttgctgaggagtgctttacttccaactatgtggtcaattttggaataggtgtggtgtggtgctgaaaataatgtataatctgttgatttggggtggagagttctgtagatatctattaggtctgcttggtgtagaggtgagttcaattcctgggtatccttgttaactttctgtctcgttcatctgtctaatgttgacagtggggtgttaaagtctcccattattattgtgtgggagtctaagtctctttgtaggtctctaaggacttgctttatgaatctgggtgctcctgtattgggtgcatatatacttaggatagttagctcttcttgttgaattgatccctttaccattatgtaatggccttctttgtctcttttgatttttgttggtttaaagtctgttttatcagagactaggactgcaacccctgccttttttttttttccatttgcctggttgatcttccttcatccctttattttgagcctgtgtgtgtctctgcacgtgagatgggtttcctgaatacagcacactgatgggtcttgactctttatgcaatttgccagtctgtgtctttcaattggagcatttagcccatttacatttaaggttgatattgttatgtgtgaatttgatcctgtcattatgatgttagctggttattttgctcattagttgatgcagtttcttcctagcgtggatggtctttacactttggcatgtttttgcagtggctggtactggttgttcctttccatgtttagtgcttccctcaggagctcttttagggcaggcctggtggtgacaaaatctctcagcatttgcttgtctctaaagtattttatttctccttcacttatgaagcttagtttggctggatatgaaattctgggttgaaaattcttttctttaagaatgttgaatattgacccccactctcttctggcttgtagagtttctgcagagagatcagctgttagtctgatgggcttccctttgtgggtaacccgagccttttctctggctgcccttaacattttttccttcatttcaactttggtgaatctgacaattatgtgtcttggagttgctcttctcgaggagtatctttgtggcattctctgtatttcctgaatctaaatgttggcctgccttgctagattggggaagttctcctggataatatcctgcagagtgttttccaacttggttccattctccccatcactttcaggcataccagtcagacgtagatttggtcttttcacagagtcccatatttcttggagggtttgttcatttctttttattcctttttctctaaacttctcttcttgcttcatgtcattcatttgatcttccgtcactgataccctttcttccagttgatcgaatcggttactgaggcttgtgcattcgtcatgtggttctcgtgccatggttttcagctccatgaggtcctttaaggacttctctgcattaggtattcagttagccattcgtctaatcttttttcaaggtttttaacttctttgccatgggttcgaacttcctccttcagctcggagtcatttgatcatctgaagccttctcctctcatctcatcaaagtcattctccatccagctttattccattgctggagaggagctgtgttcctttgaaggggcagaggtgctctgatttttagaattttcagcatttctgctctgttttttccccatctttgtggttttatctactttttcgtctttgatgatggtgatgtacagatggagttttggtgtggatgtcctttctgttggttagttttccttctaacagtcaggaccctcagctgcaggtgtgttggagtttgctggaggtccactccagacgctgtttgcctgggtatcagcagcagaggctgcagaacagcggatattgatgaacagcaaatgttgctgcctgatcgttcctctggaagttttgtctcagaggagtacccggccatgtgaggtgtcagtctgcccctacttgggggtgcctcccagttaggctactcaggggtcagggacccacttgaggaggcagtctgtccattctcagatctcaagctgyrtgctgggagaaccactactgtcttcgaagctgtcagacagggacatttaagtctgcagaggtttctgctgccttttgtttggctatgccctgcccctagaagtggagtctacagaggcaggcaggcctccttgagctgtggtggtctccacccagtttgagcttcccagctgctttgtttacctactcaagcctcagcaatggcgggtgcccctcccccagcctcgctgccaccttgcagtttgattgcagactgctgtgctagcaatgagtgaggctccgtgggcgtaggaccctccgaaccaggtgagggatacaatctcctggtgtgccgttggctaagaccgttggaaaagtgcagtattagggtgggaatgacctgattttcctggtgccctctgtcacccctttccttggctaggagagggaattccctgaccccttgcacttcctgggtgaggcgatgcatcaccctgctgcagctcatgctcggtgtgctgcacccactgtcctgcacccactgtctgacaatccctggtgagatgaacccagtacctcagttggaaatgcataaatcattcatcttctgtgtcgctcacactgggagctgtagactggagctgttcctatttggccatcttgacttcccattgtaaatttgtttaacttccttgtagattctggatattagccctttgtcagatggatagatagcaaaaattttctcccattctgtaggttgcctgctcactctgatgctagtttcttttgctgtgcagaagctctttagtttaattagatcccatttgtcaattttggcttctgttgccattgcttttggtgttttagccatgaagtatttgcccatacgtatgtactgaatggtattgcctaggttttcttctagggtttttatggttttaggtcttatgtttaaatatttaatccattttgagttaatttttgtataaggtataaggaaggggtccagtttcagttttctgcatatggctagccagttttcccaacaccatttattaagtagggaatcctctccccattgcttgtttttgtcaagtttgtcaaagatcagatggttgtagatatgtggtattatttctgaggtctctgttctgttccattagtctatatatctgttttggtaccagtaccaagctgttttgtttactgtagcattgtagtatagtttgaagtcaggtagcatgatgcctccaactgtgttctttttgcttaggattgtcttggctatataggctcttttttggttccacatgaaattgaaagtagtttttcctaattctgtgaagatagtcaatggtagcttgatgggaatagcattgaatctataaattattgggcaatatgaccattttcacaatattgattgttcctgtccatgagcatggaacgtttttccatttgtttgtgtcctctctgatttccttaagcggtggtttgtagttctccttgaaggagtccttcacatccttgtaagttgtattcctaggtattttattcccttcataggaattgtgaatgggarttcactcattatttggctgtttgtctattattggtgtatatgaatgcttgtgatttttgcacattgattttgtatcctgagactttactgaagttgcttgtcagcttaaagagtttttgggttgagatgatggtgttttctaaatatacaatcatgtcatctgcaaacagagacaatccgacttcctctcttcctatttgaatatattttatttctttctcatgccagattgccctggccagaactgtcaatattatgttgaataggagtggtgagagagggcatccttgtcttgtgccagttttcaaaggaaatgcttccagcttgtgcccattcagtatgatattggctgtgggtttgtcataagtagctcttattattttgagatatgtcccatcaatacctagtttatggagtgtttttagcatgaaggggtgttgaattttcaaaggacttttctgcatctattgagataatcatgtggtttttgtctttggttctgtttatgtgatgaataacttttattgatttgtgtatgttgaaccagccttgcatcccagggatgaagccaagttgatggtggctgacaagctttttaatgtgctgctggattcggtttgccagtatttaattaagaatttttgcattgatgttcatcagagatattggcctgaaattttctttttttgttgtgtctctgacagattttggtatcaggatgattctggcctcataaaaacagggcagagtccttctttttctgttgcttggaatagttttagaaggaatggtaccagctcctctttgtacctctggtggaatttggctgtgaatccgcctggtcctgggcttttttggttggtaggctattaawtactgcctcaatttcagaacttgttattggtctaatcattgatttgtcttcttgggagggtgtatgtgtccaggaatttattcacatttttctagattttctagtttatatgcatagaggtgtttatagtattctctgatggtagtttgtatttctttgggatcagtggtgatatcccctttatcattttttattatgtctattagattaataaagaagaaaaggagaagaatcgttctagcagtacatctgttttgttaatctttccaaagaaccagttccctggattcattgattttttttttttgaaaggttttttgtgtctctatctccttcagttctgttcttatcttagttatttcttgtcttctgctagcttttgaatttgtttgcttttgcttctctagttcttttaattgtgatgttagggtgtcgatttgagatctttccagctttctgatgtgggcatttagggctacaaattttcctcttaacactgctttagctgtgtcccacagattgtggtacawtgtctctttgttctgtaaactcccctcttaatactgctttagctgtgtcccagagattctggtatgttatatctttgttctcactggtttcaaagaacttcttgatttctgccttagttttgttatttacccagtagtcattcaggagtacgttgctcagtttccatgtagttctgcagtttggagtgagtttcttaatcctaaatkctaatttgattgcattgcagtctgagagaatgttagttatgatttccattcttttgcatttgctgaggagtattttacttccaattatgtggtcaattttagaataagtgctatgtggttctgagaagaatgtatattctgttgatttggggtggagagttctgtagatgtctattagctccacttggtgcagagctgagttcaagtcctgaaatatccttgttgattttatgtctcgttgatctgtctaatattgacagtggggtgttaaagtytcycactattattgtgtgggagtctaagtctctttgtaggtctctaagaacttgctttatgaatctgggtgctcctgtactgggtgcatatatatttaggatasttagctcttcttgttgcattgatccttttaccattatgtaatgcccttctttgtcttttttgatctttgttggtttaaagtctttttttatcagagactagtattgcaacccctgctttttttttgttttccatttgcttggtaaatcttcctccatccctttattctgagcctatgtgtgtctttgcatgtgagatgggtctttttttttttttcttttttgagacggagtctcgctgtgtctcccaggctggagtgcagtggcatgatgtcggctcactgcaagctccgcctcctaggttcatgccattctcctgcctcagcctcccgagtagctgggacaacaggtgcccgccaccacacctggctaattttttgtattttttagtagagatggggtttcactgtgttagccagcacactgatggatcttgattctttatccaatttgccagtctgtgtctcttaattggggcatttagtccatttacatttaaggttaatattgttatgtgtgaatctgatcctgtcattatgatgctagctggttattttgcccattagttgatgcagtttcttcacagtgtcaatcgtctttactttttgatacgtttttgcagtggctggtaccagtttttccttcctgtatttagtgcttccttcaggagctcttgtaaggcaggcctggtagtgacaaaatccctcagcatttgcttgtctgtaaaagattttatttctccctcacttatgaagcttggttggctggatatgaaattctggcttgaaaattattttctccaagaatgttgaatgttggccttcactctcttttggcttgtagggtttctgcagagagatccactgttagtctgatggacttccctttatgggtaatctgacctttccctctggctgcccttaacattttttccttcatttcaatcttggtgaatctgatgattatgtgtctyggggttactcttctcatggattatcttagttttgttctctgcatttcctgaatttgaatgttggcctgtcttgttaagttggggaagttctcctggataatatcctgaagtgtgtttcccaacttggttccattctcctcrtcactttcaggtacaccaatcaaacgtaggtttcatctcttcacatagtcccatatttcttagaggctttgtttgttacttttcattctttgttctctaatcytgtcttcatgctttattttactaagttaatctacagtctctgatatcctttattccacttgattgatttcactattgatacttgtgtatgtttcatgaaattcttgtgctgtgttttttagctccattaggtcatttatgttcttctctaaactggttattctagttagcagttcctgtaaccttttatcaaggttcttagcttccttgcattaggttagcatatgctcctttagcttggaggagtttgttattacccaccttctgaagcctacttctgtcaattcaaactcattctttgtccagttttgtttccttgctggcaaagagttgtgatctttttgaggagaagaagcattctggattttggcattttcagcctttttgmcctggtttttcctcatcttcrtggatttgtctacctttggtctttgattctggtgaccttcagatggggtttttgagcgttcgttctttttgttgatgtcgatgctattgcttcctgtttgtaagttttccttctaacagtcaggtcgctcttctgcaggtctgctggagtttgctggaggtccactccagaccctgtttgcctggatatcaccagcagatgctgcagaacagtgaagattgctgcctgttccttcgtctggaagcttcrtcccagaggggcacctcccagatgccagctggggcyctcctgtatgaggtgtctgttgacccctgctggaaggtgtctctccttcaggaggcacaggggtcagggacccacttgaggaggcagtctatcccttagcagagctcgattgctgtgctgggaggtctgctgttctcttcagagccggcaggcaggaacatttaaatctgctgaagctgcacccacagccaccctttcccccaggtgctctgtcccagggagatgggagttttatctataagcccctgactggggctgctgactttttctcagagatgccctgcccaaaggggagaaatctagagagtctggctacaacgagctgcagtgggctccgcacagtccaaacttcctggtggctttgtttacactgtgaggggaaaacggcctactcaagcctcagaaatggtggacacccctccccccaccaagctggagtgtcccaggttgacttcagactgctgtgctggcagtgagaatttcaagccagtggatcttagtttgctgggctctgtgggggtgggatctgatgagctagaccacttggctccctggcttcagccccctttccaggggagtgaatagttctgtcttgctggtgttccagctgccactaggttacaaaaaaaatactcctgcagctagtktggtgtctgcccaaaaggctgcctggctttgtgcttgaaacctggggccctggtggtgtaggcacccgagggaatctcctggtctgcrggttgcaaagacagtgggaaaagcgtagtatctgggccacatagcttcgtctctcatggcacagtccctcatggcttcccttggctaagggagagagttccccaaccccttgcacttcccaggtgaggcgatgccccaccctgcttctgctcaccctctatgggctgcacccactgtctaaccagtcccagtgagatragccaggtacctcagctggaaatgcagaaatcacccgccttctgtgttggtctcattgggagctgcagaccggagctgctcctatttgaccatcttgcctgggaatcctaacaatggttattggtggtacggaataaataaacagagtatagtgtaagagaataacagggaatctacagaagacctcttaaggaggcgatatttaagaatagacctaaagaaagagccagccagaggagaagctgcagtaagactgtttggggcagagggaacagcttatatcacgtagagtctggagaccacaaatagcttggcatggaaggctctgggagctgacaatagrcagtctaataggagtgtgatgagtaaaaggaaattgcataaaatcagggtggaaagagctcaggggtcagattgtcccaggcctgggagtctgtgtatgtgggctgggtttcatcctctgtaaagcaggacactattaaatggttctaagcaaggaagtgcttttgacttacattagtcaaagatctctctggctgctgtatggagaacagattggaagagggcaagagtggaagaagcaagaccagttagaggctagtgcagtcattggagcaggagaagatgggtgctgggatggaggggtcacggagaggcaggagcggtcagattagaaatagagttagaaggtagagcaaccggggctgccccmctgtgttcttgggattcaccagaacccagtctgtatgttccgctctctgccctccacacccctcacagtgaccaccactgcttrttgcaattacttcccatgcttcctcagcattcttcataataaaaggaaatcaaatatttgtgttttaccattataaagtgctcctgattggtcatctcatctgatccccacaaaaagcttgtgaggcaggygttattaccttcgttatacaggggaggatgctggagcccagaggactgagttgcccatggtcttccagatagtaagggrcatcagcaagtctcatttccagattccctgagaccgttcactgacttattcaataaacttattgagaacctactgtgttccaggcactgtgctgggttcatggtccttgctctcaaggaacctagagtgtaaagaacagacagactagcaagctcataagagtaaagcagtataataggtttcatattatattaaaagtatgttatcaataatttgtccaagttttgcattcatggggagaaagaagggtaagaaggtttcttaaagtagctggcctttgatcttaaattatataaataatgtgttgcatcaagtgaaaaggaaggttgctgtaacctctttccaagggtgattactttttcttggtgtgtcaaggctaagacctaaaagatagattgggattycctgggaagagaagatgggggaaagatgttctaagcaaatatagcaatagcaaaactgtatggtttgagaggatttgtgggtggttctgaatggaggacagagtgtgtggaaggatggggcaggagggaaagtcatggggtagggggcatgggctgctgtttgcctgcatgaagagttaaaccttagctctgaagatgaacactgaagagtgacactataggatttgaactttagacagatcatctggccccaggtaggagacagaaacagagtctgggagactagtcmagaaggaatttaktccctatgagggaaatgaggaccttgtatgacgaatagtgaagcaaacacagacatgagaggcctaaggaagcaaaagactgggctcttttcagaattccttgagctccataacagcagtaataggagtccmagagctattgtcaacatgtcmaaaaaaamwaatagaaaccttatatttatccatcataaatttacacagcttaaccaagatatcacattcctctgtctttgcctagaattaaatggaataaaactattaatactggttatctcaygcaagtatcaaaagttctgcttggcagttatgtgtctttaaacattggaaaataaattaactattaataaatgcaggatttttcaaaacatgaaattcatgaaggkgtactttgagactgaggaatatgtgaggaattacatgcttgagccctttttatttgattttattttataagacagggtcttgctctgtcacccaggctggagtgcaagtggcatgatcgtgactcactgcagcctccacctcccagggttaagggatccattcccactttagcctcccaagtagctgggaccaaaggcacaggccaccacacctggcaaatctttattttaagaattgtattgtgaatattggggtcattgatctttaaccatctttgttcttgttctgttttcataaagcaacactctggttataattttatctcccaaaatagatggaaagcaccaatttgctgagtacattgttgcgtgagatggcatttttgtcattttgtggacattgatcagcctcccatgcagtagttggcatcactgcccrcaatcacaaagayatgggtgggactcttattttcacacctgtaagggctcaagagacttccttctttttcttagtcccatggaaaaccgataatttcctacattaaaaatggaaataatatttgtagttcagaaagtatgttttctagatgagaatttccttggctctattttttagaagacttagggtggaataaagacaggatttggagttcatgcaacatgaacctttcacaaatttggccctctatgggctaagtgttgtcactttctccattgggttgaattttagcttgcctttctcttttccaagtcttagtttgtctttatgaaccatgattcctggggaataaaaatagaaaatcagaagcttgcaggaatgattttcttggctagtttgactcactatcagccaattgtccaagtaaaaagctgtttaaagtttttttttaaaaaaagaggtgaagttttaatagcatcaggwacaaaaataccattgtaagccagctctcattttttgacattttttggtatcatctggacaaggtcatttgtcacagggtatgactctatccatgatgctacagacatcatagaaagtccaatgatgaaaacaattttccagaatgaaaaatccctgggagactagaagwcttatagttcttgcacaattgtagaagatctttggttttacaccatgagttttccaagtctttgatcctgtgtaacttactcagtgtagtataactatagtggttttctttaattcacttcctcttcaaaagaacaaatttttataatggggtctaacactgtaaacatttcataatattgtagcttcaaagaaggcaggctgtaaacacatttgcatccagttagctgacggtttatagatctgagggactcttgggtccwtgctttccatgaggaagcatttatttcattggctttgcctctgaagtgcagttcccatcaacccactcagagaggaagtgcttcattagcatctttggtcaaataaccttttctgtggtactttcctttgatttttgatgtataattccatttctgtcttgagttatgttaattttgctgctgttttctgtttttttcttttcaaatgggttagaagaagacttttctcctattttgtccttttctacttggggtcaggacatggtatttagcccagagaattgcatamgggtcagtaaaaactatacttaatttaaatatatattatgcattcatttttttgagatctactcacatatgcccttcattgacccccccccccagtgaaattgaragcaggttatatgtgtgcttagctkgctccccagttgttgaacatgatgatwttggcctctggggagttgggaacaccttcttccccatctttccctctggggagatggggaaagggcaatatcctggagatgagatcctgggagctgggctgagatagaggtaagtctcctgtgtatatcaatggggaaacactgaattggggaggagagaaaagaaactgaatggagaggtgggccattgggagaggccaggagttggatactgtatcatggagagcataactgaaggtataacrtggcagataggaagagaggtgatgagagagaagaatgaggatcaagatctgcaagaggcaaagtgagatagctcaggatcagaatgagtgactgctgaatatccattgggcattattgtttaggtgcatcttgacacctcttaaagagataaggcagctccttaagaaaacaaccaggccagatggctaaggcctgtccagtcagtgtgaaaatctgtggccccaggtggggttctgagcatgtgttagtcatggctaaagctgttgttmaaatattgggaccacagccacttacctttacagaccatgatagtcaccctgtgcagctacagcttgaagcacttcagggtcactgaggtccatagaaataaaagtcagaggctgcctagccttggaaaaccccatattctccttctttcaatactttgcttgccttttgtgctagaagctaacgtgttctgtggatcttcaccaagcttgaactctctgattgcagcatcctatgtaccagaagatggccttgcaggagtttggcttaagcaccaaaatattgtcatgcagtcttatttttgttgtctccgcttcctatatcagggatctctcaaatggttatttaattgtaccccctgcttactaataggagaatggtagaagctggggcagaagcaccttagctgtagagtggctaaagtttgccttgaggccgaaggtgaattctggtctcacctccactctctgcccaatagaagatgttgagatcacatgcccagaggtgggctttgattcccatcagctctgctcactcaattgtctcatacatcctgcccccaatcacccactcatgcgaaacgtagttggaagactgtgtcccaattatctgcccttcttagagactttcaaccacgtaaccctgaaagcaaaactatgtttatagcctaatttgaaaggatattcaggtttcttttaccttgaagttttctgctttaatgtggggcttcatttttactccatttagcatctcagtttgtagaaaataggaggcatgtctgctccagatatcatcaagatcaacacaactgagtttatgagtgattttctcatctgagagagaattagctttgaatccagacccaatagaaagctcagatccaggattctaggagaggcaccaccacacaagggtatcctctgaacccttgctttggaaggcatcattttatatcctggatacggatgcttagatgtatgwttttgtgccaggaggaactggttatggcaatgtgtgggggagmtgtttatcctttggatgaatatttgggtaggaggtttgtgtttcaagaaactgagcactaattgtaaatacaaccattttgctgtgattgactcacttcttattcattcttttataggatcttgtggaaacacattatgtacattagggagactcagctcatgcatttccattgaataaatctgctaaaggaaaaggcattactcctccagctccttttcagacaggcaagaatataaatcttgtgattaaaacaacaataataacagcaaacttttgtggggaaccattaattcctaagacaggagatctcagacagatgtagtaataagaacatttgccacggagagagaagacattaatatagagtgagaggctctgctgtgttacctgcaaacttctatttttggggtattgtagttgataacccaaggctccttccaatctaacattctctagagatagaatgggcatgatgacagtgatttctggtggggctttccagacaggtttggaagtacagtggttcacattttgatgaggaggcaagtcgggggagtaaagtggaaggagctcaggcttaggaattcaagggacatggatttacatcctgaccctgccacttactagcagtgtgatcttgggaaggttacttgatctatcttycctgaagtttgctatctgtagaaagaggataacagttctaacctcctaaggttgttttgaggattaaaagagatattatagctatttaaagtgcttgtttarcacaatatctgacacattgtaggcccccagtaaatgctagtttaagctcccttaccctttactagcaatgatatcatattagtaagagttctaaaaacttgaaagataatgtgtcatccacccttagcctayacttcacatgagttttcgtccttttttgagcaaaagcttttattttaacaaagacacattaagttctacttatttatttgtgtgctgtggttgtgatttttttttgcatttgtatatgaaaawtcaatagtaaatgctgatttccttttcctgtggctgtaattgctatgttaatttaaaggtctgattacagaaatgaatgcagctgtgctgctcttgcactgcacagccctggatgtgctgtgtgtgtacccaggcatgctgcactccctgtacttacatcatttaggaggaagtttccagtaccacaacctcacaggcagtatttaatcacctcaaactctagctttgaggttagcctggaaatgaaaagccacttgggtttaccacaacagaaaagtcagaggtacaccatttctaagacagcatgtggggaggcacagccaggcctggggggctcctgtgggaagctgggagccatgtgagtttcatacccaggtgccatagtaaagacagaacctgcttccttatgtgtgtgtgtgtgtgtgtgtgtgtgtgtgtgtgtgtatgcatgagcatgtctgcacatatatattcatatatttgcacaaattcatagatacattatttctacatatcaagcctgtgccctgtaatcatcagtgactatttttctgtgtgtgcagagttcaggatgtcatctggacatttctatggtctccgtatctccattttccttatctccaatttctcctactcccagttcaacttcttcatcaacctctaccagatgaaattggtaatacatgaactccccttcttaaaaagtttcctgtgcttcctcccacctacagcacaaagttaaactccttagcacaaygcacaaggcccttctcgaggggtgtctcaatcgagcctcatcatccctactccctagtctgtgctgtgcgtgctacacaagactcactgctcctaagtgcacaccaggctctcttgttccacatctttgtgctgcctactcccttgcttctcttagccctgctggctctaacatcacttcccatggaaatcttccctgacagctctagaccaaatatgggctttctcattgtgtctgggtgtttattccactgccatggcacttatcacactgctgtaatgagttttgctttttttttttttttttgtgcttcttgttgttgttgttgtttacgtattaccttcagtactataataggatctcccaaggaccgtgattgttctgtcagtttttgtaaccctaagagcctggcttggtgcttcacacacatggcagatgcttcatagtatttgttaactgaatgagttaatggagactccctgaatgtacgtgtatagatattagttacgtataagacccacacactgttagtcttgaaaccaattggggattctggatacaggcaccattactgatttgctcatttttttcgccattttttgcttcttttactttttacattgattcaagaatgatggcaggcaaacagattcttaacgcacttgtccagatctttggcttctcactttctctgtaattctactcctctggcctcamagcatcctaaagcttagcttttagaccctactctgctacttaccagctgctgtgtaactataagcaaagcacttaaggagaaacagaaactaaccttcttaggaacaccttcatgtatcttgctcatttaattcccataacacccttttagataatcatttatcaactctgtattttcaggatgaagaaactgaggatttgagaagttaagtaacttgttcaagatcacacacagcaaatagaaaagccagagtacaaatgcagctccgattccaaaacttgtgcatgttctactggactgctttgtcctctccagatctcactttctccatctgaaacatcaccaggttgttagaggagtaagtcaggaatgagggctatgcatgccctgcaggctgtcatgtgtgtctgggcatagggaatgttgtcactctggaggtgcaccaagggatgcttctcctgaaccagtgttggttgcagtggttgggcagtgctcagccactactcttcagtcctggccatgacctcactccctctcttcatgagtgtttatgccaggcagtgtcctaaaagcatttcacagacattatctcattttaaagactctataaaagctccaaggggcaaataccttagttagtctcatatagattaaaacaaacaaacaaaaaaaaaagaaagaaaaactgggttcagagaatgtaataggcatccctaagctctcacagaggatttaacccagaaagtctcaaaccagacataccccgccctgcccccaacacatttaccactacactgaattgcctccaattcctacaacccctcagaagcttcaggcttccatagcacccaggtttctttctaggacccttgtaggctggtaaatgatctctaccatctctacctgaaaatgtgtgagctttagcccaaagcttcccaggatacggggactaggttaaacaaagcagccccagaagaactagggaaagaaattatcaagccaaaagaccaggagtccagttctggctctgccatttgaccmgactgtgcttatctctcaacttccctaagtctgtttccttgtctgcaagatgagtatcaacatcactgagttgttctgggaaatgacataggctgtgttagtccatttgttgctgctgtaacagaatatcacagaccaggtaatttagaaaggaaaaaaagttatttcctcacagctctggagctgggaagtccaagaacatggttctggaatctggcaacagcaagcctgcaagacagagacaggaaataaagtagaactcatcctttttttagaaacctactcctgagataactaacccacacccaagataatggctttaatctattcttgagggctctcatcatctcttaatggtcccacctcttaataccattacaatggagagtaagttagtttccaatacatgaaatttggaggacacattcaaaccacagcaggctatcataacaaaataccatagactgtgtggcttattctcacagttctggaggctggaagtctaggattggggtaccatcatggtttctggtgagggccctctccctggcttgcagacagccacattctcacggcgtcctcacgtggcccttcctcagtgtatgcaggtggagagagaaagctttgatgtccctccctgttcttatagagccaatcacccaatcctcttcttacagggccaaggctcaagtgatcctcccacttcagcctcctgagtagctgtgactacaggtgtgcactaccacgcctggctaatttttgtagggatttcatcatgttgcccaggctggtctggaactcctgggctcaaacggtccatctgccttggcctcccaaagttctgggattacaggtgtgaaccagcgtgtctagcctgttcctaattttttaacggtgcctggtaacatccagaacggagcaaagatacaatttcacccctcaagaattaccatttagaggttctgggttttttgttgttgttgttgttattctcacgattacaagtcaattaaaatggataatcctgtttaaattaacttctatggtttgttatcaatcacagtttcagtttgtcctaacagagaagccaaggatagtgttcaaaggaaccttccataagatttccaagaaagaagacaatggacaaaccagctgctatctatgatgttttattttcagaatgaaacacaaaacaaacaaaaaaacacaaaagacccagaaccatttactagcatgtgaatgtgatcctgtctctaacttgagccttcatgcatagtagacaataccccaggtatgggactaaaatgctaccagtcattctttgttttttggataattttcttttggcagcatgataatttatttcaaaccaaagtccacgactttgctgagacacaggtaagctgagcgacagtaagaaagacagtctcatgatctgattatgagctaagaaaactgggaagtctagagtttaaaaagctgtcccacgggcatgctgaccattagctgacatgctactcacaaycaggatgtcaggagggaggttgggaacatcatagcagtctaaggagaagacagtcctggtggggatgactgtggtacccatgtagagacatgaacccaagctctggctccatacaacccagttcatttgggagggggatttaaatcagggcccccacttctgactgaccagatggaggcatccctgaacacccctctcaggtttcccaatctctcctccctctactcttccttctcctttttttcttcctccttcccttcctcatgcccaaaatggctgttygtaggaatggaaggagaggggtgtattttgggagggatttggggactsaattaatggaacatatcaaggttaagggagaataagtgcaggaaggaaattctggytccttttctttcctcctatctggactccaaaggcaccgtcatggcagaatcagcatggggctgtgagccagtggccctactctcatctcagctctgccactgatggtgggcctgtcatttaactgcgttgagcccaggtttcccctctagatggtggacatgtaacctccccaaatgaccccatgaggyccatggtagatgcttctgtctgtgaagtccttcatgattgcatctgatggacagactcctctcctcttcygggcccctctagcacggtcctctgttgccctctggcctrtagaacagcatgcatttgggtttgagagcaacctggatttgcagccaagacrcccatgagagtaccttcctctccctcacaaccacccttctcataccaatcaagtctcaatgtccctaagcgtcctgtctagcaccttttcatttctcttattacatttctcctccatgcccttactttccagctattttaatgtgctcagtggaatgtggcatttaacagcacgggctctagaaccagcattacctgggttcagattctgactttgcctccccagactgtggcaccttggaccaattatgtaagcatgttgtgctcagtttcctgatctacaaaatagggttaataatagcacccctcatgtggctgtatgagagttaataaatcaaaacacacaaagcccaggaaagtacctagcaaatagtaagtgactaaatgtcagtctgtcactgtgcttatgtccttggtcacatctctcttgtgggtcaatgagctgcttggagactgtaatgtggccttggactttacagagatgagtttctgtgaccagagaataagcaaccaaatcctcagcctggccacacaatgctggatggtgactcagtggtcattactgacatgcatatcggactcacagcagttttctgtgggaaccctcaacatcctgactctgtgtccctgggcacaggggccgtgcagtgctcaggcggagagtgactaagtgctgccatccagctgtggtggctgactcatgcatgaggactgaaggatgtggattctgaaagcccttcctcaccgttgtgtttcctgtccatatagccctgccccagggcctggggctcccatggaggaccagtgcccaggagagattcgtgtgactgcagagcacctgggttgccctgaaggaaaccactggccttcagtatcactcactgcacctgggcccacccaaggtctctggagtgcagttctgcccctgtggcctcctctgtcccctccttcacagcgcaggctgtcacacatgtggcaggttctccaacatatggccagagaatcagtgtatgcagtrctggaggggcctgaggatgatgtccagggccattcctcattttgcagacatagagaytaatgtctgagggaggcagggtcttcagcaatacagtcaggactagaatcctgaggactaattcccaagtccatgttcttttcaggaaaccctgctaaagtaaaagaatacaacttcttggctgtagtgtgaggaacaggcagaagcaggcacagggaagcgagtccaagatacctggcttacagagcctgctctaccccaccccccttggccattttgtctcccttcttcactcccctatttaggctctcggatcaggcagttccccactacttccccacaaactgtgaggcccctgtgaagctgctctcccagaggccctctgctcaggctgcactctcttgcacccagcagcccttgaacacatcacttttggaagtatccagtccacaccactatgctgttggagtcaggcaggtcagagttggaatcacagaaactatgtggccatggacaaggtacttagcctctttaagcctcagtttcttcatctgtggtcttcttcatataggtaaaataaaataatttggctgggcatggtggctcacacctgtaatcccagccctttgggaggctgaggcaggaggatcacctgaggtcaggagttcgagaccagcctggccaacatgatgaaaccctctctctcctaaaaatacaaaaattagccggtcatgatggtgggtgcctgtaatccctcctattcaggaggctgaggcaggagaattgcttgaacccgagaggcggaggttgcagtgagttgaaattgtgccactacactccagcctggatgacaagaataaaactctatctcaaaataatttataactatcagaacagtgcctggcagcccgtaggcttccaatgtgccatgcctgttattattattgcctgttatttttaaagcttcactcaaattgtctttattatgcccatggttccagatgcatcagaattacctgaggatttttataaacaagacagtctgatctattaggtctgagaaggagctaaggaattttttttttaagttcaccaaggagattctgatatgcgtttggatttgggaaccactaaaccccttcattgcccacggttttcttatgagtttggcactagttctctcacattcttgtcactgcctataagttacaggcagttttgcaggtggactgaccttagatttggaagatcccaacttagatctgtaacttttctatccctcctaatgagctacatctcaccaagacattaatgtgcagagaagggggaggcaggagagcacagggactgtgaccactgggcttcagaattggaaatccctgtgttcagtccaagttttggaactcactggctgtagctcttcaggccaagctccatgaccactattttgtaactgcttgttaagagggattttgttcaacctaacatctgcaattcggtacatagcatccttcccctaatccagcagttcctccaacctcctgtttcccagggcctcaggccccagacctgggctcatctgtgactcggttggtcctcccatcctagtcctcccccatttatgtccttcctgccatccctgccgcctccatcggaaatgagacttccacaaacaccatctaaccacctgccctccctcaccctgctcctttccaggtttcctcaggggctcctgattagctgtggctccctttcaaactttsactgcctccccactgcctgcatactctgtgtggcactgcacaggcactggcctcagcccttgaaagtcctgactcgggtttctaatgttctactcacacttagtaacatggtcattcaataataacaacagcttctgaggagacrctgggtgttggtattccgagaagatgccaaagagtgtgttgtctccaggccacaggcctgatttgatcaaatctgcttcatccttttgatttctcttggcatttggacttgtttgaggcaaacactgcaggaggtttggtttttacctaaaattataatgttgcttttgggcttggaagcttgcgtgtaaagcacttgtggctgtttaaactctgcagcaaagaaaaggccaggaacacattcccggtgctctgtttcatggaaacccagagacagcacaatccataacatcatgaaggatacaggagaggctctggagaccaaacccactcaggtgtccagctcaggcccccagatatgtcactggagttggagcctgccaagtccagctgcatttggaaaatacttcaaccaagcgctgtcagtcagggcctcatgaccagaaatccatgcttctgctgcttgctttttccctttattgataacagaggtaactcaaacctttagctcatatgttattagcatgaccttgaactctcttcttcaaaagaacatttttggggggatacactgtatgtaaaatagatcaaaacaacaaaaggttcatcaggggatgatgatctctattcaataggggatgtagatctctattattggtggcaagtaaatcactgcagaacctctgaagttcctccaggtctagagttctgaaacaagtgcttgtgtaggcattattcagactcagtttcctcttctgcatgcttcataccacctcattgtcatggtgcaggtatagcagaattaaacctcaacagtgcacatttagactgttatttacatccaatttcaatcacaagttctcagccatctaagctgctagtgaggtgcctggcagcagcgggtgggtagtagtaagcccagctagcagggtaagttctgtaagctgcctcattagataagaatggctgctttgctcaaagcctcaaatactcctggcttgtgtcctcaggactactcttgaactctggaaacaaacaatgggacaccaagacacagaagatacccaagacagtaagagctgactttaatattggaggacagtgtagactggctgatatgttttctctgagagtaaaacttcaagtagttttatcttcatacagtgtctcaggctccaagtgatgaagggagttgtaaccagtataagtatactagttcctggtgggaggaaatgtgtcctttacccacgggggagggggagggtctaaaccaaaacacatttagttaacctcctttcttcagcaaaagagattgtttctctgtttttaagaacgggttttttaagttaagggcttctttaagaaaacaaataaatgagtacgagccctgcatctttctctcgaaatgtgttttgaaacctcacagacaaagccatgcctctgggaatagtccagctgctctgaatgttatgacgaaggaatacaagttcagggacatgaactcgagatgctagacattctcatgacctggtgagaaagatagcagggctccagtttccaggcctgggttttctttccccaaaagacaarccatcagtcagacccattgaattcactgtatcaccagttaggttttgcaggaacaaggggcacgcatgtagctcccaggcctctctttgcagaccctgtttaattggaattgttaatgcaagactgtgaggaagaagagcggactggttctatgctttgggagaatcagatgacaagcacagcactttctttatctttgatttttccatcccttgcttgtcaatactagatttagacgtttctctccatgtaacgtttctccttcctcatagacttttctgtaatgaggactatraaactgaggctcacaggccccataattgagtcaaggcctacccagtgcaggagttgcaactgcggtctgcatgaatctaaagtctgtatttccattttctgacgtggttacctaacccattacctagaaaggagctgagttcctaggcaggtgaacagaaacattaagggcttccaggtaagactgatgtctagatcagaaaatagaccttagtatcaaatagtctatgaggacagagccactgtaggacactgattctcagctttgactgcactttacagtcatttgagaaatttaaaaaaatactaatgactgtctcacctccagagattctgaacaaatcggtctagattatggcctaggcgtcagaatttttaaaagctccccaagtaacacgaatatgcagccaaaactaagaacaactgcttaggaaagacagaaatagcatcttagaaggggaagctggagctgtttaaatatctgctgccccaggaccagggcccagaacaggctccagtggctcccgaagtattgggaggaggctggagatggcggcaggcaagggagctcagccaaggctggcagccacacaccacactgactgttattcacagagcgagccaaaggattgactcctacatactggcatgtaattattttatgaacttaaatcttaactctccagatagattataagttctctcagtttgagatgccagcacccaaaagatgtctaccatcttccccattgaatcatctgcaccagagggcaggacctgttgctgttctttgctgtctctcaggctgcgtagcacagtaccgcacacatggtgactggacatggagggtggggggactttagctggaagcatagacatcctggaaagggtgatattttcatcttaattgattccagaagccattctgctttctcatctgaaactgggaattgcttatgcgtggtgttaactgaagccaccctttccttgcaagcccataggcctcttgccccacattcagcttcctgtgctttttctttggtacaagtatgaaggcttctgctggacattaaatctgctagtgagatggccttggcagaggagccttaaggatattcactgggtcctgagggttatgattttgaggttgatactgaatccttcagagtaaggagagtgggcagacttcacaaatcagcagaaaagctgccaagactgtgcttgccaattkgttgtgtacatgattctcagaatcttggtaattttattgtgtgtctgattgaaaaattatattcacagtcttgggcaaaacaagaataaagaaataatacacttaatatttgtatgcatatgggtagaaagactttcactatttgaaaaagccaactttgaaaagccaaagttgaaaaccataaagggcaagcaaatttggttgcaattttgtcggaaatccagcaacagtccttatacccatggtacagaaaggagataaaaatgagaaattgagatttgttaagcatctattagatttatacaagttgttttctaaatgttagatcatttaatccttgccacactctattttacccataaaggtattttcaaaatacaaataggggcctrtaacccaactttccagagctttcagaatagaaaaccaaatctctaacattgtctccaacatcttgcatgggctggccccatactgcctgtgttctgtctgctctgaccacagcagttcttaagtgagccttgtttccttctactgcagggcatttatacacctactttcctcttttggaaaacccttctccctctctccacctctaarttctcctgtcatcctttacctacttagttccaactcttccttcggatcccaaggaaaatataccagttagggtctaggcaggagacaaaaaccacaccatttatttgaaacagaggggatataatataatgaatgattaaataagtgcaaagttgttggctaggtgacagaagaaaaaagaaaactctaagctgggattggcaaactgtggcccatgtgccaaattcagttcatggcctatttgtatgactggtgagctaagaatggtttttacctttataaagcttgttagaaagaaaatgcaacaaagtttttatgtggcccaccaagtttgaaatatttactatctggccctttacagaaaatgtttgacagtctctgctctaaggtrtcacaggggtagcaactctaggaagtacctaccacctttaggtctacaggaacaaaagttggaattattaaaaggcagaaaattagagacgaggccaagaggtctgagacccagacttctgaggagagggtgccaactggctggtgaaggtgtctatgagacggggtgcaatgaggctggttttacaaatagcagaaaaactgttcactacactgagctgttgccacaggagggaactgctgctgcccaggtgaagaagcattccctgggtgccactcacaggtagaggatgccacagaaatcgctcaggaagtagacagaaaggagccagtttcttctttctcttccaggcttttgttctctcactattgtactctcttggcagagccaagcataaaggcagtttgcaatgtggtttacagggttccagccccaacattgcaacacagacaatagaggagtaggtttggagaaatgagacaataatttaataactggcacaggaagccttctctgaacttcgtgatgtagtcagtcccctctgtcatatctatattgcactgtgtatcttttctccatatcatttactataattagtgaaaatatggatgaatacttatatagcactatgtaccagcacaattctaagcagttttcaagatttaatcccacaaaaaccctgtggaggtatatactcatattatccccattttacaggtaacgatacagagacacagagagggaaatacctacttactcaaagttacactcagctagaaagcagaagaaccagaccttgaactcagacaatcttgtttcagggtctgtactattaatactatactacagagcctcttaatttcagttttacattaatttgtgaattctgactcaatgtctgtgtgtctcatcaggctggcttcatgacagcagtgacggggtttctttctgctgatcccctgtgcctggcacaaggtctgacacttagaaggctctggataaatatttattgcatggttgaayacatggagaaggaatctgagtcacagaaaggtttagccaacagttacctgtaagagctgggattcaaacccaggtctctttgactccagagcccatattctccccagtcatgagctggcaggcgagtgctttccagctggtgatatgggaggttcctgattatgtaattgaggcactgcaaattcatcattgttcctgtattttgaacaaatgttgatgttccttggggtctttgagttatctaggatgtatgatcagctacgcgtcttcattcttagatcttgctgcgtggaaacaatccctgtactctgtaactatggtcaccaaactcagggtgctggatcttctacccaagctttctcggacatactttgttaacgatagttactgtctggtgaggagtttggcaatgggggtaagaacacttctattttgtattctatatactgtttaagtaattggttattttataatgagaatactaaagaaaaatatttaattaaaagtactgaaaacagaagtgtttcttctagcaaatttgaacatgactaaatggtattctgttacttcaggacaatgtcctttctcctaagcatgtcatttgccaactcctctctacctctctggtctcatctctctacacatagtccaaatacttgcagggctccacatgctacattttctcttttctctgtggcttttgcaatactgttcttctccaagtaaagtcaatgtcctgacaatggtacatgagaccctctgtgatctggtccttagagcagtccacttgccctttctctcccgctatctgatgccagaggagaagtttggaggaatcagatggaaataacagagaaaagccgaagaatggtatgtttaacaaacatttattcattcagtttacctattaaccagctaataaaatcgaatcactcaatgtaatcagctaagttttccacataggctatttttaaagcaacaaaatcaatcttacgcaattttctgtgaccagttatctcagatgttcctataattagtagccactccagaaactctgcatgaggtatggccttgggcagtaatctggttgagtggggcattgggaataaggagaatakaggagtgttctcaaacctatatttatatggtaaacatattgtttttattggattctgtttattggcttggaggggatttgtcagagaatccacaaatttcacagcaactgctaatgaaactaaatgctaaatctctgctggtttaaacaaaaacaaatgtatctagattaagagaaatagggaataggaggttataggggtatctgacaagagccagttagtggaattcaggcaggctcaggggaatactgaactaggggctgagaagccctctgaatcgtccagcttctttcttttggccaataagccagcttcaacttcccaacattgtggggaacatggctgccccacagctcccaaagtttataytaaacttccgacctcaaagaggtataaaatcctggtctcaaaaataaactataagagaaagaatggattggtccagcttgagttaggtggatactcctggtttagtcagcagctagagggaaggggtcacgttgtacgtcaagcctgctggagagggagtgggcatatgtgtgtgggcaggcagggaggtgtgattttgatctgggcagacatttcagaagacatctactctattaagaaaaggcattcataatctccagaggggaaaagtatgttccacaacacacctgggcacacagagaacatttcattattgcttgctaccgaactggaaagaccctcagaggtaactgtgaaatactggttgactgagccatggattaagttgttatttctataacattgctatttctataacaatgccttggttacttgactctcgactgtctggcagccttaaacagtatgaagccaaaaataatagcaacaacttacataacaccttaatatactacaccctgttctaagcacttttactttcattaactcatttaaattaatcttcataacaatcatgttagcgttctccaaagaaacaaaaccaacaggacatatacagatatgtaagaggagatttattataggaatttgctcaggcaattacagaagccagaaagaatgcaaaacataccatctgcaagttggagcaccaggtaagccagtggtgtgatgcagtctgagttcaaaggcctgagaatgaggagagccagggtataagtcccagagtctgaagacccaagaaccaggagctctgatatccaagggcaggagaagatggatgtcctggctcaagaggagagtgacaatgcacccttcctctgcctttttgttctatttgggtgagccctcagtggattggatgataccagatgagacgacgcagatcttcttgactcattctactgattcaaatgctaatctcttccagatacaccctcatagacactcagaaataatgttttacctgctgtctcggtattctctgactcagtcaagttggcacataaaactaaccrtcacaaatagatattatttccattttacaggcgtgttaactgagacacagaagtgatgtcatttacacaaggtcattctcccaataagaggtggaggtagggtttgaatccaggtagtccgccttcagggtccatgctcttaacagtgcaggaaacaagcttccagggggagtggttgggaataggtgaaaacttcaaagacaaagcttcgaagacaatcttgatggatgaactcaccaaataaaaggaactctttcatcagccaacgatggcagccagagtcaggaataagagaagctgcaccaaaaagtgggagaagaaacaagaaaacatcaaaaaatatacacaggagaaagagacccatagacagaagaggtggtacaaagaacagtgtgaagtgggaaaaccagggaacacaactttcaggaagaaacgagatattgtctcagtgtttttcagttgtggtccacagaccttctgagctcttgataaaaatatagttgctgaggcctcacctttgactgaatcagtaatctatcagatctaccagaaagccacctgttctaacagacactattaggtattctcatctcaagagagcactgagtgagcagcaaacaacttttttttttttaatgccctcccacaatccctgtagatatatcactggatatggcagtgtctgtagtatgtaatgcatttttaaatgactcccattgatagggaggcgtaaaatgaraacccacatgcaragctttkgttttagctctggcacaacctatccatgtgactattggcagacaatttctctgcagtctaagattttactgctgtcaaggttgtaggttagactggatccatgaaaggtatctggaacgcatccttccacacatattcttccacaagtcctgcaccacctacattctcacctggccatggcaaacatcattaatcaatcatgacactcctcgctgaggcctgatgaggctacccaatacaatatttaacatagagccctaggcgcccattaacaatgctggaagttgaaactttcctgttatctctggactagagataatccataaagctcctgtaagctctaaaaataactctcttaaaggaaaaagtaatttcacattctgctttacagggttcattttcatttatataaaagtgcatttaacacattgttttatattttgatttatttcaaatctcctcagaccttccctctcccyattattccaacctcgattgtaattatgatttgaatgttatttctcctgaaagcccactagatctttattatcaaattatgctgaagttagactaactttgccttaaacttatattttaagtcagcttgaatttgaatacaaccctattcacaaaaacaagttcaaagttgaagcatttgtaggaaagaaagagaaaggaaggaaagaaaaagaatggaaggagagaaagaaaagaaagactcctgatttaactttagaaaaaaaactttctgaagtgatggaaccagtcctggcctgatgattactcaagagacattctcaggccaattgtaaataattcaaagttctgcatttttgtttaagaattctgagaatcatgctaacaaattagccaagactgaggagcaaaaaagtttaaaaactatgatgtagctgaccttaattrttcttaaatcccatgaattctatrccaataaaaacaatgttttcttactggccttaggcctggattgaaattgttgaaaatagtgacttttctcctcttattacctcaaagaacattgtgtcaggataggaaataaatatttcaagttggcaaacagttttcccaaagcaattctagcaaaatttggagatggcaggaataggtgggttttaattttctgatctggactcaaaactgaaacattttggtctggacactttattgtgaggcctggaagagttccctcgacatcatttgtcccttggatcccaacccagaccttactttggtggaggcccggtcaggaacctgggctgtattgtattacttaaccaaycacaagcatgagaaacctcatgctctgctgggaaaatgcaccaagacaagtgggcctaggtcagatggatctgattttttaaaaacctcaggaaactggactgaggccctagaggacagagagattggctgaattagcaaaatgtctgaattttaaaatatttgatcaaaaaaagatgtatgatattaaggcacacaagtagctgaaattaactcctcaaagtgggctacctggtagaggtgcctgtatcttcttgaaggcataaaggtatcccctttgtaagctgcagaacaaatgtgcaaatgaatgtgagataaactccctttaatgattgttcccttacatgtgattgacattttctctgtgaccatayagcatagtgctgcagttttaatccaaagatctgatttcacatactaactccaaagccccttgcatatcactcttatttttagatgtcatcctaacaagttgattctctgggttcccagtatacaacatattagaaaagagtagaccctaaaaggaggcaatgtgacaacagctagcagtgatcactgatgtcttttcaataagagaagaaatagaaaactttaaaagcaagctgggaaaattaaaagattacatgtctgagaccatttcatgaaggcaaattgcccaaaggacttcacycacccgaaatgawatatagttatttagttaagaataattattatagtcattgataagattgtttcatattcattaactctgtttaagaaaatagggatatatgtcatacacttcagtttaaaaaaacgttttttgaacatctagtacgtgccaggcactgtgctaagtgtagagatttaagggaaaataggatttgtgtttgtagtctagaatatgaaacagataatgtaactttttattatttatttttgtgtaaaaaatactgacatgttagcacttaacagggtaagataactacactggaaaatttacttgtatggaagagcttattccctggaaaaatggtttgtggctgtgaattattgtgaatcccatagttggaagaacattaatcagctratcaggctcacacttaagggatgaatttgctgccctaattaatgtataatatttaatccaagcccttccttatttccacttytaaaaggtatcatgttgacaactgtattagtctgttttcatgtacctgataaagacataccccagacgaggtaatttataaagaaaaggaggcttaatggactcacagttccacgtggctggggaagtctcacagtcatggcagaaggtagaagcacgtcttacatggcagaggacaagaaagaatgagaaccaagcaaaaggggtttccccttataaaaccatcagatctcatgagacttattcaccaccackagaacagtatgggggaaacccctcctgtgattcaattatctcccaccaggtgcctcccacaacatgtgggaattatgggagctacaattcaagatgagatttgggtggggacacagccaaaccattatcaacaagtaagatcaaatttggcagccagaagaaaactgaagttaattagtaccatatttttaaccctcaatttaatactttattatacgatttcagtattctataatttctcacattaatagtatttttcaccaacaagattgcatatttaactttagaaactttattaggctgttcttgcactgctataaagaaatacctgagactgggtaatttatgagaaaagaggtttaattggctcatggttctgtaagctgtacaggaagcatagtgctgacatctgcttctggggaggcctcagggagcttttactcatggtggaaggcaaagtgggagcttacacataacatggcataagcaagagcaatggcgggttggggggaagaaggtgccacacacttagaaatgaccagatcttggccaggcacggtggcttatgcctgtaatcccagcacttcgggaggccaaggcgggtggatcacgaggtcaggagtttgagacgagcctgaccaaagtggtgaaacccccgtctactaaaaatacaaaaattagctaggtgtggtggcatgtgcctgtaatcccagctactcgggaggtaggataatcgcttgaacccaggaggtggaggttgcagtgagccgagatcacgccattgcactccagcctgggtgacagagtgagactccgtctcaaaaaaaaaaaaaaaagaccagatctcatgagaactcatttactatcatgaggacagcaccaaaccatgagggatctgcccccataagctaaacacctggcaccaggccccacctccaacattgaggattgcagttcaacatgagatttgggcagggacaaatatccaaattatatcagaaacaattgtgaccagcttcaaggctgtgtatgtttagatttagacttagctaatatttcttcattgcttcctaaatgtgacctctgtggaaggcgtttttcacagacattatctcatttaatccttgtattagctctataagaatttttgatgtgaatattaccacaatttttggagtaagaaaactgaagctaggtgatttatgttaggtagtttatgatcctacttttttttttttttttttttttttttttttgagacagagccttgctctgtcgcccaggcaggggtgcagtggcgcaatctcagctcactgcagcctccacctcccaggctcaggttattctctcacctcagcctcccaagtagctggggttataggtgcgtgccaccatgcccagcaaattttttgtatttttagtacagatggggttttgctatgttgcccaggctggtctggaactcctggactcaggcaatctgcccaacttggcctcccagagcgatggcatgagccactgtgcccagccatgatcctacatcttgtgaatttgaactcaggtcctagactccaggtccgatattgaataatggtttctggccatgctcatttatagtctttgactgcagtttaatgtcatctcagaatattttttagatttttggattatttatttttcctttgtcatttagaccctaacttgtagatcaggtttcacatctgtgctgcagtttagcacccaaaaaagaaattttatatatgaaagagccaaagtatatttttctttatcctttggttatttttcctttcctcttcacatagcttgtggttaaattattttccttagactttcatactaaaataatttgcctttgggtagaggccaagcacagaccattttcaattctctacaagattgtttttctaagcagctcaaatgaaaaaattcccatgtcttacaatgggcatttgtaagttggttattttgggcaatcagtgctaaaatgtagagtctcttcaaaatcttgaatcttctcagtacacctacctttaggaaatgacctaaaataactacatagaaaacaatagcaatgaccccaaagcccacatcagttatcatttccagattcatgcaacagtttgtcttctttatattgagtttaacttttaaacgagacttagttaccttagaggaaactaagaattggaaagaagaaccttcaaactaaacaaaataaacatatggcttacatttgttgagtgcttaccttgtgccaggaataatgctcagtgctttaactgcattattattttcaaaacctacaatcccctgtagtaggtaattttttatgtatatactagatgaactaaagctcaaggaaataatttgtccaaggccactcagcagtaataaatgccagacccagaactgaaaaccaaatcatactggctccagatcgcttgttcttcatctttaaaaaaaaaaaaaaaaaaaaaaaaaaaaaaaaaactactatcttggagtattttagatgtacagaaaagttgcaaaggtagtacaagagttcatgtataccccttacccagttttcccacattgttaacatttccatggttttatcatttaacatttatcaaaactaagaaattaatattggtacatgactatgaactaaactccagactttctttggatttcaccagtttttctattggtgcctcttttctgttctaggatccaatccaaggtaccacattacatttggctgccatgtctcctcatcccctctgggttatgacagtgtctcaatctttccttatttttcatgaccttgacagtcctaaagggcactggctaggtatcttgtagaatgtcccccaactaggtttatatgatgttttcctcattattagactgaagttatgagtttttcaaaggactatcacagaggtagaattcttattcttaaccactttctgatgctgtgtgactttcagatgtgcttgtactgttagtgggcagggtaattctatttgtcattctaccaaagaatgaactatagtattgatatgatttggaaaaaaaatagttcatttaagaagaatttaaaatcccacaatgacttgcttatttccatatagacagttaacagtttaagaattaacatcagcactgagaatttcctaataaagtgatgtttcaggtgaagagaaattccagtattttcatgttgaaaatatgtccaagagaagtaaacctaaatatcataaaagwtttattcataaaatctctttacaattatttatgataatgaaacatttagaaaatagcacaaatgcctaacaaaggaatagttaagtaaattatggcatatcccttatcacggtgtattacacaaacttttaaaaagatatttaccaaaatgggtcataatgcagacaatatttactggaaaagcaggatataacattgctttttgtttatagtcacaactaacaatatatgtactgtcttaaagtgacaagaacatataccaaaatgtcaatagtggttgtgctttggtggtgagactataagttttacttccttctgcttatccatgcrttctatgcaattaggatgtttatgagtttttttaattgttattggtggtttttaatcttttcaaagaagtatgctctgaaatcactacaagaatattttgtgactttaagaagttgttatgcaagaaaatccttgagagcaagagccatgacttaggtttcactctgtcccccagccccaacccctaagccatagcaccctcaaggtcagagtgctgagattctgagtatgggaagttgagaagaggaaggaggtgcttcactgctacttacctcacaccaccaccaacacccccatgtgtatggggtaartagtaatgaagtacttcctcaatagctttctgaaagcaaggtgcagactcagacagaggtgaactcttattagctctgtgatcttgataagtcatcccaccttgaggcctgtatttctaccttgatcaagatgcagtataaagatgtggttaagtggagtgttactacctgatgttgagtcttggacaggtaacttaattctctgtttctccatttcttcatccayaaaatgggaataatactagaatgtactttatgagaattgggggaggacaaaataagttaatgtatgtaaagtgccattcatgattgaatagttaatccttacttaccagaagtttcagaatcctgtactagatgatttcttgggtaacctccaactcaaaaattccataattccaattatccagaggctacagcttctcaaattgtggccttgaaaaaatatgtgtagggtccggatgtggctagaagctcactaagatttgtaccgatggaagaatagttcataaattcctgttttgatttctgaaagtaaaaaaaaatgtccaaaaggacctcaagccaaaggctatagctcttggtttttcatactccgtgatattttttaaaaaaacgatttggttccgccagaatgygtgtattcttatggccaaaaaccctaaaagtcgtctcatggccacatctgacatggtttagtatttagtacattttatcaaaaagctcattaatgtattggaagtggtaagtggtatggagctgggagtaccaagctcttaatatgcaatacaatgtgaaaaataataccagtatcagagaagtggctggacctctttataggctagagagatatagagaagatattgaaaagcttaatttccacaacacttaactcagggaagtgtttggcaaatcaagtgaatatttgaggtttgaggacttagctttgagagactatgaaaaaaaatccataggcacctggttggtgcctgttgctaaaaagctgagaagacaaggaattgaggtcgaagataaggcaccaccctgggaatttggagacctgggtccctcagagaaggttatgcctgctttgagaaggggttggtgtctgtttgatccattgagagcccagacagaaaggaaaacaggtcctcagtctgctcagatggagcaaagaggggttctggactcacagcaaaggcaaaatccatcctgtgtattttgggtttaagttaactccaaatcagatcaattcaagagtggasgttttaactggctgaaatgagtttataatttctacataagtggtgaaaatacaatcttaaagtgctttgcagtctccagtgttgtaatagtctttggaatcagccagacatgagtttgaatgccagctccacagtctgttagctgaggcaataagtgactggggcaaatcatttaagctctgtcttctccagttctttcttagaggtcctgggaagatgatgtgagattctgattcaaagtgctgagcaaatgtctgttttggtaccagtaccatgctgttttggttgctgtagccttgtagtatagtttaaagtcaggtagggtgatgtcaccagctttgttctttttgcttaggattgtcttgactatacaggctctctgttggttccatatgaaatttaaagtagatttttttctaattctaggaagaatatcaatggtagtttgatgggtatagcattgaatccatgaattactttaggcagtatgaccattttcacgatattgattcttcctacccatgaggatggaacgtttstccatttgtttgtatcctcycttatttccttgagcagtggtttgtagttctccttgaaaaggtccttcacatcccttgttagctgtattcctaggtattttattctctttgtagcaatggtgactgggagttcattcatgatttggctctctgctgtctattgttggtgtaaagaaatggttgtgatttttgcacattgattttgtatcctgagactttgctgaagttgcttataagtttaaggagttttggggcggagatgatggggttttctaaatataaaatcatgtcatctgcagatagagacaatttgacttcctctcttcttatttgaatatgctttatttctttctcttgcctgatgccctggtcggaacttccaatactatgttgaaaagtagtggtgagagagggcatccttgtcttgtaccagttttcaaagggaatgcttccaacttttgcccattcagtatgatattggctgtgggtttgtcataaatagctcttattattttgagatatgttccatcaatacctagtttattgagagtttttaacataaagggacacatagatcaatggaacagaacagagacttcagaaataacaccacacatctacaaccatctgatcttcgacaaacctgaaaaaataagcaatggggaaagggtctcctatttagtaaacggtgctgggaaaactggctagccatatgcagaaaactgaaactggaccccttcctttcaccttacaaaaattaactcaagatggagtaaagacttaaatgtaaaacccaaaaccataaaaaccctagaagaaaatctagacaataccattcaggacataagcatgggcaaagacttcatgactaaaacaccaaaagcaattgcaacataagctaaaattgacaaatgggatctaattaaactaaagagcttctgcacagcaaaagaaactagcatcagagtgaacaggcaatctacagaatgggagaagatttttgcaatctatccatctgacaaaggtctaatatccagaatttacaaggaatttaaacaaatttacaagaaaaaaacaaccacatcaaaaagtgggcaaaggatatgaacagacacttctcaaaagaagacatttacatggccaacaatcatatgaaaaaaagctaaacatcactgatcatcagagaaatgtaaatcaaaaccacaatgagataccatctcgcaccagtcagaatggcaattattaaaaagtctggaaacaatagatggttgtgaggctgtggagaaataggaagacttttacactgttggtggggatgtaaattagttcaaccattgtggaagacagtatggcggttcctcaaggatctagaaccagaaataccatttgacccagcaatcccattactggayatatacccaaaggaatataaatcattctcctataaagacacatgcacacatatgtttattacagcactatttacaatagcaaagacatagaaccaacccaaatggtcatcaatgatagactggataaagaaaatgtggtacatacacactatggaatactatgtggctataaaaaggaatgagatcatgtcctttgcagggacgtggatgaagctggaagctatcatcctcagcaaactaacacaggaacagaaaaccaaacaccacatgttctcactcataagtgggagttgaaaaattagaacacatggatacagagaggaaaaacacacaccaggtcctgttgggggttggggggcaagggaaggtaacttagaggatgggtcaataggtgcagcaaaccaccatggcacatgtctacctatgtaacaaacctgcatgttctgcacatgtatctcattctttttagaagaaataaaaattaaaaataaaaaaagagtaaaccmaagtgctgagcatagaactaggcacataatgcatatccmataaatggttgatattggtgtattgtctttgttcctctcagcaactttttcagatggtagctattaatacccccattttacagatgagaaaactgaggtttagagtggctgagtagattgcctaagatcaaacatctagacccatagtaagagccaacaatcaaggccctgttttcagacttaacttctagagtcttcccattgcatgataaggaaaagccctcctttgaatacagcactaatcagatattcatttttcttcccccccccccactttattgagttatatttgacaaatagaaattgtatatatttaagatgtacaatgtgatgatttgatatatataatatatatacatacmttgtgagatgatgaccacaatcacgcgaattaacatatctatcacctcacatagttacccacctttttttgtgttgagaacacttaagatctactctcttagaaaatttcaagtatacmattcttattaactatagtcaccatackgtacattagatcttcagaacttactcacctttttttctctttttgtttacaagtgtctgctgtaaggagaggctttattcataattaaaaatttataccctttgaccaacatctccccatttccccacaccccgggccctggcaaccacaattctattttctgttatgagttcaacttgtttatattcctcaagtaactgagatcatgcagcatttgtctttctatgtctggtttatttcacttaacttaatgtcctccaggttcatccatgttttggcaaatggcaagatttctctcactctttagggctaaataatattcacatatatatgaggttgagacccaaattcagaacgctgtctaggaagtcaggttggcttgaagtgatatctggagtttgagactgtccagaccccagtgctacagctgcctgacaactggattgtctgccatcgtccactgtgcctggcttttctggccaacagttggtgctgttttgttcagcaaaacacttatcacctatttgttgtcagccagtcactgactgggtcttgagttgcaacaagtcctcattgtttctcccaaagctcaaaagcaaatactctgtcagttattgttcatgcttgtgagcacagaccctgcccccccgccaccccctattgcagcaatctgcctttgagtagaagacaagagccaccccccaaccccacagcccaaaagagaactacagggtgccaatagattcatgcatgcacagccaccctgagcagcaagggatgtgagtcgctcaggctgggcttcccaggggccttggaatggaaagtggaatctcctgctgctgcamcttctacctttgtgcacggcatcactcccatggcatatgcactgatttccacatttgctaaatttttagcactatcctccccataatatctaggctcaacttaaatgcccctttctccatgaaatatcaggagtaatggttctttcctttgaggtctcaaggtatttagtttctgcttgcagatcactttattataaagtatttcagacacaggaaaaaatataacgataatatgaaaaatatccatataccaatcatctagttttttaaatgaaacattataaatacatctgctgccccctctattcatctctctggtcatgttcctttcatcacccctaatgtaatcactgtcataaatttggtgtttaatgattcccttgcatgtttttacacttctactacacatggaggcattcttaaagtatagccttttggcatatgtttaaacatgttagacattataygaaatgtatgtagccttcctcaacttcctgacttctaggatgggtctgatgatagtttatacccttgaagggttgtgaggactaaatgggttaacaaatgcagagcrcataaagaaatgcctggtgcataatgtgttgagtaagtgttagctattattatcattatatttatatataattttgcttaytgtgtttctagagttatccattttatacatttggttttagaccatttatttagcattccatcacatcagtaaactgaaacttacttctccatgcctrtgtcgaagaacatttaagttgttcccaattttttgctattacaattttgtaatcaatattsttgtacatgtctttgtaaacaygggcaagttttctggcttaagagtgcagcattgctgatatatattcttcagtatgttttaactcacttctgactagtatactagggtttggttaggggtgtgtgtgtgtgcatgcatacatatatgcacacttatgattcatagcagattgtaagctccttgaakacaggcctaattcaatcattcactgattcatttagcaaatattcatttggcacccagtataggcagtgtacaggtctaggtgacaggatgcaaagattaaatggcacaggctatctcccagagctttttctgctctggaagacatactcaggacacatgtagtcagaatcatggtcatttcagagggtaagggacttggttttcactgaatattcatgatggaccaggcactgtatatacactgtcaatcaaccacacattaatggcaccacttactacttgggtacctgggactactcattaatcttgctgagtcctgcacctctgatgagaaagcactattttattgtgtttaagagaataaacctgagttcaaatccaggcatcactacatgtcagctgcatgaccttgtatgaaggatttaacttctctaagttcttgcttcctggtctgtaaaatggtgctaactatagaatctatctaaaagggatttatgaagattacatgagaaaaatgccagtaaagtgtttacacagtgcctgacacataagagctcaatcattggtggctataatcacgatcatgtcaattgttatccattatccaaaaaaatacgtgcctttttagaagtaagtatatctgggaagtcattatggaatttttactttcttcattgcaccaagacttaccagtgaattatcttatataccagttaattatctgatataccagttactacctcttctatatgaatgcatattcacaatgtatttcatctcagccttactgtatttagagaatagtaaagttttactttatttttaattttttcaaccaacagattttgctctaattaacagaaagaaccgataactccttgtattcatcttgactgccctctggacatgggcaggtttccaagcccacaagttctgccagcagctgcacactttaacctctagagggagctgagagggaatttgagtccattgctctgactgagcaaaacggcatttaaattacacctgaaaacatcactatccactattgagagtgcatcctcagagaaaaatcctgggatcatttccccgaatcgattcaacattgcccagattgcttccatctcatgcatactttgttttagtagaaatgggcttcattacagagtggtctccagctccccatagtggcccctcctagtaattttttctaaattaagcaagcgtgcgtggactcaagagstacacggcagtatttcttggctgcttctttctccctctgcaagaaacaggaataacatttcataaataatgagctgcagctgaactttaatctgctagatccatttaaaaatgtttggaaccttccctgtctctctaagaattaccttctggatttttctggctttgttttttggtttcttttgcattgtaaccttatattaaggagtatgctgcttatgtttaaattaatcaattctgaaataaaatgtatttactttctccccaaacagtagcctggtgccaagcatgtgggaaatacctcataggtacttctggcacccaggggagacatggcatgatctgtgtcccaacatgccagaaagaatgattccagggccccattctgtttctgaaggtcaaaaggcagataagtrcccccccaatatctgaaggtctatcatgtcgaacggggagtaggcgtattctgcatggctccagagtccgaccaaggacgtataagagagttcactgcgagatcaacttttgctcaatgtaaaatatgtgtatataatatatatatatatatttcttttaaaaaaaacaccgacttccctatctctagatgtgatctattggaagctgaaaaaaaacaacaaaaaccatctatcaaagagattgcagaagggagtgggaagtacctwccctcttaagtcccctcccactctaagattctgcaagactttacaggaaggacttactctcctagtttgccttttttctgatgatattcaccaggctctatttggatattttcccctgaagtttaaaaaaaaaaaaaaaaaaaaactatgcctctcaactcattgtatgtatatggggctatgaatcagagaggaagaaatgaccaccaatgagtatggtgggaaaagggagggagaaaggggttagggaaaattttgcatgcctgagaacattgaaggatgagaggagttaaagttcagccccgccagtatgtctgaaatatcccagttacagccaggatatcccaaataagaagtagcaccatcacatttgcaagttagaaagatcactcagaggagagaacagattggtagatttcttcatggctgtgaatgtgttaagttgatggaattgtttcaggaagcagtgctgcacttagtcataaactcagctatgaaaataagcctgtacctctatccagatcaacaacagtgacaacaacaacaataacaaaacccacaatgtgtcaatgaaaatcaggctgttggtttacaagaaatgtaactctatctcctcctgttggtgcttgttgttggttttcaggaaaagcctagtttggcattgaatcctgaatgaatttgctgaaaacagcaacctcacatatttacatttgtttctcctggtgacacatggattagaaaaagaagtaggaatgattaaaacaggaagggtaagcattagttaacccacagccagattttcaagacaaataacatctaaatcaataccaatcaaccaaccaaagacaccacatccctccactgaaattcctccacttttctgtactggragagttataagcaccatggactatyggtcacttcccagtatgcaatgaaggattttcccattatgcccatgtaagaacatgagtcctgatcagcatctggtgaacatcactcactggggttgtcagaaatattttggaagactgtcaagctcatggggccaagggggatacctggtggaatgtgagagcactaaaagggccctgaaaacagcttcgctgcaggcagaccactaattgattctttagggtcagggccagtgttctgagtggcacttgtgtgtgtggctataagtggccagagacgcacccatctctctgctgtccacaacagactaccctgatgaggcacgtccctgagatatttccccaactgcagctcagcacagtatggcaaaggcccaggagggaaatagtgtacatggagccaggtatgtgaccatcacaggtgacctctccgagcctcagtattctcatttataaaattaatcctcatccaacttacaaaattgctgtcacaatcccattatatagtagagatcaatggataaattgaccattgctatgtaagggtcacatgatattgttgttattctcaagtaagctgtggtagctttggggagggaggaggggtggagtcttctctctgcaacacagggtgaactcccagatacttcactagaagggatgcacacagcctccagaagcttttagaaaatggctgtagtggagaaatagtcagatttttctgggcacttgtgggaggcccatgggacttggggtgaggttgggggtaggcaaacttagagaacagaaaataattgaaagagtgtcctggaggcaggggtttaaagtggaaaaaaaactggtgtttggaatgaggctgtctgggtttgagctctaacccctccccctctgactgtatgactcagggaagttagttgtccattccatctgtaaaatgggtgtgatttttaaaaaatctattttaaagggttgttacaaagattttaaataacgttaaacagagcctaaaataaaaaacttcaatgattaatgactattttaaggatcattgacttcgatgtaattcaacaaaaaatacttgttcatacagaaaatgccaggtcatagattgtcatggctagaaggcactctgaatacatgagatagctaatgtccaaacagactggccttatgctaaattaagcagtttttggtggcaaagctgagcccccagcaaaagtcttctaaaaccagaataattttttcaatatgacacctctaaaatgcttttcaggaccaatacctggtcacaggttcttaagtcaaagtccccatgactcagaagcacatccagccttctaattgtgaacagcatgtgcagatgccctgaggaggaaccggtggcataggttggaaatcatattggcacagtaggcctggggtcttgactatcagcaaatgaatggataaataatttgcagtatgtatatacaatagaatattaatcaggcataaaaagcaatgaagtactgatacatgatacaacatggatgaacctcaaaaacattgtgttaagtgaaagaagctgtacataaaaattcacatacgttatgattccgtttgtatgaaatatccagaatagtgaaatctatagagacagaaagactggtgattgctcagagcttagggaataggagaaatggggagcaactgcttaatgagtggtgcatttctttttagggtaataaaaatattttggaactagatagaggtggtgattgaaaccattgtgaatgcactaaatgttattaaatcattcactttaaaatggttaattttaaattaaaacatataagatacaatggattaattcaacttaacttactgtaactaataattttcttaactgtctattaagacgtaatttctaacctagaagtttgtctactcaaactactgtgtcagctgcctcccaaattactcacactttctatacctcagttccctgatctataaaatgaaaataataatatctgcctcattaatttgttgagaagactaaattgagttatagatataaacctatgtaaagctatttacatttatatcattttatatgcttatttatgtttactgtatttcatttataaattctctacctttatccagttttcagttgtttctcaacagaacaagcagttataacatgtagggagcaatggttatatggatggagggaatctttttgttcttttttttcttgtaagagacaaccctatgtagtgtaaaccaaaaataaaatttgaagccctccacctcaccccacaaccatctgaatggactccctccttaaccagggcattctaaaatttaacctgaaagactggttcatgacccgacaggaaatgggggctggacatgccccattttgcccctccagctttaacaccaacacagaccttaaacctaataagaaacatttacagcctgttctctctgaagtctggaggcttcatctgcatgatgaaactttggtctctacaacttcttatcmcmacccagacactcctatctattgacaactttttttttttaacttttttttttattattatactttaagttttagggtacatgtgcacaatgtgccagttacttacatatgtatacatgtgccacgttggtgtgctgcacccattaactcatcatttagcattaggcatatctcctaatgctatccctcccccctccccccaccccacaacagtccccagagtgtgattttccccttcctgtgtccatgtgttctcattgttcaattcccatctatgagtgagaacatgcggtgcttggttttttgtccttgtgatagtttactgagaatgatgatttccagtttcatccatgtccctacaaaggacatgaacacatcattttttatggctgcatagtattccatggtgtatatgtgccacattttcttaatctagtctatcattgttggacatttgggttggttccaagtctttgctattgtgaatagtgccgcaataaacatatgtatgcatgtgtctttatagcagcatgatttatagtcctttgggtatatacccagtaatgggatggctgggtcaaatggtatttctagttctagatccctgaggaatcrccacactgtcttccacaggggttgaactagtttacagtcccaccgtgtaaaagtgttcctatttctccacatcctctccagcacttgttgtttcctgactttttaatgattgccattctaactggtgtgagatggtatctcattgtggttttgatttgcatttctctgatggctagtgatgatgagcattttttcatgtgtcttttggctgcataaatgtcttcttttgagaagtgtctgttcatatcctttgcccactttttgatggggttgtttgtttttttcttgtaaatttgtttgagttcattgtagattctggatattagccctttgtcagatgagtaggttgcgaaaattttctcccattttgtaggctgcctgttcactctgatggtagtttcttttgctgtgctgaagctctttagtttaattagataccacttgtcaattttagcttttgttgccattgcttttggtgttttagacatgaagtccttgcccatgcctatgtcctgaagtaatgcctaggttttcttctagggtttttatggttttaggtctaacgtttaagtctttaatccaccttgaattaatttttgtataaggtgtaaggaaaggatccagtttcagctttctacatatggctagccagttttcccagcaccatttattaaatagggaatcctttccccattgcttgtttttctcaggtttgtcaaagatcagatagttgtagatatgtggcgttatttctgagtgctctgttctgttccattggtctatatctctgttttggttcccatgctgttttggttactgtagccttgcagtatagtttgaagtcaggtagtgtgatgcctccagctttgttcttttggcttaggattgacttactgatgcgggctcttttttggttccatatgaactttaaagtagttttttccaattctctgaagaaagtcattggtagcttgatggggatggcattgaatctataaattaccttgggcagtatggccattttcacgatattgattcttcctacccatgagcatagaatgttcttccatttgtttgtatcctcttttatttcattgagcagtggtttgtagttctccttgaagaggtccttcttgtcccttgtaagttggattcataagtattttattctctttgaagcaactgtgaatgggagttgactcacgatttggctctctgtttgtctgttrttggtgtataagaatgcttgtgatttttgtacattgattttgtatcctgagactttgcagaagttgcctatcagcttaaggagattttgggctgagacaatggggttttctagatatacaatcatgtcatctgcaaacagggacaatttgacttcctcttttcctaaccgaataccctttatttccttctcctgcctaattgccctggccagaacttccaacactatgttgaataggagtggtgagagagggcatccctgtcttgtgccagttttcaaagggaatgcttccagtttttgcccattcagtatgatattggctgtgggtttgtcatagatagctcttattattttgagatacgtcccatcaatacctaatttattgagagtttttagcatgaagggttgttgaattttgtcaaaggccttttctgcatctattgagataatcatgtggtttttgtctttggttctgtttatatgctggattacatttatttattggtgtatattgaaccagccttgcatcccagggatgaagcccacttgatcatggtggataagctttttgatgtgctgctggattcactttgccagtattttattgaggatttttgcatcaatgttcatcaaggatatcggtctaaaattctcttttttggttgtgtctctgcccggctttggtatcaggatgatgctggcctcataaaatgagttagggaggattctctctttttctattgattggaatagtttcagaaggaatggtaccagttcctccttgtacctctggtagaattcggctgtgaatccatctggtcctggactctttttggttggtgagctagtgattattgccacaatttcagagcctgttattggtctattcagagattcaacttcttcctggtttagtcttgggagggtgtatgtgtccaggaatttatccatttcttctaccttttctagtttatttgcgtagaggtgtttgtagtatcctctgatggtagtttgtatttctgtgggattggtggtgatatcccctttatcattttttattgcatctatttgattcttctctctttttttctttattagtcttgctagcagtctatcaattttgttgatcctttcaaaaaaccagctcctggattcattaattttttgaagggttttttgtgtctctatttccttcagttctgctctgattttagttatttcttgccttctgctagcttttgaatgtgtttgctcttccttttctagttcttttcattgtgatgttagggtgtcaattttggatctttcctgctttctcttgtgggcatttagtgctataaatttccctctacacactgctttgaatgtgtcccagagattctggtatgttgtgtctttgttctcattggtttcaaagaacatctttatttctgccttcatttcgttgtgtacccagtagtcattcaggagcaggttgttcagtttccatgtagttgagtggttttgagtgagtttcttaatcctgagttctagtttgattgcactgtggtctgagagacagtttgttataatttctgatcttttacatttgctgaggagagctttacttccaactatgtggtcaattttggaataggtgtggtgtagtgctgaaaaaaatgtatattctgttgatttggggtggagagttctgtagatgtctattaggtccgcttggtgcagagctgagttcaattcctgggtatccttgttaactttctgtctcgttcatctgtctaatgttgacagtggggtgttaaagtctcccattattattgtgtgggagtctaagtctctttgtaggtcactcaggacttgctttatgaatctgggtgctcctgtattgggtgcatatatatttaggatatttagctcttcttgttgaattgatcccttcaccattatgtaatggccttctttgtctcttttgatctttgttggtttagagtctgttttatcagagactaggattgcaacccctgccttttttgttttccatttgcttgatagatcttcctccatccttttattttgagcctatgtgtgtctstgcacktgagatgggtttcctgaatacagcacactgatgggtcttgactctttatccaatttgccagtctgtgtcttttaattggagcatttagtccatttacatttaaagctaatattgttatgtgtgaatttgatcctgtcattatgatgttagctggttatttattttgctcattagttgatgcagtttcttcctaatcttgatagtctttacattttggcatgattttgcagtggctggtaccagttgtgcctttccatgtttagtgcttccttcaggagctcttttagggcaggcytggtggtgacaaaatctctcagcatttgcttgtctgtaaaggattttatttctccacttatgaagcttagtttggctggatatgaaattctgggttgaaaattcttttctttaagaatgttgaatattggcccccactctcttctggcttgtagagtttctgccgagagatccgctgtcagtctgatgggcttccctttgtgggtaacctggcctttctctctggctgcccttaacattttttccttcatttcaactttggtgaatctgacaatcatgtgtcttggagttgttcttctcaaggagtatctttgtggtgttctctgtatttcctgaatctgaatgttggcctgccttgctagattggggaagttgtcctggataataacctgcagagtgttttccaacttgtttccattctccccgtcactttcaggtacaccaatcagatgcagatttggtcttttcagatagtcccatatttcttggaggctttgttcgtttctttttattcttttttctctaaacttcccttctcgcttcatttcattcatttcatcttccatcactgatatcctttcttccagttgattgcatcggctccagaggcttctgccttcttcacatagttctcgagccttggctttcagcttcatcagctcctttaagcacttctctgtatcggttattctagttatacattcgtctaaatttttttcaatgttttcaacttctttgcctttggtttgaatttcctcctgtagctcagagtagtttgatcgtctgaagccttcttctctcaactcgtcaaagtcattctccgtccagctttgttccgctgctggtgaggaactgcgttcctttggaggaggagaggcactctgctttttagagtttccagtttttctgctctgttttttccccatctttgtggttttatctactttttgtctttgatgatggtgatgtacagatggggttttggtgtggatgccctttctgttcgttagttttccttctaacagacaggaccctcacctgcaggtctgttggagtttgctagaggtccactccagaccctgtttgcctgggtatcagcagcggtgtctgcagaactgtggattttcgtgatccgcgaatgctgctgtctgatagttcctctggaagttttgtctcagaggagtacctggccgcgtgaggtgttagtctgcccctactggggggtgcctcccagttaggctgcttgggggtcggggtcagagacccacttaaggaggcagtcttcccattctcagatctccagctgcgtgctgggagaaccactgctctcctcaaagctgtcagacagggacatttaagtctgcagaggttactgctgtctttttgtttgtctgtgccctgcccccagaggtggagtctacagaggcaggcaggcctccttgagctgtggtgggctccacccagtttgagcttcctggctgcttcgtttacctaagcgagtctgggcaatggcgggtgcccctcccccagccttgctgctgccttgcagtttgatcttagactgctgtgctagcaatgagcgagactccrtgggcgtaggaccctccawgccakgtgcgggatataatctcctggtgtgccatttcctaagcccgtcggaaaagcgcagtattcgggtgcgaatggcccgattttccagatgccattctstcacccctttccttgaccaggaaagggaactccctgaccccttgcacttcccgagtgaggcactgccttgccctgcttcggctggcacatggtgcactgcacccactgtcctgcgcccactgtctggcactccctagtgagatgaacccagtacctcagatggaaatgcagaaatcacccatcttctgcatggctcatgctgggagctgtagaccagaactgttcctattcggccatcttggctcctccctactgataactctttcaaccaattgccagttaaaaacattttaaatctgcctatagacttagacatgagacatcaatcaaatacatttaagatatgataaccttaaggttaatgtatcttaaatgtatttgattgatgtmtcatgtctccctagaatgtayaaaascaagctgtaccccaaccactttggtcacatgttgtgaggatctcctgagggccctgtcacgggccgtggtcactcatatttggctcgaaataaatctcttcaaatattttaaagaatttgactctttttgccaatagtagcaagatatactttcttgctcaaaggcatttcccacgtaggtattaacaggtaaaaagtcatgctgtgtctaaagctgcacatgctccagagarcatacttcacagaggtggggtgaggtggacaaggagctgacaacaggcttgttcccaaagacttctagtgyttctccttccctttccaacaacaagatgtgtggttgtcatggtttctacttcctctaaaagtcctttgaccaaaaatagtcacatggccccagtccagctacaagggagatgtgtggaagtatatggactaattgttaagctgctaactgtctctatcacattgctcggggatactgtaaggaactctgggccagaagctcactgctggttctgccgtgaccttggaacgtgttccttggaactgagctccagattttcattccaggtccctggggcccctgcgaccacatccctgccttggcaatgcaccttagttcttatgaagtggagtcctgctgctgaaatgtcattcgcaagtctgggaccctgttacctgttattacctaatctgcttacagcacttccatgaccttatgtcagatttcctgctctgcctgtgccatctgtctaaccagggcctctgtcttttgctggacttctcagccagactttttccagctgcctgttgtcagaggcttccctctatgacctgctttcctttgctgaatttgactgttctccacaacctggtccactttggtttggcccatcccatcatcatctatgacctggttctgacagggaaaatggaaaatataaagaaaaaagagggaaaattacagaaaaggagagcagaagggaagccaagtgatataatgagttacacatagaataaggttcaagtctaacccttgcaacttcttacctacatgaccttggccaagtcattgaatctttctgaaatttcagtttctttatctataatgtgaaagaggtagcctaggtgatccttaaggtcccttccagccctawcacctcatgattctacatgaaggtgagaagccttcttaaagtctcaagggctcctttgagagtaagggagaaggaggtcaagatataagcactgatcaggaagtaattttggcagaattttgagtgagaactacttaggagtatccagtactcctggttaaacattttcctgggcttcactgaaaaagcctgaaacctgtactttgaaaatagaggaaggggacagttagctttaattagatttcatctgaccatgatgaaagtattaaaattgtacaagtaggatatttacagggcactttacattstgcccatttttttcactagtcaaaagagactgaaattcagtatgttctcaaattagctaaagaaaacccttgtcaaagacccctcaatccatctggttatcattattaaagcattatggggtatgtatgctttccattggaaaaaaatgaataatcccttcaaatatgtaatttcataggttttgaaatacgaaggcaaccgttaagggaactatcaaagcagtctgaagtacagtgtgagttgtcaagggaaaaatataaaagaatttttaataactgaaagttcaacaaattctaatgccaaagcctgggattgtgggaacacttgttggaatttctaaagactgttgtttaktgcatggaggcatctgaacccagaaggtaaattctgaaacacctggaccatattagagtgtctggggccgagaaggtatggtgaggggcccacccagaggtgccctctaacacaacttctttccccataacagcatacctgggagcttctgttcttctggctgtggcattttgtttcaagagcactgcaccctgtgccagccttgcctcttacacatcaacccatatgcagaagcatttccccttaagtagagtgtagtagaaatagtgagggcctggagtcaggcagatcttgagctagatcccagttctccacacttcccctcatgatctttgtgaccttgagccagcacagtgcctggttcacaggagacactcaatcaatccttcttacctgacctttcaaaccagggcacgcgcttactcgatctgattgtcagtttgcttcttataggatagtgtttaagagcacagactctaaaggcagactaattgggatcagatcctggctttataagtacttaactctctaagcttcagtctcttcatctgtcaaatggagataatgctagtatttaccttataagtcaattatggttacatgagtcaaagtgcctggaccagtgactgatacataataagctctctctctctctctctctcmatatatatatatgtatatgtatatatatgtaaaatagagtattctgaaaatttctaacatgtgataaacaatccaaaaatattaaacacatatttttacctattttatttctttatttatattttatttacttatttttatatttccatacatatgcttatcccctttttcttattattagcccttgtcaaagtcctcaacatcctctaaaggcctctattaaaaaagagcaaaactcccttctattgtgaatgctctatagttgaccaggagctttcatgaaagagcctcatttgaatctgaccttaccacccctgcagagtccccacctggcttgtcctagctcatcccccacagaagcctagcatttcactggagaaactcattgctgactcagtccccagacatatcaggccctaacaaggcactgatttgtcatcattattttttgctaccttcaagggctaccttgcaaagtatcagaggcatttccactcttgccatccctgctttgggactgggattattttctcactgcaggcaggaaaaatcttttgaaatttcacatttggagagcagactttgtttygtttttttgtttttttgtgtttttttgtattgttttttgagaaagggtcttgctgtgtcagtggtgcaatcacagctcactgcagcgttgacctctcgggctcaagtgatcttcccatctcagcctcccaagtagctgggctataagcatgcatcaccacacctggctgatttttttattattattttgtagagatggggtgtttttatgttgcccaggttggtctcaaacacctgggctcaagtgcttcacccaccttggcctcccaaagtgctgggattatagctgtgagtcattatgcccagctaggagaccaactttggatgataacttaaatgtctcttcaatgtacttgtattttatgatgaggtgaatatatggaggtagagagcaaaggagaaaaatctctaaggaatgcaatatttttattaagtgttataaattagcaacaattttaaatcataatactcagcattggtgaaaatgtagtaagacagctacttatgtactggagttataaaatagttcgacctttctaaaagtgatttgacagtatgcgtacagatacttaaaactgttgatatctctagaatgtaagtttcatgaaggcagggatatcttgtctgtttttttactttgtttccttattactgtatcgtcagtttataatggtatccagtacctagtcggtgcttattaaatatttgttgaatgaawgaatgagtcatcagtctcttaagtacacttatagttcaatctgaagaaaaatcagaaacaaaaagttttgtgctcattacagcataattcataattgtggaagtttggaaacaattatataaaacaggaattactagataaagcttgctgtgtttttctgttttttaataacattttaggctgaagttttagtatgtgggaaaatgctaatcataacatttttagtggggaaaaaagactaaaaaattttatacatagtatgatctcaagtttgtttaaataaaatttttttaagcatagaaaaaagataggaagaaaatagaacaaaatgatacagtggctatctctgggtgatgaaaataaggtgtggttatttttttccaacttttctgtgcgtaatattactttcaaacttgggagaaaatgtatcagaaaattcctattgaacttagggagatggaggtcgggcttgtgatccagttctgcaacttactggttgtatgctgaagttctggagcctttgtggggctcatatgatatatgtgaaagtattgttttacgaaatattaaacatgcaacccaagtaggaaatgatagctgttgctgtccttactattcttgcagcatgtgacacctttcgagaaagtattcaaagcatcatgagatccttttatgacaggtgttaaaattccaacaggttaggaatgacattgtcacttcctggagggggagcctacagtttcgtgttgtacggtgcctggtatgttgcaggcagtagctaacttttactatgtgagtgaaggagggtggaggaaatcatgggtcttccacattcatttgtcagggtaacagtgaactataaccctggcatacagaaatgagtcattttcctggcagtgagccaaggccacagtcatctccaggaagcttctttgttctcttttcatacccagtcatgctgaaaccttgtaaccccatgcagaggggtctgcatttcaccaggttaatagataagggagctgaggcctatggaaggttaaataactggctcacagtcacacacttagtaacccatggagccaggactcaaatgcaggtgtgtttgatgcctgcgttctgtgctctcccccatcactgtgcccctttctgaaggagtgactaggtggtatattccccaaatcttgctaagtttgggggttcctgggatattccagactgagctgttttaatttcttctgttgttgctagtcagaaacaaggaaaacttgacatctctaaatctgagtgggaattgggtaaaatgctcctttgttgctggcttaagtagtaacccttagataaagggtttaatttcagatctggagactgacctagttgcatccagcaattgtctatgaaaaccttgccttctcactggttacaatgagattcccaaacactgtctctatgtttacctaattaaactcacacttctctcccctcagatgtagtaatgaagtcactgtggctagaggaacatgggttttgtgaagtgctccttgacatttgcttccttgaagatggattccatttacattattcttccaagtggtattttgtcaacaaagctcaatagtcatttgagtttaaatagcctatttccccccstcaaggcctaagaaactggctttgagcaagtggtgagagctgagttattgggaactttgtgaagcaaytgtctggtgctttagaaaaaaaagcagcagcctggatgttataacccagggacattcttgttcaagtgattgaattcccaacacacctggccatcattgtcacagtgcccatgtctgtaatgaytaagtaggttagtggagaagctggactagctggaacaattagaacaaagaatgtggtcccagttcycaggtggtgacttttttctcttagaccagacaggcttggacttcaygtgagattttcttcataggaagtgtattagtttgctcaggctcccataacaaaacactgcagactaggtggcttaaacaatagaaatttattttctcacagttctggactctagatgtctgatatggtttggctgtgtccccacccaaatctcatcttgaattcccacgtgttgtgggagagactcggtgggaggtaattgagtcacaggagcaggtctttcctatgctgttctcatgaaagcaaataagtctcacgagatctgatgattttaaaaaaggggagtttccccacagaaactctgtttgcctgttgccatccacrtaaaatgcgacttgctcctccttgccttttgccttgtgaggcctccccagccatgtggaactgtaagtccattaaacctctttattttgtaaattgcccagtcttgggtatatctttattagcagcatgagaacagagtaatacaatctccaagatcaagatactgacaggtttggtttctcctgaaacctctctccttcgcttacagatggccaccttcctgctgtgacctcacatgatccttgtccctctgtctgtgttgtctgtgttctaatctcctcttgctatgacacccatcatattggatttgggtccaccctaacaaccccattttaatgccactgcctttttaaatgacttatctttaaatacaatcatattgtgaggtactaggggcaagcacttcatctcatgaattttgggaggacccaattcagcccataacaggggcctgtggaaaatccagataaagcagtattgctatattccaaactctaagggctgatgtcagcaactcctcccagtgctttggcagctaatctgacccctacaaaaggaaaaatatcttattgacccttaggattccagtataaatgccaaagcagtgcttaggaacataaatggaagcagctctagcccactcactaggtttgaaacatccaggcttgcatgtcttctgccttycccccatcgcccaacacacaagaaggaatagtatcttgctttctctccctctgaaatgtaccttgaatctatgttttcacctctactccatttgcactggtagagcatyttcttccttcacgtgaactatggcagcagccttatyactgcctcatagtgctagtgggctcatcaaagggaaaattggaacaatccttgcctgcttgatgtcctttgccattgccttcagtaaaattagctgtttcttagcatggcacaggaggccatgctttaaaaccttcagtggctccccactgcctccagagtaacgtaattaacaaagctttcaggacccatgtcattctggtcygacctacccctccagcttccctgcctgatgcacagctgtcctatcagcctcacctcccaggtggcacagcacccaaatctcctctgccttgaggtgctctgtggctggtgcctccatgcctgtcctacttcccttctcctgcctccagctttgaaagcaactgtccaaagttaaagcctaattgaaaaggtacttttctgtgaagctttccccactgctcctcccagcccgcagggagatctattctctcctttctctgcagtcccatagcacgtgacacatttctgtgtctgttcttatcttgaattgtatcattctcttaaccttgctttctcactgggatgtgagctccttaacaaaggcactctctctttctcatgtccgtatcttcagtgccacagttagccccacatagtagatgctgagtagataggtgcaacgtaagtagatagatgaagtcatggaagtctctgcatggccacgctgctgtgggattgttgggttgtctaataatgtcctttgcaaacttgagtaacaaactcccctttgatactgtctatgaccaactcatctgtggcaacgctttagtcctccgtgggccaagtctcttccctggtttgggacagtcagcagaagagatataaagtgctgagtaagttatattaaaattagatgtgagaaaacagagctggggatagaggctaaaaacactactcacctcaaaagtcccacaccccatcactgtgatgtggaacagcacacacttaagaacaccaggacatgcaggtgccaagyagcagcagcttggctgttggagctctggaccaaggagaacatgttgtggatatttacaagtaagatcccttatttatgtcattcttcatcagaataagatgcagaaacgttttccaatagtggtcaaaagcagaagccatgcaagtacttgcccatcacagaaaacatcccagttggaagagacctaagtgggggaaaaaaatctagcccaataattttttcaaatagttctcttggccacagaatcttttattaaaacatacaaaataggaagaccaatgtctaagacagatgagtatcatgaaagctggattaaaccacagttggggaagtaagacaggcctctgtttcctgacatgccttttcccactccccacttgacacctctgtggaatctcagaggatatgctagagtcttaatgtccttgaytgctatctcctaatcaagttggggactgatattcattcattcattyatcattcattcattcattcatatattctctctctttctttctccctctccctcccccaaccctacccccatttatttagctcctactacaagccaggcactaaggtaaaaataaatgaaacatagtacctgccctgaggaaacctaagagtttaaatggggagacagacttgtaaacaaacacttgcagtaaatctgacaaatatttttagagctctagggctgtgcaggtggcagcaagtttaccaagaaaggaaagggcagttgattctccagtctgcacccaaaataaggctgcctggattcccaggccaatgagatttcttcccaaccccactgctgctaaaggaataaaagaggaagcttttctattaagggccttcgagctcagccgttatccccagtggtgcagagtgcatggagcaggccctgggaggtgagggagggcagggggaggaaatctctctcaagcattggggacacacagctgccacctcacaatgagcagggccagcccctcagcacaactcttttgtctcaggctctggggagttaggaaaggcattgtgcccagagatctttaaataatgttgtcacccatgagtaaaccttagggaaacccaggctttctttcactagaaatgaattgagcccattaacaggggaaagggccctcccctgcccttcatacttcagtggatggacaggttatggagtgggttaggcctctccattcagtagccacattccaaggctccacttgaggctgctgtttttccttcacagcctaagtcctgaaacaatggctcatcctccagcttgctgtgttgccctttctgctctagtaagccaaacgtattggggttgaaatatggcgttttctatggggtctcctttgacttaggagccttggtaggacatgaatttagtcaccttgccatagtttccccagtgcatcatctatatttgtgtgagcctgagatagtccccacttacagtgtgagagccccagaaaattagttaagtaattaatgtgtgttagcaaacagcttgttatattacttgttatattattgttattacttgttgtattactttgactgagagaacttaagaacagaaggggactaatgggtattagaggtgtattctgaaccagacattgttgccaggctttctacactatgatactgccaattaattgtgaaactatttgtctctctctccctctggtctgtaagctccaggagggcaagactgtgcctatcttgttcatgccacagcttagctcctagtacaatgcctggcacatagtaaggcatacaattaatatgatgcataaatacacaaaggactttgtatgatcttctggtgaccttgtggaattagtattattagcccattttacagatgagaaaattgaggttctaagaagttgagtaacttgcttaaggccatacatccagacattaactgagacagtattaatccaggactttcaaacagaactcttatttatatttgagccagaaggcactcatttttggcagtggaacagaaaaaagaaggaaatcctttattttccattgttctaaaagtaactcaatttgttctgttatctttttaaatgagagagaccggttattctcccttagttacagtaattttatgtcctaccagttttctctctagctaggtggggaggatgcttgctcacacaaaccgtgaatgacggctttttctactctctttcttttgaagtgtgattctgactggaaaaataaaaacatttggaggaaaggaggaaggtgtgggctacagtagtcatgaagggctttactccaggggcaagactcgagttaggcctcagggatgagtaaaatttacccagagggttggacatcacagcaaccatgtgagcacagcacggtggggcatgaggaaagcgaagagacccacccatctggaacagtgacaatcacatcttgccactgcttaaaagcccatccctaagccacaaggctccccagctggaaaccaaagctctccttgacctgggcctgcctgcatcatgcctgcccaggcctgatgaaaatggtctcagggaaagacctcctcctttaccactggtcctctgggattctgcagagcagccatgctgaagcaaactgcactggcctcaagccaaatgcctcctgggcctccgcatctttgtgcctgctgattcttctacctggatgcttttctcctcctctgcccatcagcagaacttctacttgatctcagctcaactaagacctcctttacaaaaccttaccatctacctcctttgtaaccctaagcattagtcccattcttcacactcctgactcattctttattttcatctatttctctgacagactttcagatctgcacatcyttgccacttccattctccaccccattttacttggctttcaggaacacgtttcccttatatcttcagttcttttcacaagttctatccaactctgtctatcaactaaaacctacccttaccctgagtgamtgcttcatccaaacccctctcatatggaggttgcttattatttcactcttcggctcccaagtcaggacacagctaggtatcctttctttccctaaaaccattttcagagctgttttcccccatccttttatttaaaaaaacagctaccaccacaacaaaatctgtttctctgctcctatttgaagagttgggccatttagagatattgaacttttgtccttttcatcactgtcatttaccacctttcaattattgaggactttggcaccagcttatagaccttctccacccagtcttgccataaccctgggtgacttcagcatcaatatgttggcttctccaacaccctagtcttggctaactggaatacctgtcctcagcttctcccagagtcacaccctggacctcggcatcttgtgaaattccaccatgtcagaaatcagtgattctaacaacacactgtcaaccagagatgctgccgggtcagctgtcccctcggaccccaccacagtctccaatcctactcagttctccacttcacatttttccattcactttttccagccattgctcctacccactaacctaatccaacccagcttgggttccacaggcaatcattcccacttttcctgacaacaccataaactgtttgcccctatacctggaagtgaggattccatcccatcagcatttaaacatgctcraatatctccaccttaaaccaccccctttagtagccaagctttttgaaaaagttttgtgcatttgctgtttccattttgtcacaactttcctcaaaccactccagtataactccatcaactcttcactgggttacgaagaacctccacttttccaaatccagtagatcgttttcagtcatcctaatgatttgacctttcagagaaactcagcagtgttggtcacgccttccttcctgaaacacatcctcctttgtcacctggtgacaacccatcttgtggttctccttctttctttccgctgtcccatctcagtctcctcctttatccagccttaaaaagctggagcttctcaaagctcaagccaggctctgtttttgctctaagctctctccatagagtaatacatacaaccccattatcgtttcaattgccatctttttgctcatcattttcaacttaattctttaccctctaagacccagacttatasatatggaactgtccactaacacctccagataaatgtctcaaaggaaaactcaatgtatataaagtaaaacttgagatgagctcctctccttccactcccacccaaaaccagtcctggtcttcatcattagtgtcccatttcagtgaacaccacaaccattcatccagttgtgatggcagtgatccttgacccctctctctcactcaacccccaaatctcatctatcaccagatcctgtgcattttttctcccccatgtatctcttatcctcctgcttctctccagctgcattccaccatcctagcacaagctaccattgcctcttaactggaccattgcaggaaacttctaatttatcagcacattcttggacccttccaaaaattctcctcactgcagccaaaatgatcytttctaaagaacacagatttaattatgcctcttctgtttaaaactttcagtagtttctcattgccctgaagctgaaaacctaagtcctcagcaaagtcacctacacactgcacagtcttggtcctgtctgtgcaccttcccttttccaagccttgaacgtggtgtttctttgcctagaaagctgctcaacaccacccctaccccgagcaccaccacttggcctaattaactcttttttgttgttatgtttgaagatgtattattagtctttatcacagtttttttcactgtggtgagaacatttgccatgagctctaccctcttaacacatttttaagtgtataatatggtattgttatctgcagacacaatgttatatagcagatctctagaacttcatttttcataactgaaatcgtatacccattgattagaaacttcccatttcctcctacctctaatccctggaaaccaccattttattatttgcttctatgagtaggattattttagatacctcatrtaagtggaatcaggcagtatttgtccttctgtgactggctcattgygtttagcataatgtcctcaagattcatccatattgttgtatattgcaggcattccatatttttaaggctgaataatattccaytttatgtatatgcccttttatcctccatttatctgtcaagggacatttagatcctttctacatcttggctattgtgaatagtgctaatacctctttgagattttgattttaattattctgggtaaatactcagaagtggcattgctggatcatatggtagttccatttttaaattttcaaggaacctccatactgttttccatggtggttacaccattttacactcccatcagcagtgtacaagggttccattttttccatagcctcaccaatacttgttaccttttgtttttttgataatatccactctaacagaggtgaggtaataacacattgtggttttaatttgcatttccctaatgattagtgatgttgagcatcttttcatatacctgttggatatttgtgtcttttctgggaacatgtctattcaggtccttagcccattttacaatcaggttattggagggggttgccattgagttgtaagagttccttatatattttggaaattaactccttatcaaatatatgatttccaaatactttttcccattctgtaggttgccttttcactctgtggattgttttctttgctgtgcagaggcattttagtttgatacagtcccacttgtttatttttactgtttttgcctgtgcttttgatattgtatctataaaatcattgccaagtccaatgtcataaagtttttcccctatgttttcttctaggagttttatagtttcaggtcttacattttacatctgtaatccatttttsaatataagataagggttaatttcattattttacatgtggatatacagttttctcaataccattgttgaagacaattaactctttatttatctgtcatatctcattttggatattgcttcctcagggaagtctcttctaatcacataccattcccaacacaaagaaaatgacatcaggactcctggggttccttatgtcctttaacagcatccactgcacctgctttgtagtatttcttcgaatgaattaattaattgggtgattatttatttaatagctgtctttactattagaaaatgaacctttgtttttcccagctaacaaccactgccagacatacttcattatacaaagtagatgccctacaaatttttgaggaatgaatagcatcactttatttgataaccattttcgtttgaatgacaaatcactacatcttgtattcggttggtgcaaaagtaattgcagtttttgcttttaatggcaaaacccacaattacttttgcatcaacctaatatctgctgtgtcaactcccccagtggaatgtgagatttaggcttcatcatctttctttccacgtatacctagcactatgtatatcacacagtctgtgctcattaaatgaaagagggaatgaatgaatgaatgaatgattaggctgagtaaacagggtgggtctggtggtggacagctcaaaagagacagcataaccctttctaagatccttatctgtaagccttgggttatctggtttgcataaactttcagccataaaaatgcttcggaaatttgttccctataaaaagccagcctctgatcttggtttctcaccaagttttaactgccactaacgcccagatacttaacttgaagcttctgttctgtcttctttttttttttttccttaccatggataatacagagaargccttttgtttcagactcggtggaaacaactgggcctctgtgttgtgtgcaggtgaggcaactgattttctctagttataaacttacccagtagcaggactcccgtggggttttcttctmgggggaaagagatctcactacaacagtgtcggaccagtgctatcattgtgctttagcagtatgcagtttttatattttaaggcactaacattaatagataattacattaagtagcagtatttttccttcttgtcattgctgctcatttaaaaagtcctatctttactaataagtcagcacttatccactctccttaggaaatgctccaaattgaatttctattgagatatttcccaaggacaaggttgtcacctctacttctgaatgtgtgytaaggattagcatttgtacaggacttttatctttcttctggtgcagtttctcataatcaccaggggtgcaggtaaaaagccctggaatcaacatttacaggtaggggccaaggacttgaattttaacccaccagctaaggtgcttctgatgcacactgaatttttaattttaaatgtaagtttcaatcaatgtcttcttcatcctctaatccactatactgattagtagatgggcacagaaggtcattcccaacagaggaactaccacatgcacacaaagaggtatgaaaatgcctgcttcytctgggaatggtatagtttgctctattaaaggccacccatggaagagtggctggtggcaaagccaaaaatgatgcacagcttatgaagagccttgcaggctttgctaaagatgttttaagttagcaagaaaattatcagatttggtttttggaaaatgacagtctggcagaagttctaaaaggtgtattccaggggcagaacagtaggagtgaagactagaattcaggagttgcaggattttagtttaatagcagacaaggtgtgatttcaatattggaaagaacagggattataaggaggatggataacagaggaggaaattagaactattcaggagatagaaaatcactgaacttattaatgacttgactgcatatataggttgagtggtgaggaatccagggtgactctccagtttttactgggttactgggtagctggtggtaccattgctgagtagggaatgcaggaagatgagcttggtttggggcatgtggtgtttgacatgcctctgagacatgtatgtggggatagccagcaagcagatgaatgtatgcatctggaattaaaatgattctggggacataatgcaaagcattgctcttgcttgccatcaactttttacccaaactgcttcacttaaaatgcaatagttgacattaatttagtgagtcctttctaagcatcaggcactctgttgcacactttayacacattatgagttatttttttcctaggggagaaaactgaaacttgaaaggttaaaatatacctaggccatgcagctagtaagggtcagagttgacattcaaactttggcagtctgatccatcactcataatcattatcctatgctacagtattcctcaaaatgtttaaatcacaacctatcgttaaaagtacactttataccacaagctagtacacatacataccaattacacatggatgcatgtgtatacacacacatacacacacaagcaaaagtttagcaaaacagtacttttattaaatgtgaggcaacctgctattttctactgaaatctatatatttttttagatgttggtttctccttactatttcacggccagagttggattgaatttgacaaaccctgctgtattttattcccctggggagaatatttcacttcaattcccagactttgtcattcctgccttttggaagagaacacttaaatgttgttgtatgcttcccccttttcctctagagaaggtatccaaggttaaaagctgggatattgtgggataaggccgaccaggaaacacctactttggtagactgatcaaaccttgtctctaatgtggctgacaaaggtgattgcaaaatgtccaaaatcacaacaaagaatgcaatgcttaaaatttgtgcaaaaaaatgattattttgcayaaatggactgcagtggccagtatggatggcagtggccagcagcacacagacctgtgtttacattccagctctgctacttattaactgtataatcttgggtaggttttctatttcgtagggatgtggcagaaggasaaaactgaaatagtgccttagttcattctatacctaccacaagagtatttgatattaagactgaagtagtgttaatatctttattaatttaagttataaaatacagacccacaaactgagcattcatctataaaagcaaattaaaatttccatactattcaatgatgacccaatcaatcattcagtcatgtatttagtcaatcagcattaatttagaacaagctattacctactggtaattaaaaagagactttaaatattaactttacttaccagaagatacaggttttagaaragcctggtagccaaatggcactaaatgtagtctcaggcatgccatcatttattttgaggcatttggaggagaggtcactctgcaggtctctgtgaacatcaacatcgcttccttcagggtcgacaatgtcaatctagaacagcagagccacacttgcaggaattccagtgacctttccggaaatcaagaatggaaaggaacaatttgacaaggtgcatgtagcccctaaacatatagattctcgagctaatcatgtttatgaaatgagaaaatatttttaaagattctcaaattcataagtgcaagaattagattctatctcagaaagggacaaagaaaacaactcaatgttgattgtatcagctaagcactggaaagaaggaaaactcaaaaggtttgaagttccaagkttccatattttcttttcactttcttttaatataagtctaataaaaaatgggaatgccattcaaacagcattcccaatagctgaacttctaacttggaatccattgacctttgagtttctctattaattttagatctgcattaggtcactatcaccagttaaaatttatcaaccacctatccttaaattccaaataagtggtacccaaactgtaattattaaggaaaatgaatagaatggattgaggatagagattaaaggaggaggaataaacagggcaggaaattctaaggacattcctaggctgctgtgcctctcagaaacaccaggttcatgaatcggttgttctccacagtactcagcatctggtaatggcctggtcacagctgtgtttagtgagagcctcagatgttccagccagtagctagacacatgacactcagggagcttggctattatgatcttcagtcccccactgaggacactgagaacagagagagaactttagaaagttccctgtgatcacatggccagttggagcagagacattatttgaagccaggaacaccaactccaaggcctgatctcccttctctgtggcccactgcctctcatgggcaagtttggacctgcacacctgagctctagtaaatgtaccacttgtgctattctgctgagcattgagtctgctgggcacgaarccagcctacataatttgaaattaattctgaaatatgaaagggtataaagaataccggttcaaatgaaaagatcattagactgaaactcagtgaaggcaggggctatatatatttagtctcttaatgtatatctaatgcctagtacagagctggtactcaaaacatacttgttaaatgaataattcatttaatatgaatgaattaatgagccaacaaggtgaaatagaactcaaaattcaagtctcatttctagaacttgctagagccatgattttaggcaaatcattgaactctctcagcctcaactttcctatctgcaaaatgggaatgacactttgacagcctaccacatagggcagtggttctaatgagtagcaaagtttcagaactactatcatagcaaataaaactgctttgtagaccctaacaaagcagtgaagtgtaaacagttgttacaaattcagtccaaaatggcctctggattttggaactcctgcttcttggtgtcaagacagagagggtgactgatcgctgtgatctcctgtgcaccacaatggtccactttcttcaggacaaaatgacttccttcctggttcacctgataaggtggcagagttgagactgaagcccaggagaatgaggatttggttcatattagggctggaacaggttaacagccatctgttggacacttgccctgtcagatgagcttgtccttggttgtctcgtgtccagttctggcaccccgcccacttattcgcacgcaccaggaatgcatgtacagtgcctattctgagaccctcccaaagtgtgtctgtttgttttcttccttctggtcacagttcatcttttgacccagtcctcccaagctgagtccatcaaagtgctgttgtgttgctggaggaaagaggctacttcccttgttctctgctgctcccctgcctgtaaccttcctctgctattactttgttgcagtccagctgactcagagggccattagggtgccaagaacagtattatttaaattttaaataatagtctcttgggaagagagggtcatgaaacattcagaataacacagggaattttgccaagagagtgattcataatctttccaactatccacctctgttcccttgttcggtcgggatggacaaaatcctaaagtcaccaagtatttcaggagcagatatgaaatttctcttgaaaakaaatggaatctcttccacgctggttcttatccaacaacttcgcaaaaactaatctttcaatagcaaaacaattgaaatagccattattctcaaatgttgttgtatggcatttactagccacacacccttgacatgtcattgacccatctaagcctagatatttcctcctataaatggggataataaaaccagcctgtctaggatcaaatgacgtaagccatatgagagcattttagaaacaacgaagcagtaaaaatatgcaagatattatttatcattggcaaagatattgggcaaggcatatagacacttgtgtaatgaattttatttttataaagcacttgagttaataacatagaatataaaaatgagctcattttttaaaaagttatgattcctttcacttcccctggaatgggaaattcttcattttggttaatatgctgcaggaggcaccaacttaataccaacactgtgccaagkgaggttttaggagctgtgtgaggaaagtagtggcagccctagcatctagcaaggcacccagaacagaagaggcccccgacatttgttgaatgaacaagtgaatgaataaacaggctgcagaacttccactcttccatggaggaagacagtgtttaggaaagcagcctgaacctccagaaatctaaggttggggttggcagtcttctcattctcattcagcagagtgctgtgaggaccctaggaggtgtgtgcatgtgactccaaggccctcctcagctttgcttttctgatcccctrtctgtgcaatctctttggcaatgatctgggtcaaaatggactcagtgctgtctgagtaaccttgtttctctaaatgatattgggtcatttgcttgtttcctaaagcacagttgtgtccattgaaggtgaaaacaggctttagaatgggaacaggggagggggaaatcctgcccaaagagtgatgagataagaagctttccatcctgcttctaccacaacaggaatccaggggacttggctgattatttgaaaggaaagatggcagaattgggtttggaacataatgagcttaacattcaggtaaagaaaagatgcagcctagcagtttccaaatttgaatagaatcagagccagctaagggaatttaaaaatacataggttctctgattccccagcataactgccagtttctggggatgctttcaagtgcttttgatggtacaactgccaggctgggactcttggtctaccaggaagaagcacatgtgagccctgaatgaagaagcacacagcaagaaatgtagctgagggaggacttcaggcwgggcccacattgaggagcacccaatggtggtgcagcaaaccagagaggagagaaggggctcttaccagtatctccaggaagggcacataaaggaaggaaatgggaccaacaagtcagtcagtactgcaggggacagtgcaagagctgatctgccctgagcttgctcaggcaggcagcacatggaagaagtggtcctcctgagccccactctgagatttcagctgcagaaagccccaggagggaagggtgaatagaagcagaatggacaggagaggctgggtgctggggatggacactgttcctctctccaccttgacctcctctcgcctccaaaggtttgaagtgcactgaggcagaggggaggcggcagtgcctgttactatcattaagatctgtgtggcaacttctcttggcctcctctctttagttacctcctgtcacctcctccaaaaagccttggttatccacctcccccaaccactttcctctaagcttctcacagagaattaatcatgtcctcatctttgtttttaaggaacaaataacgatgttagctacctaccactcactgagtacttagtggtgaagacttggcatatcttattacatataatcctcataaatcagcatttgaagcagggattattattccagctttgtcgatgagcaaacttctgttcaagagttgaatgatatgctcaacatcacaaaactagaagttgcagactttcagacccagaactgcctgattccaaagcccagctcttattcacaatttcacactccactttatcaaccactaagggccccctacaccaactttcttgataaagtgggactcacagactttcattcatttgttcatttatttaacacatgctataaagtacctatgtactagcattgtattgcggttgcaaaaatgaataagaccaagtcatggccctgtcttcggggagaacagactcacaaatagatagttgcaaggcaatatgttgaagcctggtagaggcgtgcatgaagctctgagggagtgtgagtcactgcacccaacctgggggggagcacgtcatccacttcatctctgtctcctctaaaaggcaaccaagtcctctcagaaatgattgccaacagtcccaagtttattcttatctcagagaaaggggccaatgatgctacattagttattcctatcattgttaataactttaatatttatattccaaatcatttccttgcacattatctttgctgaatcacctacatctctgtaaagtagatgaggtacatattattcccatttcccagacaggtaaaaccaaggtctagagaaataactccytttcgtaatgtgacaagagggtaagaacattagctaaagtggaccctctacatctttgccgcatttatcctagtaacttggaaccagaagcttacgtggggtggaggtgacagcaagcatgaggagttcaccctggagcacattttccaaagggttttgtctccaatggctgtttaatgcattggcacaacagttattagaagcacattttaaaaatgttagaagctgtatgaagaccttgagatatgtttcaagggcagagagtgatgccttttttactatgactgcttcccatacactgaaagcaggctgtgtccacacccacaccttgctgcatctgagaacaagttggcccctgcccaggctggacaacctgtcagggttgcaagctgccagtgttcacagaaaatggagtgaacatccttggaatttgcagataccttcacatggaaggctttttaaagtggtacctcctttgaaactcagaagcttataaagaaaacttcttcagcagctgttttacagagttttttgactttaaaaactttcccgccccttccttttaagagcgactaygagaaagttgacgtactgagtcttctctcagattacaagaggaagcctccacatgggaagcctagcagttgtctggaatgctgtgacttatgactcttctgtagtcatatgtcacataggaactctgccggaaaaagagttctgactggcatcaggccagtgcccctctgggacaaagcttccagaggaaggagcaggcagcaatctttgctgatctgcaacctccactggtgatacccaggtgaacagggcttggagtggatctccagcaaactgcagtagacctgcagaagaggggcctcagtgttagaagaaaaataaacaaacagaaagcaaatacaacaacaacaacaacatcaacaaaaaagacmccccccccccccggcaacaaataccccatccaaaggtcatcagcctcaaagatcaaaggtagataaatccgggaagaygaggaaaaacctgtgcaaaaagctgaaaattccaaatgccaaaatgcctcttctcctccaaatgatctcaacacatctccagcaagggcacaaaactggatgaagaatgagattgacgaattgacagaagtaggcttcagaaggtgggtaataacaaactcctttgagctaaaggtacgtgttctaacccaaaggaaggaagttaaaaaccttgataaaatgttccaggacctgctaactagaataaccagtttagagaggaatataaatgacctcaataaatcctcaataaaatactggcaaactgaatccagcagcacatcaaaaagcttatccaccacaatcaagtcagcttcatccctgggatgcaaggctggttcaacatacataaatcaataaacgcaacatatcacataaacagaaccaatgacaataaccacatgattatctcaatagatgcagaaaaggccttcaataaaattcaacatccttttatgttaaaagctctcaataaactaggtattgatggaacatatctcaatataataagaggtatttatgacaaacccatagccaatatcatactgaatgggcaaaagctggaagcattccctttgaaaaccgacacaagacaaggatgctgtctctctccactcctatttaacatagtattggaagttctggccagggcaatcagacaagagaaagaaataaagtgtattcagataggaagagaggaagtcaaattgtctctgtttgcagatgacrtgactctatatttagaaaactcccgtctgtcagaccaacaactccttaagctgataagcaacttcagcaaagtctcaggatacaaaatcaatgtgcaaaaatcacaagcattcatatataccaaaaaaaaaaaaaagactaaaatgtaaamcccaaaactataaaamccctagaagaaaacctaggcaataccattcaggacataggcatgggcaaagactttatgactaaaacackaaaagcaattgcaaccaaagtcaaaattgacaaatgggatctaattaaactaaagagcttctcaacagcaaaggaaactatcatcagagtgaataggcaacctacagaatgggaggaaatttttgcaatttactcatctgacaaaggtttaatatccagaatctacaaggaacttaaacaaaattacaagagaaaaactaccaaccccatcaaaaagtgggcaaagtatatgaacagacacttctcaaaaaaagacatttatgcggccaacaaacatatgagaaaaagctaaacatcactgatcgttagagaaatgcaaatcaaaaccacaatgagatatcatctcatgccagtcagaatggcaattattaaaatgtcaggaaacaatagatgctgatgaggctgtggagaaacaggaacacttttacactgttggtgggattgcaaattagttcaaccattgtggaagacagtgtggcaattcctcaagaatctagaagcagaaataccatttgacccagcaatcccattactgggtatatacccaaagtaatataaatcattctactataaagacacatgcacatatatgtttattgcagcaccatttacaatagcaaaggcatggaaccaacccaaatgctcatcagtgatagactggataaagaaactgtggtagatatatatgatggaatackatgcagctataaaaaacgagatcayatcctttgcagagacatgaatgaagctggaagccatcatcctcagcaaactaacacaggaacagcaagccaaacgccgcatgttctcactcataagtgggagttgaacaayggacacatggacacaaggaggggaacaacatacatcggggcctgttgggcagtggaaagcaaagggagggagagcattaggagaaatacctaatgcatccagggcttgaagcctagatgatgggttgataggtgcaggaaaccaccatggcacatgtatacctatgtaactaacctgcacactctgcacatgtatcccagaggtttaaaaaaaaaaaaattccctttagttattttgtccagggctgcccgcaagtaagagccttcatacaccaggttgcagactatttcatagctttactggatgcaacaaagcccagcaaaacccagctgtgagacgtgctagttgtttccagtatatacccacawgggcttctgggaagaaagattcattctttgttccacctgttataggaattcctgctccttggattttatttttctattttacattcagtcattttgttttgtctcctcatccttgactttttaaatcactcactgtgaaagttgtgctgcctcttctgaagtttccccttagcctcacatcgttaaacttcccttccttggaggagctgggctggccagaaagaggatcccaagctcctctgaatgcctctcctgcctgctgcctcccaggtgtggccacaggcccttagrgcccttcccttgcattacgttaatctctaactcctatttaccctgccctccccagcttactccacaaaacaaaccatcactctgcatcaaggcagatcagggtttctccaccaggtggccagagccggacccaaagtcagggttctgagtctgcagttcccatgctttccattaggccaggctgggagtgatccgccrtgtgggaaagatctgcactgtccaatacagtatgtgactctttatatttaaattaattaaaattaaaggaaaatacaaaattcaatttctcagttgtactggccacatttcaagtgctcaatagccacagtgtggtggtaagtggctaccacattggacagcgcagatacagaacattttcctcattgcagcactgagcagactaatgttgcygttctagtgagggcaggctgccacaaactagttataggaatggctcacctagagcctacagagaactggaaccttctatatctttccattgctggttccccaagatttaaaataggaccaagcacagaagacacttaatacttttttgttgaagaaatgaatgaatccatccatccatttatttattgaatacttatcctgtatcaattactgtgcgaggcagaaggaatatgcagttcattgagacagagtccctgacctcaaaaaacttatcatcttgcagggaaaagagtcaagaagggactatgaagtgcaattgccaaattgcttataacccttaacctaaaaagatttaaaactgtaataggcacagccttttaaaaactttttaaaacctcatctttgaattcacagaaattttaacattctcctttgacacaatgacccagtaaaggcagcagagtcagagaagtcaagtaatttctccaggatcacacagccaggggaggaactgaatgcagaacttttgttgtccagttcccttcccactcccccatgctggctgtgtgagcacagcacctccatgtactggctgaatcccatggaaggaaaattgaatcctatctcccaaccagaacaagaacttctgtgtacgtcatacatggaaggttgcaggcagtgcagcccatggcaccagagcccaatctttgagatttaggctggtttagagttggttctgggcggtaatgagcagcatatcctccactcccctcttaggaatttatgatgtgtttctggatctgtaatgttgcacctgatcacagaaatatgtctgggaggaaggccattctcaggtctgtgtctgcggagacttcccaatgctgtgtttctgagatccccatatatccatctcaggagtgtgctcaggggctctcataaagctggggttcagtgcagggaacagcagcctcagtaatcacatttcctgtctccaaccagaatccccatcaccctaactcataaaaatcccaaacaaatagagtcaagaaggaatatgcacaaggaggaggaaatgcctcctggtcccctaacagctcatcagcttaaactgtacaatctcagagctaattgcccacagctctatcccagctatgctaccctctatgctgccacggttgattgatggaggaagccggttatagcataagcagtcagctcagagcatgacgtaatgatgtatggaacaaaatacctttactgttacacggtgtctgctaatccttccttccagtaatgatgctggtaaaaggaaacatggctgtgtgtgtgccgtgggccaggtgcatgaactcagaagtgcaggcacacctgtttgcaggtgggctgactgatctgaggcaaatacagaggaatgctcaacagtagctgaagtctaagatacctggctctgtaggtaaaaataatcacatccctaatcaaaaaaactcmactcagtcaacaacttttaaaatctttcaagtcttgaagctgttgattagctcagaggaaagactcagaaatttggaaatatttaggcctgggttctactcctggttttcccaccagcttgctgtgtgaccttgggcaagttacttaccactctaacctcagtttcctagtccacaaagtggggataataatcatcataccttcctgccggagtcagagaatgagaggacacgatgagtgtaaagtatctgtctcagtgcctgacccaacctagtgggtatccaataaaaggtcatcattgttattatggatgatgatattatgtgcaataaccttgcattagcttcttcaaactctctacctccccaccaccctgagtttattatctagtagttacaactcaagaaatcaaataggagacacatcgcatgtgckaaactgtgtgacactgactctgagagaagggggagagctgtgtggaatggtggaggcagggaggcctcctggaggttgcaggtagtcgactgtggattggaagcaggggaggaggaaggggtcagagaayggggaacaggggtgctggtgtgagtcaaagcgcaacagccagaatgcatgtgtgggaagaacacacagggctgcaaaggccggcgtggtgcctgagcccatggacaagcagttacgttgtgatgtggtaatgtcacttcagccactgtcttgcagccccttctgccagactagctctggaccgtccttcaaggctcctctccagcatctgctcatgagctctcttatgtcaccctgccccgtgaacacaatactaatagtaataaggagaacagctggtgttcactgaacccttcctatgtgccaatatctgtgctaagcatgttacctgcattatttcatctaatcccacaacacatgaaatgggcagcacttcatttaataagtgggagaagcagcttgcccaaggcagaggcccaggattggtattgtatgttaacccacatgtctcctctagtagacacttgaggacagtgaccaggacctgttctgttcaacaatccccagtgcctaacatgacagtcctggcccaaagtaggaactcatgggtgtttgttgaatgaaggagaagagattgtcaagtacacagtagggctctgggtctagaggcactaggcagatcacaaagcagtactgggagactgacccctggacaaactcagacataaggaatgggcactgggaagcccaggcctctgaagagcagaaggctgggacagaagcaccatctaaggggcttgctgcctttgcgccctgccatttgatggtgggagctattgaaatatcctccctctgatgccagtaaatttcatcctggtaacttgggcatggctgagcccatgggtaaatagagttcagkagctgaaccagagatgatcattcaggaaagctgatgaaataggtaaagtcaggagtgataggtaaaagatttaaaatggttcggcataagcactgaccagtcgaaatggtcacaggtctttagtgctagggaagggtcttgaggcctcctactattccagacattaacccattggttgttagatcttgaggagatccaaaggttccctgggagaatccagagcaggtggggactacacctgacttggagaggtcagagcagtggccctgtaacagatgagacattcaaaactagtaacaatagtcaggtccctaccagcatgtcctcgctgaattccacaagggtattaggttaaaatatgactgtgagaatcagccatttttcaaaagccgcctgtcttatattgagagttttgttaaaaccagataatataatctgtaactctatttactagacacacggaaactgtaacttctcaatgtggtaagaatgaataagggccccagcatcaactcctctgacttgtacatgttgtacagtccctactcttaccttcagacccctcatataccccatgacttttttacatacacagaacaagcatctgagtgccgattagcaaagtttatttcttttgtagagaaatataagttctcacacttcccccttaagccctagtgaactgtcttgtgcctgtcctatgttggaggccgtggtgcaactacagtgccttcatttctgctttgcagacttgtaaatctgaggttgccttaatattagcttcaggatgaaaagtagcttcaagaagtattatcttgtaatccctgaaattaccagctgctaaacagtcatcccttttcctcaaatacaaaagaaggtggcggcagtcagccaagaaaaacatttctccttgtagagagaagtggactgttstgaaaagccacagtgatcattaacaaagatgatgtcataattagatacctgggcctccctaaggtgctctgagccaaggaaagatgatcatagtctttaccgaggcagtgaacagtcgcctgcctaaaggcttttggtgaaagtgcccagtctctggcactcttttatgataagttgtccttattactttgtaaaaatacaaaagaagcccagtattcaaagttttacagatcccaaattacaaaataaagaggaaattgggagtagccaaggagtctaactttcattcactcttttcctcccttccttccttccttccttccttcctttctttcttttctttctttctttctttctgacagagtttcactcttgttgcccaggctggagtgcagtggcatgatcttggctcactgcaacctccgcctcccagtttcatgcgattttcctgcctcagcctcccgagtagctggtattacaggcatgcaccaccatgcctgactaattttgtatttttagtagagatggggtttctccatgttggtcagactggtcttgaactcccgacttcaggtgatccacccgcctcagcctcccaaagtgctgggattacaggtatgagccatcgcgcctggccactcttctttttttatccactcctttctcacaactcccctgacaccccaccacattttctgaggtccgtctcaccaacgtcctgggaggatgtgtactatagtggcaagaatacaaatggttttatcacttacctctagtcaaagaaaatcatcaggaaaaaaattatcacaccaaatatacttatttattataaaatgcatcctggtttaagaagcaatagagtgtgaagtaacagccgtggaacttcaggagcattatgtaacctctcttgcttagccttctcatctgtaaagggaaggttgtaaaatcttcctcacaatgtggctgtaaggaaagtatagaataagattagatattcattaaagtctcttctttagaactgatgatagcaatacctctaaggtgaggataatcaatatatgggtttgsatctccctatggttagtaattccctatcaaaggggttgtaataattttggatgaaatcattttgaggtggcagaggaatgaagggagctctgatgctccctacctttgtgagtttcctttccccaaggaaatctgggggaagctgcctgtcaacagcataatcgaggtctcgtttatcacctgcacagttttcttcactttttggaggaaacttgcattatttgggactcagtatagataaaaggcttaaccagagttgccccagctatgatcagccttaaattcaacaggggttacattagcaggccagcacagtccccatggggattctggccccttccttcttgatgtctgctgtccacggagccactcaggggatcactattgtcagtgttgctagggcctcccatgagaaagctgagtgtgttcaggagctccagtgccagggcagccctcactccagcagggccaccctgagttctacacagaaaaagtctcygtttttcaccatgtgttgcaccttctcatcttgggataaaggtggggctgcacgtgtcccattctcacagtgtctcttatgagaacagttcctgcaacttcttccagcaaacattgtctctacagggcttgattgtgaccaggtcagagattccatgacatcttattccccatctctctccccagcattcaaactagaaaatgctggtctgtgaaagacactgccaagagaatgaaaagacaagccacagactaggaaaaatatttacataatacatgtccagtaaaaggcttatatttaaaacatgcaaagraatatttaaaaaagtttttaatataatttacataccatacaattcacccatttagagttgtccttttgtgtctggcttattttacttagcatagtgttttcaaggttcatccatgaagtagcacagagcagaacttcattcctttttatagctgaataaattttcattgcatgtatatacattttgttcatccattcatatgttgatgaacacctgggttatttccacattttggctatggtaaataatgctgcaatgaacactgacatataatcattcgttcaagtccctgctttcaattcctttgggtatatacctaggagcagacttgctgggtcatatggtaattctatgttcagctttttgaggaccactacgctttccatacaggctgtaatattttacattctcaccagcaatgtaccagtcagagttttcatttctccacatgttcatcaacacttgtttcctagggggggtgtgtgtgtgtgtatgtgtacgtgtgtgttttaatttcagccattctagtggatgtaaagtggtacagtgtatcatattgtggctttgatttgcatttctctactgactaataatgttcagtgtctttccatgtgctattggccattggtttatcttctttagagaaatgtccattcaagtcctttggctctttttaaattgggtcatatttctttttgttgtgctgtaggagtcctttgtatattctggatattaaaccattatcagatatgtgattttcaagtattttattccattctacagattgtcttttcacatccttgatagtatcctttgatgcacagactttctttattttgatgaagtccagtttacctaatttttcttttgttgctagcccttttggtgtcatagctaagaatctattgctaaatccaagatcagaaagatttacccgttttcttctgttttatggttttggatcttatatttaggttgttcatccattttgagttaatgtttgtgtataatgtgagttaggggtccaattttattctttgcatgtagaaatttagttgtccccacaccatttcttgaagagactattctttcccccattggatcgacttggaatccttgtcaaaaatcaatttgccatagatgtatgagtttatttacgaactctttattctattccatttacctatatgtctattcttatgccagtcccacactgttttttttttttttcctgtagctttgtagtaagtttcaaagtccctttttaaaaaaaaagattttggctgttcggggtcccttgctagtccatgtgaatttgaaaactggcttttctatttctgcaaaagaaaggccattaaaattttgatagtgattgcattacaactgtagatcagagaacacttaaaatttaacaataatgaaagaaacaaaccttaaatgggaaaaatatttgaactgatactttaccaaagaagatatacagatagaaaataaacatatgaaatacctaggaatacagctaaccaaggaaaagcaagatctctacaaggagaactacaaaaccctgctgaaagaaatcagagacaataccagtaaatggaaaaacattccatgctaatggattggaagaatcaatgttgtaaaaatggccatactgcccaaagcaatgtacaaattcaatgctattcctattaagctaccaaggtcattcttcacagaactagaaaagctattctaaaatccatgtggaagcaaaaaagagcccaactagccaagcaatcctaagctaaaacaacaaagttggaagcatcatactacctgacttcaaactatacttaaagctacagtaaccaaaacagcatggtactgatacaaaaacagacttgtagaccaatggaacagaagagaaaactcagaaataaagccacacacctataaccatctgatcatcaacaaggttgacaaagacaagtaatggggaaagggatctctattcaataaatggtgctgggataactggctagccatatgcaaaagattaaaactggacctcttcgttttaccatatataaaaattaactcagtgcatctaagatttaaatataagacatcaaactataaaaaaatcctcaaagacaacataagaaatactctyttcaacatcaactttggcgaagaatgtttgactaagtccccaaaagtaatagcaacaaaaagaaacaagaagacatataagtgtccaacaaacatgaaaaaatgctcaacatcactgattatcagagaaatgcaaattaaaatcacaatgagataccatctcacaccagtcagaatggctattatcaaaaagtcaataaacaacagatactggagaggctgatgagaaaagagaaagcttatacactgtaaatgtaaatgtaatgtaaattagtccagccactacggaaagcagcccagagagttctcaaagttaaaacagagctaccactggacccagcaatcccattactgagtatatgcccaaaggaaaataaatcattctaccaaaaagacacatgcacttgtatgttcatcactgtgctattcacaatagcaaaaacatgggatcaactcaggtgcccatcaatgatagagtggataaagaaaatgtggtacatatataccatggaatactatgcagccttaaaaaagaatgaagtcatgttttttgcagcaacacgaatgcaattggaggataatccttagtgaattaatgcaggaacagaaatccaaataccacatgttatcgcttataagtgggagctaaatattgagcacacatggacttaaacatgggaacaatagacactgcagactactagatgggggaggaaggaggatactggaggttgaaaacatacatatcaggtactatgcacactacctgggtaatgggatctctgccctaaacctcagcatcatacaatattcctgtgtaacaaacctgcgcatgtacccctgtatctaaaataaaggctgaaatttaagggaaaaaaagaaaagatactcaacattatatgtcaatagaggattgctaattaaagcaataatgacatatcactgtacatctactagaacaactaaaatccaaaaaactgacaataccagttgctggagaggatgtagagcaacagaaattctcattcacttctagcagggatgcaaaatggtacagccactttagaaaagtttggcagcttcttacaaagctaagcacagttttaccatatgatccagcagttgcactccaacatattatccaactgattaaaaaacttatgttctcacaaaaacctgcacaggaatatttacagcaactttayttataatcatcaaaagctggaagcaaccaagctttcttcaataagtggagaaacaaactatggtataaatgtacagtggaatgttattcaatgataaatatacatgaatgaactctaggtgcgtatttctaagtaaaagaagccagtctgaaaaagctacatactttatgcttccaattgtatgacattctagaaaagatgaaaatgtagagtcagtaaagaaggtcagtggtcgccagaggtttggggaaggaaagagagatgaacaagtaaagcccatggaatttttagtgcagtgaaactattttgtatgatactgtcatggtagatgcatgacatgcatttgtcaaaacccatagaactttacagcataaagaaggaaccttaatgtgtccagatttttaaaaaattatttaataggttgggggattccaggaaggaatgcagactatgacaagagaatctaattgtattacagatgtatgtaacaatctcagtgaagagggtagagggaaaaagttttgacttgagtaacttcggaaatgagtggagtttattagactaaaggcaaaaggaactgcacataaccactgtactctaatttataaagttgtttcccacagtggtacaggttaaccattttgaaactgctatatgtgtatactgaaattaagcaattaagtacataaatgggagatggtcaaagccaagctttttattgttggagtgggaattcacagtttagcaaggtgatggggctaaaatgatccatgtggtaatgaattcacattggagacattagtatgaacttatgttcagcttaatataggttctgatggttaaatacagaaaaatttatagatatgtggttatactccagtcttaatatacacatgtatatttccttgctctgtcaactgacagggactagaaataagcaagggacacaagtagtaaatagtgcccaaatcttgccttctaataccatgctctgaaaaaggaattggggatccttggagaaatggcttagtctaggaccacggctggcaatgtacaagatgaacctggagcatcttgtagtgccagaaagtaaggaattgcaaaacaaaaacaaaaacaaaaaaacaaccaacccactactgctacattatgggtagtatgtcaaagaaatccaagagccagctgaaaacactcccaatggccaaggctaggagtaactttacagtggagaaacctgacaagcatgacttttggccactgatcaaggtccgtatcaacagtgataatcacatttattatatgtacccctggtctgatgtgatgaaaatggcactctacttctgtgatcttccttccaaaaacccataaccaaaatccaatcatgagaaaaacatcagacaagttccagtagaggggtatgtgcaaaatacctgaccagggctcctccaaactgtcaaggctgtcaaaaacaagggacatctgggaaactgtcaaagccaagaggagcctaaggagacatgatgactaaacttaatacaagatcctggatgggtcctggaaatatatatatatatatatatatacacacacacacacacacacacatacacacacacacacacacacatatcattatatacatatatttatctatctatatacagttagataaaaactttaaaaaatctgaataaactaaaggctttagttaataataatggatcattactggttcattgactctaatgaacrtataatactaatgtcaaatgttaataatcgggacactggctgagggggtatatgggaactctactgtcttctcagtttttctgtaaatactgtttgtattagtccgttttcacactgctataaagatactacctgagactaggtaatttataaatgaaagaagcttaattgactcayagttccacatgtctggggaggcctcaggaaacttacaatcatagtagaaggtgaaggggaagcaggcacatcttacatggcagcaggacagasagaaaaggaggaagcaccagacacttatcaaacaaccagatctcatgagaactcactcactatcacaagaatagcatggggaaaactgcccctgtgatccaatcacgtcccaccagggccctccctcaacacatggggactatggatttggattacaattcaagatgagatttgggtggggacacagagacaaaccatatcactgttctaaaaaataaaataaaacatatatattaagaaaaagaaaaatgctgatgatacagatagtttccccattttttccaatgaggaagctgaagttcagaagcatcaaagtaactggcacaagatgaccctcctactttaatagcagaggtggaatttgagttgagggccctttctactgagtcacactgacttttacctatctgtgggtgggaccccttctgttcctttgtctcctgagtatgcacttatgtgtgggtgttcttttcytgtttttcccaggggatggcctttacccttgaagaaaggctgcagcttggaatccacggcctaatcccgccctgctttctgagccaggacgtccagctcctccgaatcatgagatattacgagcggcagcagagtgacctggacaagtcagtacctagtgtctgttctctctgtctggtccttgggctgagctrtctgtttcctgtgcttcacagagggttttctggaaactctccagctaaaaaaggctsagagcccaaagagatcccagactcagccctaccttctaaaggattcayggtctccctgagagacaaggcttgttatgactgaracacagctgacatgtcctgggggaaatgggaagggaaactgcattccaactagtggaatctggaagggcctctgggaagtggtagaagctgagtcagcataagaagcwctgataagatttcagcagwcagcaatggggttcagggagaacatttcactgagagggacgaactggagcaaagaggtagagacaggcctgttaaggaagtagtacgtggcttgggttcctggaattagggggacgtggtgggggagagggaaatggacaggggacaccttaggatggacctagatgtcatttgttggaggctatgggcaacagttaataaccctgcctcctctgtgagttctcctccaatggggatccagacataaagagaaaatggggaatcacagggtcaactttatcagctttactaaaggtagtcacttcccaggttgaatggctataaatgggcgyggctagaatttgaacacagagacctggctccagagtctatgcttttcatttctctgctatgccacagctaagatgcagcagggaccagtggctacaagaccagactctagtactagactgagttcaaatctatattctacctcttaatggcaaaagttacttagcctctatgggtcttttcccattggtacgatgagtaccatagggaaaactcatagggttgttatgaggattaaatgccttagtatttgtgatgtgctgagaacagtgcctggcacatagtaggccgtatgtcagtgtttgtcaagtaaatatgtcaccttgttattggctctagcagaaatgtaggaagaagataaggaatccccctcttagaacaaacaaactatagaacttggccagttctatctatagaacaaactggccaagacttcgggtccctgagggtgtggctgtccccctaggagcagagctcagcagcatgccagggtcaccctgcactcatattcctctgtttccctcataccatccattgcttctgagtggtgatgagcacagaagcctctgctcatacctccacccctactcccaaagctctaaactcgaaggatgttagtcacattaactccaaggccatactgtagtcaggccaaatatcctctccctcttttttatctcactctgattgggtctagctaagtcactctgaagagcaagccagaaattacacaatgaaatcaactaacaggatgagacacaccctaagtttgaacaatctgaaccttctccttttgttaaatttataaagaagaaatcaagtccaaagtgaaatcctctttcctacagatattaagctctaaaagttaaattcaaaaatccttctctcyccagttatttccaggtagatgggcctcactcataggcctggggaaacattccaggctcagggacagaagagtgtgcccattactgggagctctagagggcttgcccctgatgctgcttgaccaccttgacccgcttatttccaggagtccctcattttacaggtgcttggggacacgctaagaaaactcgccatcttcttttgggtaagggcagtggtgtgctggtaaatctttaataactggttatctgtgctgggtgaggggcgggataggaaattatggaatctgccggattccatagtgtaaatacttgtacgatggctgatttcaggttaccagtttgacataactgaatgtagaattgagaaaagatgtgcacaaatggccactgggtaagagaatcccacactggcaatgggctgagatccttgctcttcctgagtatcagtcctctcttgctaaaaacaccttccagagcacagtttttagttttccaccaaaggasyaattcctttggtacagaggaagaggctgagacccaagaagtcacacaagactttcccaagttcacacagctaataaacagcagagctgggattcaaacataggatcctgatgtcatgcccagagatcatttcaccagaccacagacttttttacccctgttagaaaatttctcccatcccacctcatgccagagcatcaagtaccttggtattctccccaagattattatccagaaaggttgtgatattagcagtcacacttaattgtgaatttcaacccctaggttttctctcacagaggtttttgcattcttaggagtctgaatggaagcctctttccctggcttagtgatttcaggtctcagggattaggtaaaagagagattatttttggaaatcacaactcgtgacaggaaccagtccagtgtggtaggagaggccagtcctagagtgcttatatgcccagaattttccttgaccctaccccacctccagaatattattatgctattgtcattcattaatgttcacataatatcataagcatcttgaacagtggttgagagcacagattccagagtcagactgcttagattcaaattcccacacgccatgagaattggggtgagtcaatttctctctacatgagtctccttgcctctaaaatagcaagaattataatccctacttcacaagccattggaagttttaaaggagttaatgtaaaatatttagaacagtatctacaccatgtataataataagcaccacaagcaggtcatcttcacatttcatagctgttgaagctcatgctcagggcagatggcttgcccatgaatgttccgggctgagcaggaacaggagccttgggtctttgcaccacaccacagaggcatcagggcctgctgctaccacatgtcagcttgctttttctctccttttacaaggtacatcattctcatgacactccaagaccgkaacgagaagctcttctaccgagtgctgacttcggaygtggagaagttcatgccaatcgtgtacacgcctaccgtggggctrgcctgtcagcactatggcctgactttccgcaggccccggtgagcccccgtggagtgagggctctgggaggggctgcctcatagaggggaataaattctttccgcccttcatgcatattgggactctggaggctaactctgattgggtcagtggtccaacaaaaagacatttgatttcaagcacttgctcagaaaaatgaccccgtaagcagagaaatgagtgaaaagagtagctagcaagggtttattgactcttcttcacctccaaataataaatgcccagcatgctcagagttggcctgagagagagttcaggttgtatttctctcattatctacctgtcacttctctcaccccctctggtcacctccaaagtaccaacagctctcctgccaattcaggccaatgaataatggagtgttggataccaaagactgaattcttttgatgtttgaaaaaccagcatatcttcctttgggcttgactcagattccactttaaatgtcattttattagacaaaactttggcactccattttctctcagagccaaagaattttgaggagttttctaaagcaatcaggttttttttcaaaatgacttcagaatatatgttttaaaaaaaagaaaaaatggtagagtccttggtgcaaggtgccttataattataaatacatagttctagcactaatgttaaaagagctacctggtatatgtaatggaacattgttctagtctacgttcaaatatgtaaatatgcaacatactgtgcacagatatgtaatttacatttatgtagaatttataagttagtgtttgtaaatcacgcgttttatggggaacatgtaatcatggattcaaaacagctttttttaatttggaaaaacaatcttctagttttgtagccagcatttcggttgaatattacaagatggtcacagtgtgttcccaatgccagtcctgtttctttccggatcccactgttaccgttggcaaaggatagcacatcaaacctcatcctgatggtggtgtgtctggctgttgcagcagacacatcctcatcactcagaacagctaagcttttgcaaacctatagaggctcactatgccagggctccataacagttctggtcttcaacatgcttcttgcaacaggaaggagactcctgttctcttattctcattcccaaaaccaatagtggtagagacattaggagctgatggtacatttctgaaggatgcaggactctatgtacttcccctgttccttctcagaaatgatcctttctgcacagatcagctcatggcatttcatctgaggcatttagcagctccctagggcttaaagaatcaagcccaacagtctgagatatctaagcctgtcacagcccagctccaaaattcagtgttctaactactctgatctgttctccatgcccaagtacacygatgttcttctccatgccttggcacgtatggtcctgtctgcctcaaactcctgcatctcccctttccttggtctccactcatcacaattctggttatccttcaaggcccaccccaagggtcaacttctccacggagccctcccccatcccctcaggctgaactgaccacccctttcttggcctcctcaaaatccattacacatacttcgtctatcccatagttttctttttgtttttcatgtttttagttgtttgtatataactgtcttctactagaatacaaacttcttgaagggtcaagaaacatgatggatctgttgggtattctagaccaatacttggcaagtaattgtcactcggttgggaaagtaatgctgtgtactcagtgtgaagaattggttctttgcaatcagccccgaattttaatctccttgaccctgggtgattttcttatcctctctctgccttaatttccacatttatgaaattgaggtaacaatactacctaactcaatcattatgagggtaaaatgagaagtgtggatcaggtacctggcataaaattggaaccagataaatgtcagtgtctatttctcttcagtaactattgtagaaaggagaaaggattgatagatgtagaatcatattatacatatgcatgtttaaatatttaccaagaaaattgaatcattgaacatgtaacaaactaacacttttaacttcagaaggaaaccaaacccaaaattatgcaaacatacacaattttgcttttccagaaccagctttttcctgaagaggacctttatccccctaaggcaagattaaccatctcccctgactgagatctaatggaaattcaagtctaccccactctggcccctattgccaggatgtgtggaagccctcactccatatgctcttatggaaactagattgtagtggcttcagtggttccagatgaactagtagaagggttaggaccttgcatatgcaacaggcttgtaaaagtagaatttgcctccagagcccactccagaatccagggacaccaccaggactgaatttacatatcttaatgcatttaatgattacaacctccctaggaggtaggccctattatcatctcaattgcaaatgggaaaactgaggcacagggaaataacttacccaaagtcacacatagtttataaccagcaaagccagggcccaagccaatctgaaccaaagtgtagacaggcaaccaccacactacactgcctcttacagtttcggactgtgcacagctggtgggcattctgggtgggrtgtcgttgcagctccaggaatgtttgacttcccaggggtctcaggtggggattgctagataccacttctagagctctcctgggaggaattgatccagcagggtccgggggcctgcagctgagtgagcttgaggcaggcttgggcagacttaaccatcttcttggattagtccctcacactcttggttcagacttctcgaatacgttgtgcacaaacccttcttcagatgattacccaattaagttatctgacatgtgacattctgagttgttgctctaggtttccatttggctgctttccaggtgtggattccacacctgccttgctcctgggggaaataaaagtttgggctccacccaagccctgaacttcatctgagacctggcttggacttactttgtggattagcatctgaagggaggacagtcccgaggccaagagggagagagccagcaccttctcagtttctgaaacgataaacactcctgccaggttcccaagaacaatgaagtcctctgtaatggtgtctggccccccaccaaagctaattacatccagctgatgctaaaattgagactccaacctgcctggggctctgcatcacctcattaccggggaaagagtatctcaggggcacctgagtgtctctgggcagataggcaccacagaaggttctgggctctggtggagcctcctttgcctcatcctgcctctcacttgacactcctctgcatgcgcctccatgagcctggcttgagggaacgccccatgaaggtcagtcactagtgtgtgagctggaagaggtgaaagccagaggtgaggctgggtggaggccgagacagaactcaacccagaggaagggcatggggaggaagccatatggggtccagtgtcagtgaatactctccctctcccaggccacatccctgttgaccagccctgtcttcacatgcctcatcctcytgggctccaagcaatgtgctgcacccgcctttagacctaacatttcccagctttggtgtagggtccaacccgtatgggtgatggaggtctgaaagaaaacattatgacacttgttaaagatggtaaggcagactttattcaggagctggagggcagaggactacgatagattttgaactatggcagaggagtcttgcagtgagggagagattggactcaactctgactccagtaaggacaaatggggatttataacccaggaacagcatggggggcggtgcttggataattactaggaggaaacatcaagaataaggggtttctggttaaattgacaggatgggattattgctgaaggcggaccagggtcctgagataacaagggtggcaagttaccaaaggcaggtggaggattttggccaaaccgacttagcaggattcttgctcacactggattctacaaggacagggagggaagcccaatgtctgatctagtcagaggggactcaggagcccaactaaagttttggtcaaaggagcgtctttgtcagagggctgggttgtaggtagtagaagcagcacggactttgaagccaggcaggcttggccttgaatctcagctcctgatgacttttgacaattaatttagcacctcctcagcctcctcatgtgtgaaatggaaataacacttattcacatggctgcttgggaggattcaatgagattccaaatgtaaagggcctggccctagtaggagctcagcagctgtgatctgtttgacccaggaccccaggagttgtcatcyactcagtcaccccacccaagaatacacactgtaaacctgctgaggccaccccagtcctctgaagtaccgccacactctgttgtttgattcagacctgaaatcatctgtacttgcacttaactagcaaatcattagcaagtatgtgtgaggaatcagagatcgggctgtgatgagttagaaaggtgaggctgggaagtgggacttggttttatgtagtcggaagctctgtggaaagtacctgaagatgtatttggacaaagccagcagcccttggccctgagccaagctgctgtctttcttatctgcaaataggtggtcttctgcacactggccaataacatacatacaggatattaagagttaccatttattgaatgcatgtacttcccatggtgggccctggtctagctattttgtgtgcattattgttgagccctataacaactccttgaggtgcttattatttcactgagatgaaaacgaaagctgacttatytaagacatcacagctgaccaagagccaatttcctgtgttgttcctgaattcatagtccagcttctggttggccctggtaaacatgacacatcattctggccttcacttaaactcccttgccagataagtctgcacccaggaggggcacacacatgggtgcacacacacactctcacacttgggaaacatamtatatcatgttggacagagcacttgggctggagtcagaggtagtggttcagcccccttatctaaataccatgtggccttggagctactccacagctccaagctcggatcacaggaactatccaccttgtggcatcattatgagggtcagaagggctaaacgcatgtgaacatgctttatcaattgtaaacttcctcataagcttaaaggaggggtattactttttcatctcttcttccctctcaccccatacccataagaggatatggttaaggttcacatttacctccttggagtttcctacttcccgctcaatatgtctggtatgcttcattttcttgcattggaaccttcttgtcttcaaccacctccaccagcccaccggcaacccccacatgcacatgcatgtgcacacacacccagagggacccctgggacatgaattacacacctctgcttcctaaatacccactggagcccatttccagctgtacacaagaccaatgaatgccaacactttgatcaaagccactctggaaaacaaagacaaccttgccccagtaaatggagagatccctgacacccagggcatggtttttgagcacatcacaacacagttccaacccaggtgtccgttggttgggaatacacacaaacacacacacacatactcccagcaaaattgggaggcaagcagaaagcaaggactagcatcatcaaaccagccttctgcccaatctcagggcaccaaagcactgattcctttggccaagactgcttgacattccaatttcacccagactctgctgcsaaactttcagctgtgctgctggaaaggcgtccttgagtagactgtgtacaaggtctgcagccggttctggttaacctctcatctggcccttttagtcccttgtccttggctgttatagggagagcactggattaggagtcaggagatctgggttcttgccctcaatcatcccctttctggctacaactccttaggcaagtcacttagctcattagtctgtagtaacagtggtagggttctgctgcatggcttccgtgatctcttctagctctaacattttatgatctagtaacccaaattctataaacaagttagaaatagatttttaagtgatccatggtaatattatgcagccaaacctaaatttccccacctgtaaaattaaaagggtctagttagagcaccaattctcagtcccggctgtgcactaaacgtgtctggagagctgtaaatcagaatccctgaagtggagcccaggcatctctggctttcagaagctcttcagaggactctaatgggcagccagggctgagaactgctgacctgagtgttccctgaaattctttacagcttggatcttctgtgacttttagggagttgataatctgcatcccgtattttccagcccatcccaacctggaagtactcttgaaggttgaggtcataataagataacagaacctccatctccaactcaaccttcagcaagccaaattgttcagccccaccacccaagccccctcatctcattcacagggttgggaggggagttctacatctgccatcctcctctcttccccaatttcctcttgaagttcctatcactacacagaagtctcacttccaagtttcactctcatcctcttgactccctcatgtaattacccacattgtaatagtaatagctgcccactcatgtgatgtcaataatagattagataggagcaaacatcaggctcaagggtggttaatcatttaggtaaccgtgtaccccgtgtggccgggctcaagagatacactggaccagttaatgtccttttcaggaatttgaaatgagacatgaaagcagtcatatagaaagaattttccacttgggaagaaaaattaaggcaaaaaggataccatggtttagactttagagtcaggttgtggtaggccaatggcaaatgccagctaagaaggaacagaaagtaatagacctggaagtaaaggaatattatggaaagaggagataagggcagatggaagagaaacagggaaaaacacagaaagagtggtccctagagctgcctcagttcatgacagctttccattccagttcctggtcaaaactttacaatagacactctttctccagaggtaacttaagtgaacttctgccttaggtaactagaacagccaaactgaaaaagagctatgaaatcaggtggatctgatccccttgtgaataggttggatgaagctaacaggttaaagtaagtatctcaactttagtgagcattaaaatcacctggagggcttgttaaamtagactgagcaagtctgggatgggaccagagaatttacgtatcaacgaagtccaggtgatgttgatgcttctggmcagggaccacactttgagaatcaccggacaaaaggatggtgaaaggcagctcactgcaaagtgaacagagaccatcggaaggaggcaggagtagaagacatttccacggcccactgtacattagtagaaggagctgggagtcatgaaayatgggttcctgtcatgaactagtagcgtgacctataatccctccccctttctgggcctcactttcctcatctataaagtgaggatattagtaggtgatctcagggctccttccaaccctcacggtctttcatttttcttgcagattagagcactgtggctacaaatttgcctctaatgtttctggcatttaagggaggaaaatgcaaaagtaaatgaaaacacatacttttcattttctgacaagaaaaagcttgcaggcttatctgcagaagtgtcattttttgctgagagctctgattcacaaatgggcaccttcccagacaagaccagctgggcaatccagaatctgtcatggattatttgatgccgtggcttgggaattgatgccggaatagatcttaggaaggtggaaggaggaggagtccttccaaagcataaggttgttcagctgttatttgacatgaatgtcacatggagtaagttaattgtatctagatcccacattgctgaaatactttggaacagaggtagaggagagaaggaacatttatttttgtgtctgaattatacagagttcaatcacygagggaactggcttacttttttagtgaaagctttgagatttgcatctgaaaaagtgaatttgtgcttaaatgcatgtggcctgcctaggactttagcatccagaaggagcagcttgctctggggaaaggacggacactcctcagccatccatgagtttgggtgggagtgaaggtggcaatggctgagcagcccccacaaatgcagacattatgttttccttacttaaatgggagacagatgaactttattaactagaacaggatgttctgggttgacttcctttagccaaaggcattattccctggcaatttaaacaaactgacttttgtttcttttttatctggctctgtccttttcctcctttgtccctggcaatcacagccatggtgatcaaaaggataggtgtggggagaatttcctagccctgagaaggaaatacgtacatataagcaggagttgastggaccattcctcagataaccttgatctcccattgacctgtacaatgcactaaatgttctgtttgctcacattgagttttgtctaaaaagagtggcttcttattttttttgtttttggttttgaattattttttattttattttattatactttaagttctgggatacatgtgcagaacgtgcaggtttgttacataggtatacacatgccatggtggtttactgcacccatcaacccgtcatctacataaggtatttctcctaatgctatcactcccccaaccccccacccgcccgacaggccccagtgtgtgatgttcccctccctgtgtccatgtgttctcattgttaaactcccacttataagtgagaacatgcagtgtttggttttctgttcctgtgttagtttgctgagaatgatggtttccagcttcatccatgtccctgcaaataacatgaacttaacctttttatggctgcatagtattccatggtgcatatgtgccacattttctttttttttttttttttttttgagatggagtcttgctctgtcgcccaggctggagtgtgcagtggcatgatctgggttcactgcaagctctgcctcccggsttcacaccattctcctgcctcagcctcctgagtagctgggactacaggcacccaccaccatacccggctaattttttgtatttttagtagagatggggtttcactgtgttagccaggatggtctcaatctcctgaccttgtgatccgcctgcctgggcctcccaaagtgctgggattacaggtgtgagccactgtgcccggccgctacattttctttatccagtctatcattgatgggcatttggattggtcccaagtctttgctatagtgaatagtgctgcagtaaacatacgtgtgcatgtgtctttatagtggaatgatttataatcctttgggtatatacccagtaatgggattgctgggtcaaattgtatttctggttctacatcttcgaggaatcrccacactgtcttccacaatggttgaacaaatttacactctcaccaacagtgtaaaaacgttcctatttctccatatcctctccagcatctgttgtttgctgactttttaatgatcaccattctaactggcatgagatggtatctcattgtgcttttgatttgcgtttctctaatgaccagtgatgatgagcattttttcatatttttgttggtggcattaatgtcttcttttgagaagtgtctgttcgtatctgtcacccactttttgatggggttgtctgtttatttcttgtaaatttgtttaagttctttatagatttttggatattagccctttgtcagatggatagattgcaaaatttttctcccattctgtaggytgcctgttcactctgatgacagtttcttttgctgtgcagaagctttttagtttaattagatcacagttatcaattttggctttgttgccactgcttttggtgttttagtcatgaagtctttgcccatgtctgtgtcctgaatggtattgcttaggttttcttctagggtttttatggttttaggtcttacgtttaagtctttaatccatcttgagtaaatttttgtataaggtgtaaggaaggggtccagtttcagttttctgcatatggctagccagttttcccaacaccatttattaaatagggaatcctttccccattgcttgtttttgtcaggtttgtcaaagatcaagatggttgtagatgtgtggcattatttctgaggcctctgttctgttccattggtctatatgtctgttttagtaccagtaccatgctattttggttaytgaagccttgtagtataatttgaagtcaggtagcatgatgcctccagctttgttctttttgcttaggattgtcttggctatatgggctcttttttgtttccatatgaaatttaaagtagttttttctaattctgtgaagaaagtcaatggtagcttgatggggatagcattgaatctataaatactttgggcagtatggccattttcacaatattgattcttcctatccatgagcatggaatgtttttccatttgtttatgtcctctcttatttccttgagcagtggtttttagttccccttgaatgggtccttcacatcccttgtaagtcgtatttctaggtattttattctctttgtagcaattatgaatgggagctcactcatgatttgcctgtttgtttattattggtatatagcaatgcttgtgatttttgcacattgattttgtatcctgagactttgctgaagttgcttatcagcttaaggagattttgggctgagatgatggggttttctaaatatacaccatgttatwtgcaaacagagacaatctgacttcctctcwtcctatttgaataccctttatttctttctcttgcctgattgccctggccagaacttccaacactatgttgaataggagtgatgaaagagggcatccttgtcttgtgccagttttcaaagggaatgcttccagcttttgcccattcagtatgatactggctgtgggtttgtcataaatagctcttattattytgagatactttccattgatagtttcttgagagtttttagcatgargggtgttgaattttatcgaaggccttttctgcatctattgagataatcatgtggtttttgtcattggttctgtttacgtgatggattacgtttattgatttgcatatgttgaaccagccatgcatccccaggatgaagccgacttgatcgtggtggataagctttttgatgtgctgctggatttggtttgccagtatttttgcctcatcgaaagggatgaggatttttgcattgatgttcatcagggatattggcctgaaaaattctttttgtgttgtgtctttgccaggttttggtatcaggatgacgctggcctcataaaatgagttagggagcggtccctctctttctattgtttggaatagtttcagaaggaatggtaccagttcctctttgtacctctagtagaattcggctatgaatccgtctggtcctgggctgtttttggttggtaggctattatttagtgccttaatttcagaacttgttattggtctatttagggattggacttcttcctggtttagtcttgggaggagggtgtatgtgttcaagaatttatcaatttcttctagattgtctagtttatttgcgtagaagtgtttatagtattctcttatggtagtttgtacttctatggaatcagtggtgatatctcctttatcattttttattgtgtctatttgattcttctctcttttcttctttattagtctggctagcagtgtatctgttttgttaatcttttcaaaaaaccagctcctggattcattgatttttttgaattttttttgtgtctctatcgccttcagttctgctctgatcttagttatttcttgtcttctgctagcttttgaatttgtttgctcttgcctctctagttcttttaattgtgatgttagggtgtcagttttagatctttcctgctttctatgtgggcatttagttctataagtttccctctaaacaccgctttagctgtgtcccagagattctggtacgttgtgtctttgttctcattgatttcaaagaacttatttatttctgcctttatttcattatgtacccagtaatcattcaggagcaagttgttcagtttctgcctagttgtgtgatttttgagtaagtttcttaatcctgagttctaatgtgattgcactgtggtctgagagacagtttgttatcatttctgttcttttacatttgctgaggagtgctttacttccaattatgtggttgattttagaataagtgtgatgtggtgctgagaagaatgtatattctgttgatttggggtggagagttctgtagatgtctattagctccacttggtccagagctgagttcaagttcggaatatccttgttaattttatgtctcattgatctgtctaatgctgacagtagggtgttaaagtctcccgctgttcttgtgtgggagtctaagtctctttgtaggtctgtaagaacttgttttatgaatctgggtgctcctgtattgggtgcatatatatttaggatagttagctcttcttgttgcctcaattccctttaccattatgtaatgcccttyttggtcttttttgatctttctaggtttaaagtctgttttatcagagactaggattgcaacccctgctttttttgctttccatttgcttggtaaatmttcctccatccctttattttgagcctatgtgtgtctttgcatgtgagatggatctcctgaatacagcacaccaatggktcttgactctttatccaatttgccagtctttgtcttttaattggggcatttagcccatttacattgaagattaatatggttatgtgtgaatctgatcctatcattatgatgctagcttgttactttgcccattagttgatgcagtttgttcatagtgtcaatggtctctacatttttgtatgtttgtgcagtggctggtaccagcttttcctttccatatttaatgcttcctccaggagctcttgtaagacaggcctgagggtgacaaaatctctcagcatttgcttgtctgtaaaggattttatttctccttcacttatgaagcttagtttggctggatatgaaattctgggttgaaaattgttttctttaagaatgttgaatattgactcccattctcttctggcatgtagggtttctgcagaaagatcctctgttagtccgatgggcttccctttatgggtaacctgacatttctctctggctgcccttaacattttttccttcatttcaaccttggtgaatctgacaattatgtgtcttggggttgctcttcttgaggtgtatctttgtggtgttctatgtatttcctgtatttgaatgttggcctgccttgctaggtttgggaaattctcctggataacatcctgcagagtgttttccaacttggttccattctcctcgtcactttcaggtacaccaatcaaacatagttttggtcttttcacatataccatatttcttggaggcttccttcattccttttcattattttttctctaatcttgtcttcacgctttatttcattaagttgatcttccatctttratacccttctaccgcttaatcaattctgctgttgatacttgtgtattgttcatgaagttctcatgctgtgtgtttcaggtccatcaggtcatttatgttcttctctaaatggttattctagttagcaattcctctaactttttttcaaggttcttagcttccttgcattgggttagaacatgcttctttagctcagaggagtttgttattacccaccttctgaagcctacttctgtcaattaatcaaagtcatgctctgtccagttttgttcccttgctggcaaggagttgtgatcctttggagcagaagaggcattctggtttttggaattttcagcatttttgcgctgctttttcctcatctttgtggatttgtctacctttggtctttgattttagtgaccttcagatggggtttctgtgtggacgtcctttttgttgatgttgatgctattcctttctgtttgttagttttccttctaacagtcaggcccctctgctgcaggtctgctagagtttgctggaggtccactccagaccctgtttgcctgggtatcaccagcrgaggctgcagaccagcaaaaattgctgcctgctcctttctctggaagcttcatcccagaggggcaaccaccagatgccagccagagctctcctgtatgaggtayctgttgacccctgctgggaggtgtcccccaccctagtcaggaggcatgggggtcagggaaccacttgaggaggcagtcttttccttagcagagctcaagcactgtgctgggagatccactgctctcttcagacccggcaggcaggaacrtttaagtctgctgaagctatgcccaaagctgccccttccctgaggtgctctgtcccagggagatgggagttttatctgtaagcccctgactggggctgctgcctttctttcagagatgccctgcccagagaggaggaatctagagaggcagtctggctacagtggctttgtggtactgtagtggtctccacccagtctgaacttcccagcagctttgtttacactgtgaggggaaaaccacctactcaaacctcagtaatggcagatgcccctcccgccatcaagctcaagtgtcccaggtcaacttcagactgctgtgctggcagcgagaatttcaagccagtggatcttagcttgctgggctctgtgggagtgggatccactgagctagaccacttggctccctggcttcagccccctttccaggcaagtgaacggttctctcactggtgtttcatactccaggcaccactggggtatgaaaaaaaaaacacctgcagctagcttggtgtctgcccaaatggctgcccagttttgtgcttgaaacctagggctctggtggtgtaggcaccggaaggaatctcctggtctgaaggttttgaagacagtgggaaaagcatagtatctgggccagagtgcactgttcctcatggcacattccctcatggcttcccttggctaggggagggagttccctgaccccttgcactttttgggtgaggtgatgccccaccctgcttcaccttgctctccatgggctgcacccactgtctaaccaatcccaatgagatgagccaggtacctcagttggaaatgcagaaatcacccaccttctgcattgatctcactgggagctacagactggagctgttcctattcggccatcttgccagccacttcagtagtggcttaagagaaactgcaagcagtgcaaatgttctggggtagaggaagagtaaaggatcattgaaaattgaaggttgccttgccagaaaagaacctcagctggccagcccctaagatgcattattatattcatgtccttgtgttaatccattgtacctacagtaaatttcccttgcatatttactttgtgctctgaagtggtaacattgaaatctttatctatgaactgatttcttatagactcttaatccagcatttcccaagcccatagggatttggatttaggaatgactggttttgtttcatagagggatgtgaaggaatagatcaagaaggtcctatctggggtgtgtcataccaaacccctatccactccactrggggtggcaccaggttcaagaggccaaagaagagacccagagccttgggtcaagacatggggcttacatacagggctaacatgtaagagagaatgtccagtagcggtagactggataggagaaccactgttccagtggtggcaggctggacagtagaaccgcaacagcttgcaacaacaacaacaaaaaaagcatgcagtttatgtagcattttcacttaaccacctttccctaacaacctccacctggcaaccatcattcaatccagaactcggggcctctattccctgtatggcctgtgttccacaggatgggacaggggctcagatgttccttatagtcaaggatgaatctctgggttggccacttccagattccctagctcagaaaagacattcaggtgcatctgccatactgagtcatttagggtatgcttaagttattgctatcagatacgtttaccatacagcttgctggagatggaaacaaggctcaggcagggtgccctagtgaggtgttgtcagcattgttcagatttkttttaaagctcatcagctatctttagtgttactatattttatatggggcccaagacaattcttctatttccaatgtggtccagtgaagccaaaaggttggacacctgtggtccagaaggttactgatggggacatatgaaaagattaaaaggacaaagaataatgtgggtggtggaaaatggacttctgcagcttcacacagtgtatatgatctcgtctcctgaaacaagctataggagaggaggagctgtgcattgttcttccctatatctgccatggtgctaagcatggtgtcttcaagcacctaccagagaaagagcatacagactgtcttcttattaaattaaacaagcattggttaagcaccatctttgtggttggccaccataagtacatgtatgattcaaatgaaataaggatattcattgatggtctctgtttttgaggagtttacagctcaactgagaacaattctaagccaatataagccaatgtgtgaagtgtggcatgggttgtctagtttactttgcaagtaatgaggtaattcattataggaggaaatccctccattgaattgttggttcttratctaaaccttgagagaaggattttgattcacattgggaagatggcccatcagaatctctggcatacaaagatttactggatgagttccaagcaggagaaactgcataggcaaggctataggctggaaaagccaagaatcatagactctcaggattgggagtgtaagggacactgctggttgccccttcctccttattaacaaccccaattttttcagttatccatcttcctccaaakggtcacgcactttgagggagtcttggcccttcccagaatcaaccagtaggtctcaaatccaagccatcatagtgttgtggttccttgtcagtgattactttaggtgtagatatatgacctaattctggtcaaagaaatgtgagggtgatttgccacaggacttctgggaaaagctttcctcatcacaagaaagcccctcttcttccctggacatttcctgggtaatggctccactggccagggtagggaaggtaaagttggatgtagggcaaagtgaggagtttggattgggtcagggatcatgatgcactttccagtggggtagactctaatttcaaagcaagttttgaggatgttaattctcaagagsactaaagaggagagcccacagggaactacagtactaaccgaagcatgaggagggaagagcctgatgagttcctagatgtggaaatgagagrtggaaatccaagaggccaagaaagaggagtctgtggtatgtgagggtgagctggatgtgaaggtaaaagtgagaggaagaattgtcagattgtgaactgtgttgtggtggactgacggttgtgggaagttgagcttgggctccagaaatggaacaatgattaaaacaactactaccacctacttttactgagtggccagtactcagtaaaagataataaagttgtctttattatctttgaatcrtacaacagtcctaggaggtgagagtgcattattgtccttagacaagcggttcagaggaggcagagacttgcctaaggccatatgacaagcaagtagcagtattcaaacctgaatctattctattccaacgtctttccttgttccatattgaaatccctcaatcctatattgttaaaactcagcatttytgaattatgtgtgtccccataaatatgctccctctccccaaacaaccacaagaaagcaaacacattcctaaagtgaatgaaatcagcaacaggtatctgcaggagtctatgtgcatcagtctcagggctagagtcccttgcagggacatggggtgaaatggatttgtgaatttccatgccacatcaaggtgccatgttaaagagcctcagcaagaaagccagggcttgcaccttgggcaggttcttcagacctgcacaggcagagccttgtaagtacacaccaaacacttcatggagctcctgctcccaagatgcccccttaagtaggtgtcaggatgtttaatggcctccacattttgaaacctccctgcacagcttgtggagcactctagccaatacagatgttacttgtgtgccccctgcagcccactcctgaacactcctagacaactccctgcactgggttccaagacaggctgagaaattgcctcctaagaggcctttgaaaagaaagatctcttcagcaagcctgacatgggaacagatggaattgattagcttttaagagacccttgagctctgcatttctgcagctttgcctttcctagtagcatacactgagaggttcatgaagytataaattaatcagctcaaatcaaggccaaggggaaaaatgactccctgccccacgggcagggcatgggcacaaatcagtggaaatgacaggactagaactcaggcctcctgcctcttatttcaaaagtctttactcctctccattgtgcacagtgatagttattccctccactatttgaatcaaacttaatttgcaattattatatttaatgcatatttaatattatatataatattatatttatgtagcacttcgaactgtttttttttattatactttaagttttagggtacatgtgcacattgtgcaggttagttacatatgtatacatgtgacatgctggtgtgctgcacccactaactcgtcatctagcattagktgtatctcccaatgctatccctcccccatccccccaccccacaacagtccccagagtgtgatattccccttcctgtgtccatgtgatctcattgttcaattcccacctatgagtgagaatatgcggtgtttggttttttgttcttccgatagtttactgagaatgatgatttccaatttcatccatgtccctacaaaggacatgaactcatcattttttatggctgcatagtattccatggtgtatatgtgtcacattttcttaatccagtctatcattgttggacatttgggttggttccaaatctttgctattgtgaaaaatgctgcaataaacatacgtgtgcatgtgtctttatagcagcatgatttataatcctttgggtatatacccagtaatgggatggctgggtcaaatggtatttctagatctagatccctgaggaatcgccacactgacttccacaatggttgaactagtttacagtcccaccaacagtgtaaaagtgttcctatttctccacatcctctccagcacctgttgtttcctgactttttaatgatggccattctaactggtgtgagatggtatctcattgtggttttgayttgcatttctctgatggccagtgatgatgagcattttttcatgtgttttttggctgcataaatgtcttcttttgagaagtgtctgttcatgtccttcgcccactttttgatggggttgtttgtttttttcttgtaaatttgtttgagttcattgtagattctggatattagccctttgtcagatgagtaggttgcgaaaattttctcccattctgtaggttgcctgttcactctgatggtagtttcttttgctgtgcagaagctctttagtttaattagatcccatttgtcaattttgtcttttgttgccattgcttttggtgttttggacatgaagtccttgctcatgcctatgtcctgaatggtaatgcctaggttttcttccagggtgaactcaaatacaatgctgccaagtgccctgtgcaacagacaaggcagcccccttccacacaaggaaatagacaattcaggaaattcactgactccccaaacctgtacaaatagagatatagctgaatctagggttggagtttctatttgcctccagractctttctgctactaagctataaacttccagtggtcaggagacaaatttgtttgctcatcattttatacccagcagctagcacagggccttccatacagttcttgtcagatggaaggaaggatggatggaaggagtagtggatagatagaagaagttttatttttctgatgacttccaatagaatcctagaggagtgagcttctattatccatggctccctacttaaagacagagctctaactctataactttgtttaaaatgcattgcatgttaaatttttaaaacatgaatgtaaaaagtaaatgtaaaaagtktaaaaattcctttaaggatcttcagcaagaagacttgcatagggcttagtgggcactcagtaaatgtttctgaaacttaattggatttaaatgctaggatggygagataaaagtactttcaaaaagtttctgttaccaggataaaggatagactttatcccttatttgcaaagtaactttatccccaaatccagcctatcagctggggagaaatcaatagctagagtgaaatgagattatgtcctacacttccagaatccttggttctggaaaattaataataatgtccagtcctcatcacaaatgaggttccatagattgccctggcctgctgctgcaggatgaaccctggataagccaatctgtgcttcccacgtgcagccaagtggacgacatagatgtgatgttggcatggtaacatttttactgactggaagaacagatgaaggtagggtgaacctccttggattgtaagggggtgggagtggaggtaagaagtagtaaggagcagagaaaattaccttttactagacaaagatgcaggaagcttgaattcaagtaatagcaggamaaatacaggtaaaatgctggctaaaataattaagataaataggtaartgattttgattattgaactgagagggcagtgtttgagagtaaacctctacctaggccagtggttttaaaccttcgttaagaattcacttatgaaaaattagactccagctctcttgccaattctgattcactgtgtcaggagtagggcccaaactctccattttaaaactacttacaagttcttctcctgcaagaagcttattctccacacaagtaacagatgggccatattttcttaaacattaccctgggaaaacaaaagcctcagagagcaaacccaagtggaagtccactcaactattctcactttgtatccctatggaatagggatataaggaaacaaaaaatatttgcacagttgtgcagcgtgtgttttaagctaagtgttattattattattattattattttgagatatagtcttgctctgttgcccaggctggagtgcartggcatgatctcggctcactgcaacctccacctcataggttyaagcagttctcctgcctcagtctcccgagtagctgggattacaggcatgcgccaccctgccccactaatttttgtatttttagtagaggaggggttttgccacgttggccaggctggtctcgaatgcctgacctcaggtgatctgtgagcctcagcttcccacaatgctgggattacaggcgtaagccacctcgcccagcctaagctaagtgttatttaaaaagagtcaaagagaaaaaaattaacttaaaagtgtataaagtagaaaagtcacagtaagctaaggttaatttattaytaaagaaattttttttgaaaaaaatttagtgtagcctaagtatacagtgttataaagtctacattagtatacagtaatgtcctgggtcatcacattcactcatctctcactgactcacccagagcaacttccagttctgcaaatttcattcattttaggtgtcctatacaggtgcaccattttacatatatatatatatatatatatatatacacacacacacacacctcatttttaccatacttttttaatgtttgggtgttcagatagtaacaaatatttactattttgttataattacatacagtagtcagtacagtaacatgatgtacatgtttgtagcctaggagcaataggctatgccacgtagcctaggtgtgtaataggctataccacgtagcgtaggtgtgtaataggctatatcatgtagcctaggtgtgtaataggctataccatctaggtttgtgtaagtgcactttayrgtgttcacacaatgatgaaattgtctaattatgcattttccaaaacatacatccactgtgactgtattttgttgaagatttttatatctgtgttcatcaaggatattagcctgtagtcttcttttctttgtagtgtccwmgtctggctttagtatcaaagtaatgctggccttgtaaatgagtttggaagtatttcctcctctttttggaagaatttgagaaagattgacattagctcttctttaaatatttggtagaattcaasagtgaagctgtctggtcctgggtttttctttgatggttgacttttgatcactgattcaatctccttactcactcttagatctgttcatattttctatttcttcatgattcagtcttggcaggtactatgttgccaagaattcatccatttcttgtagattatccaattctttgatatataattgttcataacagtcttttatgatcttttgtatttctgtagtatcagctgtaatatcttctctttcatttctgattttgagtcttctctctttttttcatagtatagctaagggtttgtcaattttgcttatcttttcaaaaaacccaactcttagttttgttgatcttttctattatttttctagtctttatttacttctgttcttatctttgttatttcctttcttatgctaactttgggctcagttttttctttttctagttccttgaggtataagattaggttacttgtttgtgagtctttttttttttggagaccccatcttgctctgtcacccaggctggagtgcaatgatgcgatctcagctcactgcaacctctgcctcctgggttcaaacgattctcccacctcagcctcctgagtagccaggattacagtcgcctgaaacatgcccggctaattttttagtagagacggggttttgccatgttggccaggctggtctggaactcctgacctcagttgatccgcccaccttggtctcccaaaatgctggggttacaggcgtaagccaccacgccagagccctttcttcttttttgatgtaggagtttattgctataaactttcctcttagaattgcttttgttgcatctcatatgttacattatgctatgtttccagtttcatttatctcaagatatttttaaatttccctttttaaattgcttctttgacctaagggttgttcagagaatgttgtttaatttccacgtatttcaattttccaaaattcctcctgttactgatttctagttttatatcatagtgattagaaaagatactttccatagataggatttcaacatccttaaatttgttaagacctgttttatggcctaacatatgatctatccaggagaatgttctgtatgcattggagaagaatgtgtattctgttgcagttggaagaaatgttctgtatatatctgtagatccattttgttcaaagtgtaattcaagtcgaatgttahttattttctgtctgatctgtctattattgaaagttggagattgaggtcttctgctattattgtattgcagtctatctcacccttcagatattttaatatttgctttatatatttaarttctccaaggttaggtgcaaatatatttatagaagttacaccctcttgatgaattgactcctttatcattatataatgatcttctttgtctcttttttacagtttttgatttaatatctatwctgttctgtctgatataactaaccctgttcttctttggtttacatttgcgtggaatatctttttccatccctccactttcagtttctggttttttttttgttttgttttttttaattatactttaagttttagggtacatgtgcacaatgtgcaggtttgttacatatgtatacatgtgccatgttggtgtgctgcacccagtaactcgtcatttaatattaggtatatctcccagtgctatgcctcccccctccccccacccaaaaataggccccggtgtgtgatgttccccttcctgtgtccatgtgttctcattgttcaattcccacctatgagtgagaacatgtgacagtttgctcagaatgatggtttccagcttcatccatgtccctacaaaggacatgaactcatcattttttatggctgcatagtattccatggtgtatatgtgccacattttcttaatccattctatcattgttggacatttgggttggttccaagtctttgctattctgaatagtgccacaataaacatgcgtgtgcatgtgtctttatagcagcatgatttataatcctttgggtatatacccagtaatgggatgcctgggtcaagtggtatttctagttctagatccctgaggaattgccacactgacttccacaatggttgaactagtttacagtcccaccaacagtgtaaaagtgttcctatttctccacatcctctccagcacctgttgtttcctgactttttaatgatggccattctaactggtgtgagatggtatctcattgtggttttgatttgcatttctctgatggccagtgatgatgagcatttcttgatgtgtcttttggctgcataaatgtcttcttttgagaagtgtctgttcatatccttcacccacttgttgatggggttgtttgtttttttcttgtaaatttgtttgagttctttgtagattctggatattagccctttgtcagatgagtagaatgcaaaaattttctcccattctgtaggttgcctgttcactctgatggtagtttcttttgctgtgcagaagctctttagtttaattagatcccatttgtcaattttggcttttgttgccattgcttttggtgttttagacatgaagtccttgcacatgcctatgtcctgaatggtatgcctaggttttcttctagggtttttatggctttaggtctaacatttaagtctttaatccatcttcaattaatttttgtataaggtgtaaggaagggatccagtttcagctttctacatatggctagccagttttcccagcaccatttattaaatagggaatcctttccccatttcttgtttttgtcaggtttctcaaagatcagatggttgtagataagcagcattatttctgagggctctgttctgttccattggtctatatctctgttttggttccagtaccatgctgttttggttactgtagccttgtagtatagtttgaagtcaggtagcgtgatgcctccagctttgttcttttggcttaggattgtcttggcaatgcaggctattttttggttccatatgaactttaaagtagttttttccaattctgtgaagaaagtcattggtagcttgatggggatggcattgaatctataaattaccttgggcactatggccatttccatgatattgattcttcctatccatgagcatggaatgttcttccatttttttgtatcctcttttatttccttgagcagtggtttgtagttctccttgaagaggtccttcatgtcccttgtaagttggattcctaggtattttattctctttgaagcaattgtgaatgggagttcactcatgatttggctctctgtctgttattggtgtataagaatgcttgtgatttttgcacattgattttgtatcctgagattttgctgaagttgcctatcagcttaaggagattttgggctgagacaatggggttttctagatatacaatgtcatctgcaaacggggacaatttgacgtcctcttttcctaattgaataccctttatttccttctcctgcctgattgccctggccagaacttccaacactatgttgaataggagtggtgagagagggcatccctgtcttgtgccagttttcaaaggraatgcttccagcttttgcccattcagtgtaatattggctgtgggtttgtcatagacaacccttattattttgagatatgtcccatcaatacctaatttattgagagtttttagcatgaagggttatttaattttgttgaatttttctgcatctattgagataatcatgtggtttttgtctttggttctgtttatatgctagattacagttattgatttgcatatgttgaaccagccttgcatcccagggatgaagcccacttgatcatggtggataagctttttgatgtgttgctggattcagtttgccagtattttattgaggaattttgcatcgatgttcatcagggatattggtctaaaattctctttttttgttgtgtctctgccaggctttggtatcaggatgatgctggcctcataaaatgagttagggaggattccctctttttctattgattggaatagtttcagaaggaatggtaccagctcctccytgtatctctggtagaattcggctgtgaatccatctggtcctggactttttttggttggtaagctattaattattgcctcaatttcagagcctgttattggtccattcagagattcaacttcttcctggtttagtcttgggagggtgtatgtgtcgaggaatttatccatttcttccagattttctagtttatttgcgtagaggtgtttgtagtattctctgatggtagtttgtatttctgtgggattggtggtgatatcccctttatcattttttattgcgtctatttgattcttctctcttttcttctttattagtctcgctagcagtctatcaattttgttgatcttttccaaaaaactactcttggattcattgattttttgaggggttttttgtgtctctctctccttcagttcagctctgatcttagttatttcttgccttctgctagcttttgaatgtgtttgctcctgcttctctagttcttttaattgtgatgttagggtatcaatcttagatctttcctgctttctcttgtgggcatttagtgctataaatttccctctacacactgctttgaatgtgtcccagagattctggcatgttgtgtctttgttctcgttggtttcaaagaacatctttatttctgccttcattttgttatgtacctagtagtcattcaggagcagtttgttcagtttccatgtagttgagcggttttgagtgagtttcttaatcctgagttctagtttgattgcactgtggtctgagagacagtttgttataatttctgttcttttacatttgctgaggagtgctttacttccaactatgtggtcaattttggagtaggtgtggcayggtgctgaaaagaatgtatattctgttgatttggggtggagagttctgtagatgtctattaggtccacttggtgcagagctgagttcaattcctgggtatccttgttaactttctgtctcattgatctgtctaatgttgacagtgggatgctaaactctcccattattattgtgtgggagtctaagtctctttgtaggtctctaaggacttgctttatgaatctgggtgctcctgtattcagtgcatatatacttaggatagttagcttttcttgttgaattgatccctttaccattatgtaatggccttctttgtctcttttgatttttgttggtttaaagcctgttttatcagagattaggattgcaacccctgcctttttttgttttccatttgcttggtagatcttcctccatccctttattttaagcctatatgtgtctmtgcacgtgagatgggtttcctgaatacarcacactgatgggtcttgactctttatccaatttgccaatctgtgtcttttaattggagcatttagtccatttacatttaaggttgatattgttatgtgtgaatttgatcttgtcattatgatgttagctggttagtttgcttgttagttgatgcagtttcttcctagcctcgatggtctctacatttttgtgtgtttgtgcagtggctagtactggttgttcctttccatgtttagtgcttccttcaggagctcttgtagggcaggcctggtggtgacaaaatctctcagcatttgcttgtctatgaagtattttatttctccttcmcttatgaagctagtttggctggatatgaaattctggcttgaaaattcttttctttaagaatgttgaatattggcccccactctcttctggcttgtagagtttctgccragagatcagctgttagtctgatgggcttccctttgtgggtaacccaacctttctctctggctgccctcaacattttttccttcatttcaactttggtgaatctgacaattatgtgtcttggagttgctcttctcaaggattatctttgtggcattctctgaatttgaatgttgaccttcctgactagattggggaagttctcatgtataatatccggcagagtattttccaacttggttccattcgccccgtcactttcaggtacaccagtcagacatagatttggtcttttcacatagtcccatatttcttggaggctttgttcgtttctttttattcttttttctctaaacttctcttctcacttcatttcattcatttgatcttccatcactgataccctttcttccagttgatccaatcagctactgaggcttgtgcattcgtcacgtagttctcgtgccttggttttcagctccatcaggtcctttaaggatttctctgcattggttattctaggaagccatttgtctaatcttttttcaaggtttttaacttctttgccatgggttcgaacttcctcctttagctcagagtagtttgatcatctgaagccttcttctctcaacytgtcaaagtcattctctgtccagctttgttccattgctggtgaggagctgcgttcctttggaggaggagaggcactctgatttttagagttgccagtttttctgctctgttttttccccatctttgtggttttatctacctttggtctgtgatgatggtgacgtacagatggggtttggtgtggatgtcctttctgtttgttagttttccttctaacagttaggaccctcagctgcaggtctgttggagttgctggaggtccactccagaccctgttcgcctgggtatcagcagcagaggctgcagaacagcagatattggtgaacagcaaatgttgctgcctgatcgttcctctggaagttttgtctcacaggggtacccagccatgtgaggtgtcagtctgcccctactggatgttgcctcccagttaggctatttgggggtcagggacccacttgwggaggcagtctggccattctcagatgtaagctgtgtgctgggagaaccactactatcttcaacgctgtcagacagagacatttaagtctgcagaggtttctgctgccttttgtttggcattgccctgccscgagaggtggagtctacagaggcaggcaggcctccttgggctgcagtgggctccacccagttcgagcttcccggctgctttgtttacctactcaagcctcagcaagagtgggcattcctcccccagcctcgctgccaccttgcagtttgatctcagactgctgtactagcaatgagcaaggctccatgggcataggaccctccgagccatgcacgggatataatctcctggtgtgccatttgctaagactgttggaacagcgcagtattagggtgggagtgacccgattttccaggtgccgtctgtcacccctttctttgactaggaaagggaactccctgaccccttgtgcttcctgggtgaggcaatgcctcgccctgcttcggctcatgctcggtgcgctgcacccactgtcctgcatccactttctgacactccccagtgagatgaactcggtacctcagttggaaatgcagaaatcatacgtcttctctgttgctcacgctgggagctgtagactggagcagttcctattaggccctcttggctccaccctctcctttttttttttttttttgagacagagttttgcccttgttgcccaggctggagtgcaatggcacgatctcacctcactgcaacctctgcctcctgggttcaagcaattctcttacctcggtctccctcggtaactgagattataygcacctgccaccacacacggctaatttttgtattttagtagagatggggttcaccatgttggtcaggctggtcttgaactcctgacctcaggtgatccacccaccttggcctcccagagtgctgggactacaggcgtgagccactgcaccyggcctctgtgtgttcttaaaggtgaactgaatctyttgtaggcmaaatatagtgggtcttttttttttttttwaaaccattcagccacgttagccttttgataggagaattaattcatttacattcaaagtaattatkgataagtaaggactcactactgccatttttttaatggtttcctggttattttgtggatcctctgttcctttcttcctctcttgctgttgtggtttgactgttttctgtcaacatcaaaagtttctgttagaaacttttcttcaaagaattaggtatttgaatagaaatgtatcaggcattgtgctcactacttttcatatattatctttaattgtcactgctctattggaaacatttcattgcccctattttacagatgagaaaactgaggctcaactgtagtcatttgtcaaggtcactactaaccagatgacctagaatttgggtctaagtctgtctgactgtctgctctgaagcttcccaataatatcaatgttttgcaagttggagtgggtctcactggaacttatccctgaccagagacacacacatcttttctcaatcatttcaaagcaaatacttttttggcctttaactttcctgatcttgaatgttctgagattccttcctttcgagggatttgtagtttggaggcggaacttagtcaaaacaacacattagatcaaatgtgtgcttctccccttccccctgcttaattgcatctgatgagtaatcctttcagacatataattccaggcacttagctgtctcttacatttgcttccagggatcatggtccctgaagtttaagcatatgttttcccagtgaacttytgtgcactttgaaaactgcattctgttctctcttattaaattccagctttcataactaatatgcratgatagctccagaaatgtttatctggtaaattaaagtgggtggggtcttccacttacaaattacttcaggataggactcagatgcctgcccatagaactgcctcataaatgctagcataaaatggattcgagcttttacaatttcagctttttcttggtttaggggactattatcttggtgtatcttcacagggttctgagctcctagcctatttcttaaactgaggctgcagatttatgattcagtggaaaaaaatgtgtgactacttctcaaacctgctttggaaaaacaagcagataggatgtttttctctccttatcttgtagttacatgtaaataaatgactcattggctgcgcctctgagtcagggggacagtaatttcagaatcgcaggtttgatgattatttgctttggatatcaaatgtttgtattagaacagagacacattccaaacaacttactgcccagagacccagattcactagaggccttctagacgtcaggaaggtgtttgttttataaagtggaggcatgtgtgggtctgtgccatgttcacagccataaaagaaagtgaagagtgttaagtgtgacttttcagggaaaggggcctaaagcctctgattattatttctgaaggagtaaatattttagtagaaaaagaaacttctttgtaccaactctctctgagtttcttggcacattttaatattctaagtaacagctgaaactacattaactttctctgttctaattggaaacatctgtgacttgtggaattagaatttttagattctgaagtgatattctatttggacagaggtgtcaatttcagctgaaatttccttctattccgccttttttccccctcctgattataaaatgttcagtcagctaatgatgtgatggaggttcaaggccttcttcatcagcttttccatgtactcacgatttttagtgaaaattgcatgtatacttcttcagctatttgcacaccttatcagcattcttcttattcaagaagaacagatggagaaactctttcaactcttggaactcaactggaacaattattttctgccaaaaataaaatctcataatcaamaaagaggatagagcaatatctgagatttgcaaattccaggaagaaaaaaaagagtacaaacaattagaaacctatttcagtttttctctgtgttaatagaagcctgtcttctatagggcttagtgttttacaatcatcacctgaaactccaacaagaaaggcaagaaggcacaatggtttcttacctgctttcccttactactttgccaacttacctcagtgatattacctcattttattgagcttcgttaatctcaggtgtaaatgaggacaacaacatatacctcccagacttgtggcagtaagtaaatggcatagcatttataaaatgttcccaatgggagctaaataaatgttggcttctttttttcttctttcttactttttacatatggcaactaaggcaataatgacatgacttgcctcagtccaaagatcaggtcttcaaggagccaacagtaggactgaggtttgctggtttaacacctttaagtctccctccatagagtttggcaaagagtgaattgaagactaccaaaaagtcatgaagggcaaaagactgtgggtgatatataatcaacctcccagacccccttccccccggataccaaaatccatggatgctcaaatccctgatataaaatggtatagtatttgcatataacatacatatcctacaatatactttaaatcatctctagattacttactatayctaatacaatgtaaattctacgtaaatagttgttacaagacttggaaccaacccaaatgcccatcagtgatagactggataaagaaaatgtggcacatatacaccatggaatactatgcagccataaaaaagaatgagattgtgtcctttgcagggatatggatgaagctggaagccatcattctcagcaaactaacacagaaacagaaaaccaaactccacatgttctcgctcacatgtgggagttgaacagtgaaaacacacagacacagggaggggaataacatacactggggcctgtcggcgggtcaaggagggggcggggtaagggaagggatagcattaggacaaatacctaatgcatgtggggcttaaaacctagatgacaggttgacaggtgcagcaaaccaccatggcacatgtatacctatgtaacaatacattctgcacatatatcctagaacctaatgtaaaaaaaaaaaaaagaaaaaaatagtcattacactacatttttaatttgtgttattttttaccatttttttaattggcctttttttcttaatctggttttttgtttgtttgtttgtttgtttgtttgagacagagtcttgttctgtcacccaggctggagtgcaatgacgcagtcttggctcactgcaacctctgcctcccgagttcaagcaattctcctacctcagcctcctgagtagctgggactacaggtgcgtgccaccacacccagctaatttttgtatttttagtagagatggggttttgccatgttggccaggcttgtctcaaactcctgaccttaggtgatctaccaacttcggcctcccaaagtactgggattacaggtatgagtcaccatgcccggccttttttcctagtattttcaatccacagtaggttgaatccaagatgtagaacctgtggatatggatggccaactgtaagccacttcacagaggctttgtgttattaccaggattttaattaatgactacacagggaaaggactcaaaataatgctaagagaatgagcttgactttctatagtagacacctagaaaatgtagttttgaaattagtagactggatctacagatcagtgagtttttgagagtgaaaagaaaaataaataattgtgttaataattgtgtcaagacacagggaaactaaagtatgtggttgccctgtccatgaaccatagcatgaaaytctgtgtctcttggagaggcagtgacattcatacctttgacaaacatttcttaaattccacctgaaaatttaaagagaggctcctttacgactgactttgtacatgtattattttatttaatgctcacaccagcttagtgagatagatttaatgattacagctccatttttttattattattattattattatttttgttttgttttgttttkttttgtttgtttgtttttgagatggagtctcgctctgtcgcccaggctggagtgcagtggcgcagtctcggctcactgcaagctccgcctcctgggttcacgccattctcctgcctcagcctctgaagtagctgggactacaggcgcccgccatcacgcccggctaattgttttgtagtttttagtggagacagtgtttcaccgtgttagccaggatggtctcaatctcctgacctcgtgcgtgatccgcccgcctcggcctcccaaagtgctgggattacaggcgtgagccactacacccggccacagctacattttaataataagcaatggagattcggtggagttaaataatatgccaaagttgcacaataaataagggttggatttgggctttgaacccaggtctgtctagctccgagtcacagataactgcgtgccttggtagattagagtcatggaactctagagttttggaagttatctgttctaccttcttcatcttaccgactgaggaacaggctcagagaggtctggtaactttcccaaactcacatagttagatatagtcgtagaaaaacttacattgcccttgttctaaatgctccattctcacattcagagaaaggaatagaccatctatgcagaaatccctttctgaagtaaacactatgtttgcagggctgcattaggggacccatgcaatcagtggaagtggaggatacagttcctgcccttctgagcttcaagtctactggaggaaaatcatcctgcaggaacaagagggaggcagagaaagggcagggccaaggggccctagaagggactccaggcccagctctgcagctctctagcactctgtgaattagccattctgggcccgcttgttctctaattctcgttggtcttcaaataatgtttctgttataccccattgcaaggttttttggggttttttgtttgtttgtttctgatctgactagatcagaaaaccactctggatcagagatgaagtcttgctcacacttgttttccatgtactcagcacaatgcctggcgcaaagcagaatgcatgaaatcagtacagggcctaagcacttgttaatctcaagtgtgggaaattgaggaacccccatccattccagggaggtcccactgatggagtcacatggacagatgtcagggtccacacctttacacctgggctctaaagtcaggagcactccacatccactggttatctgggagggtyagaaggaaagggggcctccatggggctgggagggggacatagccactccctctgtaacttcccacctcagaggcgaacaggatrggctttccaaggtacaggaagttagctatggttgttcagtgggttcaaataatcaaaatattcttcaggatagaaaataacaccaaagaaggattatgagtgaaccaccactaacatgttcagttgtctgtggccaccccatcccgcacttcagtcacacgtccctgaggacgttccacagaaagcagtggaaagtgtgattttaaagctcttccaaggcrtggacagttacctcacttgagtctctccagttctgccctccaggcctacacagccttcgaggatttcttagatctgcttcctgggcttcttagacctagctatgttttcttgctgtactgttgcctctgggagactgctactgagctctaaaaatagcatcttgcaggttctcagaggacaggttcccttcctgccaaaaaatatgtggaatggtggttccattggcaacagcgagcctttgttagagttgaaagtgcatatccctcctcctgagcccagctgcaggggtttgcctaatgtcactgactctgttttaattaagccctttattgctggacttggtgccaagaagcctaaatgaacatgtctacttgagtgggtgttgttcagggttcttttttcaattctattttaggaaatttscaagaatcactcttctacaggccgagataagggttaagagtctttttctcaagaaataacattctcctawgtgaacattatctttgtttttctttctctctcgtgtaactgaattcaaacattcaagaggatttttctggctcctgatggaaactgaagatagtgatgtaatttgcatgcctttgtcagatggaggaaacttcacttacacttgccttgatgaaattccaacagactttgagctttaagaaatgtacagggaaggaattgtgatrtcaccactactcatagctactacacaaaaattggatggttggcatatttgcttcctagggctactgtatgtaacaaaatactacaaattggatggcttaaaacaacagaaatttattttctcatagttctaacagcaagaagtccaaaatcaggtgtcagcaggtcgtgctccctctgacacctgtgggggacactccttgccgccccttctagcttctgttatttgctggcaatccttggcattccytgcctctggatgcatcagtccaatctctgtttctatcatcccwtggctatttcttcctgcatgtccctgtcttctcctcttcttataaggataccagtgcttttagattagggcccacactaacttcatcttgaccacatctgcaaagaccctattccaaatagggtcacaggcacccgacattagaatttgtggagagctgaagatcacctccaccaccccattatagcttttagtgggctcttcagctggttctagaagtcaaattgacaccaggcacataaacaagagaaaaatacacaaattgtgttagttttacatatacatggagatcttaagagagtgaagtctgtagaagtggccaaagcaagatgcttttgtgcattttggatgaagaatgataaattcgagaagaaatgacaggacaaagaaaatctggctgggcgtagtaaatttcctaggggagtcactggaagatatatggggaatgtaaaacaggtggccgatgataagcgttactttgttaagtatgtttattcaagtcgatcgcagcctccatttccaagtctctcatgataagggcattttctcacctggtatggagaggttacccctcccagaggaatctttatcataggctacatgcaggaaaagacaggtcagctctccctttctgaaactacaatttctccaagtgttttcaactctaaataatcaattaacgagatggcatatttgaggatgggacagccttcacaacttcaaatttcaacatattttcctgagggatataactcaaatggctggaaatttttctcactcagaaaaggtttgggtgtttttccactctctaccataagtaaccaatatcagctaccgcttttggagaatttaccacatgccaagccctaggtcatgttcctgatatatattcttttatttaatcttcatagaaatactttgaagtaaacattattatatgcctagtttacaactgtcaaaataaaggcccagctctgcctccttccagcacccatattctgaacaacttaccatacctaacacatacatcacttatagagtacctgccatgtgcctggtgctacgctaggccctgggaacaaatgtcatcctgccctcagggaacatgagtctagtggaaggagatatgcatcagagatataatttcctaaatatcaattactacctcccagtgtcatagcatcatttcccacaaggaattcttttcctttgctctcattgccagaggtctgttgaaagaacagtggatgctgagatgaaaagcagtgcaaagtccctcaaaaagggggttccctcacttctactttaatcagagctccaacatgtcgacaggttggagctctgattaaattggaactgagcatctctggacatctttattgaacaaacaaaatgtttcttagccatattatgctgaggaacaaacaaccctaaaatctcaatgcctaaagcacagtttattctgtgctctgcaccatgtgtctctgacccccacatctagggactgtgctctatgtcaccctcacactggatgcaggctaatgaagtagtcttatctggaactctacaggttatgtggcaaaaagaaaaagagaagatggtaaatcacactgactctgaaacactcccacccagaggtgccatgttgcattttattggccaaagcaggtcaccgggctgtgctttatttcaacaaatcatggaagggcagcctgccttgtgcttgcaagagagaacagaatatatttacagaacagaatgaattgcttccacgaaggacagaaagaagttttaaccctgttccaggatgaacagcccataacaaatatgcctttcagaccaaatgaaataagtatttgaaggaatagatcaggtactccgtgcaatttttgttaaatgaccattcccttccctctctgcstacttaacccaaagctccatgcagcagaagccatgccccttctctggccactcatttggtcagtgggccctgatgaccaagcactagctaagagagaacctgtggtcttttttggaaatgaaagtaggaaagtccaaatgtgaaagccatgaatcaggggacagtgatgtatgttcctgagcaattccctgtagcttccctttaaacagcaacctcctgagtacacatacaatataattttagatatagatattaggccaggcacggtggctcatgcctgtaatcccagcactttgggaggctgaggtgggtggatcacttgaggtcaggagttcaagaccagcctggccaacatatagtgaaatcccatctctactaaaaatacaaaaaattagctgggcatagtggcacatgcctgtagtcccagctacttggggagctgaggcaggagaatcacttgaatctgggaggcagaggttgcagtgagcagagatcatgccactgtactccagcctgggtgacagagtgagactccatctctcaaaacatatatatatatatacacacacacacamagagagagagagagagagattttatttactcacaacttttcaggaataaactgtattttatgtaaagcaagacatctatttgtttaaaccctggattccataggtaggtagcatgccatatccaccatatatttttccatccctcaagttccaaaattgattccctgaagtaaacaggaaaaacttgggagaagtaatcagtagctaaaattatttttgtttttgtcctgttccagttaatggctattaaaagcaagatttccatgactgcttctattccagatgcccatgttctcagctctaggagtagcaaaagaagttgcattctaatgactcagaggagtcattagccttgatgagtgttcagattgcagtaactcactgcaggatgtttagtgccttgggatccccgggcagcctataatttgctcaaaagctggaaatgtttctgcacstctgcagagcctggcctgcrgcttcctgtgttttcccaccttcctgcctcccattgtgcctcagagcaggataataccactttaaacatgtcacattagctgtcaaaggggttttgactcattctcaaggagagaagattgaaacagacccagctgtggaatacagagagctccttggcacctaaatsrctaccccaatcatccgtaaagagctgccaggaaaccatatcagcgggatctcagggaggctcactttagcacccccttcagacttaccagactggacgaggttagacaaatattaagattcaartgtctacagggttttacagtgtgcagagattttgcaaatttgccttrtttgattctcacagtcattcccgtaatggagaaaccawtgtccccattttacagctgagaaaactaaggcacagagaggtgaagtgactagtcccaagtcacacacctataggggccatgtttctgggatctaagagccctgtgttctaatctcacctccaccttcacagatctacctcttaatctcatctgtaaaatgatggcgatgccctctggatagtgttgcaagagcattatgacaatgtacataaagggcctgccagtgtccctggaacagagatactcaaaaaaagctcattaaataaaaataaatgttgcctttttgtgtgtgacatgttttcccttgatctctttctcactgaatattagcttttgcggggaacatggaaaattagtcccaattgtgcatcaccaaagatccttatattttgttcctactcagtgacccatataatgaaagattttctacctgccatactttatttacaaccgtcttcttatttcagtaacacacataactattcatcatggctcctgacaaacatgcataytaaaatggatgattctagctaaaacactaatttgtaattatttacaaacatttaccaaatacttactatgagccaaatatctctctggacattttgccagcatctgagcccaggcgatctgactcccgagcccacacttttaacctctgaactaagatcagcaacactaacagctaccatttgttatgtatttactatgggccagcagacactgtaatrtattttttaaagatacattgacttatttaatcattgtaacaaataagtgtatggtgcaggtggtgtcacttcttccattttacacatgaggaactgaagcttgaagaagggaagtaacttactcatagccatgtagctaggaagtaatagagctgggtttcgagcctgcatttgcaaagcacatacattaaacccctagtctatgctacattctctctaacatttctgtgaaccatcacttgagttgtttgaagcctcatcacttgtcagtgctttgtatgattggaaatcacttgaaaatccccattccagcctcaggaactcctgtgggtctgagatctcagggtgaaactaagcaggcctaggtaggagcacctcctgaggcacctaaatattcttcctgaagccactaagaaggaatgcagaggggttagtgtctgcatttctcaggtgatcagaatctcatgtgtatcagtccattctcatgctgctataaagaaataacagagactgggtaatttataaagaaaakagatttaatwgacttgcagttccacatggctggggaggcctcaggaaacttatgattatggtggaaggcaaaggggaagcaggcaccttcttcacaaggttgcaggagagagaartgcaagcaggggaaatgccagatgcttataaaaccatcagatctcatgagaactcactcactatcacaagaacagcatgtgggaaactgcccccatgatccattcacctccctctctctgcatgtggggattacaggttcctcccttcacacgtggggattacaattcaagatgagatttgggtggggacccagaaccaccatatcatcatggaaacagataagaaccaaccccatcactagttactgctggagaaaatggtatcttctgagtgaaaataggctaaatctgtaaatacattgctgaggtcattgaagaggtattcttccctgggggtactatatcttctctgagctgctttagatgcagtactaccaggaaatggaaggatgggcaaggttctgactggcacctgcaatacatttgcttatcatcataatccctagccccgcacattttacttcctcaatawacttcaaagaaaactattagggaccccaatgtgcatttctgtttggtacamttcccacctctaggtgtctgtcaagaactagatccttgagaaaaccaatattctgcattagtggaaagtgcatcggactcaggatcctggttcaggtggacccagctgcttatgagctgtgtgaccttggacaagtgacttcacctctctggactttagtgtccttatttataaaataaagtctttggactagacatctcaaaatccccagccagggcaatcctttcaaaatcctttgtagctagccgcagtttaggcaatagatggaaaagcactttgagaagtggttaaaagctcttaacacatttcaaaaggtgttatttttgcagagcagagcatgaaattatacatatagaaaaagaaaaaagaactttgaaattttagtagctcaaacttaaatgtaaaaatgttcattttaagtgtccctcctctctctccttcttatcttcaacaaagagggcctattttaatgtacacagataatttaagtattcacacctatcctgtgtttaaccacaccagagctttggtaaggtctaaaatagtgcatggatcttacccctttgtttgccttctccattgataagagttgttaagagtcttcctcttcctggtaagagagaaggaggcatctcttcaagtggagatttcctttacagaagtaaatttcctttacaaaagaaaaacttgtgccctgtttttagagcttttcctgcctctggttattctagatggtctttagctcaaaataatctacaggtcaaacagacacattttaggwtggcatattctggtacccttcacctggaccttgctctcaaaccttatgagtaagttaattcaaatacctaccctgccccactttagtgcggtaaatggagccctgcactccccaagtcttaaagtctggtgttttcctctttcctggttcatctaccatctccacatgcttattttcctgctctaagccacaggcaacagcacaacccacatgatcccttgaacatgatacaacatagcacacacacaagttgcctttgttccaactctcttccagctttattcaacacttttcatcctcatccctcaactatcattatcatctttmatgtatccattttccatttattcagaaattgtgcattgcacatctattatggactaagtttagggatayagtggtgaataataacaacaaaaatagatgcacactttgccctctgaagttcacagtctaatgagggcgatggggattattaatcaaatagccacacaaataaatgtgacaagtttgtttwtgtagggatggagtactttgagagcatacaggagagagcctctactttgaattggaagttatcaagagcatgagtatgaattaactaaagagtgaggagaagcatgcgtattaggcagaaggaatggtatgtgaacttgtaattgcccaatgggttcttcttgcccactgtacagacaaaagcaattcacgaagaccatggtattgcagtaaaggaagggtttaattaacacaaggcagctgagaggagggagtggcttagcctcctgagaactcagaggctagggattttatggataatttggtgggcaggaggctakggaatgggcactgctgaytggggatgaaatgataagagtgtggaaaatggttcttgcgcactgagtccacctccaggtaggggccacaggaccatttgagtcatgagtcatgggtcttggtggggtcagctggttgccagaatgcaaaaatctgaaaaacatctcaaaagaccaatcttaggtcctacaatagtgatgttawctacaggagcaactagggaagtcaaaaatcttgtgacctcgagccacatggctgttgagcagtaagggattatagaaactatgcctacatttcagcagaggtcaggccctttccataatcctaatcttgcggcctttccttagtcttacaaaggcagtttcagcccccaaaactgaacaaggaagggatcagtttcatggagagactattatcacacttgcttcaaagttaaattagaaactaaattcctcccrtggttagcctggccctgcccaataatgagtgaggacagccagcctgtgagactagaagcaaaatgaagtcagccatgctagatttctctcactgtcataatctttgcaaaggcggtttcaaagtagcactggagtaggaagaacatggcacataaaggaatggaaaaagaccagtgtggctgaagagtgtggagtgagaagaggagtggaacaagatgaagtaaggaagttggcaagacccagacaagattctgtaggcgtgttgaggactttggtctttattctatttttagcacaagaagtaaaacaatgagtcattgatttcaagaacatcactctcactagcatatagaaaataggagagaggcaagagtggatgttacaagattattgcagcacttcaggcaacagatattggaagcgtggataaaggaggtagtgttactgatgaaagaagtgtttgaaccaggagttatttagaaagtacaaatgaagaacttggcaacgggttgtataaaagaagggaggagaccatcaaggatgatttcaaggggttggaattgttaaattagttatgtcggggaaatattcactgagaaagggagtaggaaagagaatcagttttgtcttgagtctttgttttttcttgtctttgagtcataatggtggaagattagatgataaatttggtttggtacatrctaagtttgaagtacctttgaggtatgcacagggaaatatcaggtaggcagttaaataaaaggtctagtgcagtggctctaaaatcagggataatttttttcctccaggggacatttgccaacgtctggagatattcttggttgtcacaatgtagtgagaggtgctattggtatctggaaagtagaggccaaggatgttgcsaaacatgctacaatgtgcaggacaaccacacccctcacagcaaagaattatccaacccaaaatgtcaatagtgccaaaggtgagaaacgctggtctatagatatttgagagtcattggccaaaagccttgggtatttataagatcacaaatagaaagaataagagtaagaaaaaaagtggcatagtacagatttttgaggaactttaatgcataatggcgggatgacttacccaacataagagactgagaaggagccacagagaagtaggaggaaaactcaaagaaaatggagtcacaaaagccaaatkttgggtaggggagtgatgaaaagtgtcagatgctaccaagaagacaaaggaaatggggactgatgagtgttcrttgcacttaggaatgtgaaggtcattggtagcctttgcaagagcagttttggtaggacgatgttgagacaagacatactgcagtgggttgagaaatgaatggaagatgaacaaatggaagcagttagtgtaggcaatgcttttaggaagtttggcaatggaagggaggagagtgaaagaacagtcctggcaagaaatgtggaggtcaagaacagtttggggttcagtgatttttttggtgttttattttgttttaatttttttattatggaaaatttcttacatatataaagtaagcagaatattacaatggacttcaatgtaccctagattctatggactctggattctcttttatttctcagatgagtaatgtttgttctaggagggagttgatttggctggactcaaattctcaactctgtctctcctaatcagcaacaacttaaatctctgcttggttctttcagattccagctgtacttttttttttttttttttgccaatccccctgtgtgtgcatagtttagtggtcagccaataatttgggtagattggggagtttatcctttcygyggcttattcccttccagaacccaccccctcttcatttcctggcttctcttctagccccaactctattatctgatacctcaagctattaagactttggcctcctgttgccccaagttgcctgcagattggactgccttcaggcaaaaagctgcaaacttgcaaatcccaaaaggtataattcctgctttcaaagcttgattcccctccaatatctgtctgctcttgaccaaaccccattgccttcgcacatgcgtgtgtgtgtgtgtgtgtgtgtgtgtgatgatggagtagctcaagactgtcactaacctctcttcccatccccagctccatcccccactgcaagaacctcatgcacatgtgtctgaacatcccaacccccatgtccaagtttcagtcacggactcaggcctagggatccagctactgcagtgtggtctgtacttgggaggagggacctsgaaaagaggcccaaacagtccctggaatcagccttggggtcatttggtcagggaattctggcatcttgggtactggtctagaggaaggaaaaaagggcacagactctggggagcacagkctccatgtgggcacaccccatggccccatggactccttgccctgtggagagaagcaattggaagaaagccagaggatgaccctctaaactgctgggrcctcgggcaggaatctttcttgcccaggtctatgggcaaatttaattaatgcaatacctagtactatggactttgctcagttcctaatctgactgcctggtttctctgtgtgtacgtgttttatttcttttagtggactgttcatcaccattcatgacaaaggtcatcttgcaacaatgctgaattcttggccagaagacaatattaaggtatgatcccgttttcattgctatttaatcattgttgggtgaatcatttcagcctaaaccagagtcatttccatctataaaatgagccattatgacactgaaggcagcatactacctcccattcctaagccacagacctgttatagccaagtacaaatacaccacagagcagaggtttgcattaaccaggcatccatgtgacattgcccttcattattgtgattattagtctgaagatatgttcagcatgtgttgagtccttgctaaatatatggtgccagtttccatggtagacgcagagagaaatcaggcatagaccctcttctcgagtagctgacatgttatatggaaaataagccaaaggcacaaaagactaacaaggtggaacttgtccagagataaataaagtacacgaaaagaactgagggkgttcttctagaggcaatgacgatttttagcctgaggagattcagggatgacttcctgggggaagtgacagtggagctgggccttgaatttaggggtaggctgtggacagttaggtagtggagagactaggctgtggagtgaggacattctgtaccaagagtaaaagcctatgatggacaatatcttcacacttgggtatgtgtaccctgggagtacacagcagtgtgggggtggggatgaggggcataaatgtagaatgacaaaataaacctgccacttcttccaggagcatccattttactcaaaaatttaagaagaaaacatttctgtataccaaacaatatacgttatagaatgcaaaagttgccatattttttttttttttgagacagagtctcactctgtcgtccaggttggagtgcagtcacagattattgcaacctcaatctcctgggctcaggtgatcctcccacctcagcctcccccgtagctgggacgacaggcatgggccactatgcctgggtaattttttgtatttttttgcagagatagggttttgccatgttgccctgactggtcytgaatttctgggcccaagtgatctgtccatcgacgcctcccaaaattctgggattacaggcgtgagccaccgtgcctagtgatgttaatttttatacataaaacatgcaactttgtagaaatgtattagcctctggctaaatccccagatctcctcctgctatagagatgtctatggaggagtttgaggggttctggtatctaagatcattgttacttctggaaacaaaatgggtgtggcaaaaatgcagaacatccactggctgggtggtaagggcattttttggcacctgagctggggaggggttggtgctgaccaagcatagtacaaggaacttccaaggccaatgctcacatcaccctgccttgcctgggaggccatggtactccaacacatctactctggaagagctccctggaagttcagatacagagaaggtatatgggcccatatttgaggagctcaaagtctagttagaaagactgatccagaaacagtgacagtacactgtgtctgtgctgccaaagagagaaccatggcctctctctctttttccctgcccattccctgagcccctccacccttctccactggacaccaaatatagcttctttctgtctacctccctttatgtcctacccactcctggttctctccagggaatgatattacttaaaaacagascaggttggggacagaaccttggccctcaggagccaggctcgagccatagccaaggccctagtcctagctcattttttacatctgtgtctgggtatcattttgccttgtgcttctccctcctgcttatctgcttagactccaggtatatgtcctgcaggccctgcaggttttggtcccaggcccagagaagcaagtttccacagcatgtctagcatgaatctataataaaatcttgaggacattaagggaagccagcttactggatggactaatctgagtggatatgctgctggggtcctgtaaagttatctctttcactcacattcctggacagttcaaccatggggaaaacttggacataggaggcactcagtagatgyttacacagagttggatgaattcagttgatagacatgctgagcatcttccatgtcacagatactgtgccaggaggttctccactaataytttcggtgcttttgtgcaaattatgaggaactagaaagaatgatgaaaaggtacctctgtttaacaaaaaggcaccctttcctccaacctgacacaggggcttggtgaggggatcatggactcaatttcaggtttcaattgttcctcttatcagggcacaactgtatcaagggccttgctgtgaggaatgcaaaatgagaaaaacatggactctgccctcaaattgcttcgtattgtggttgggaaaccaagatgtaaattcaaaatagaaccttaggagctaaatatctattgacttcaataaacatattttgagaaccttctaaatactgaatgctaattgccaaagagatgaagaccacaaccgctgtgattttagaggaagagaaacagggctttgggcaccctggaagaggtaggactccagcaggccccaaataagagagacatccagagcctctaggagaatgttaagttgcatgagcagatccgggaccatgatagtgaattcagttgcattcaaccatcttttagtaaacatctactctggaagagctccctggaggttcagatacagagaatgtataggagcccatactcaaggagctcgaagtctagttagaaagactgatccagaaacagtgacagtacattgcatctgtgctgccaaagagaggaccccagaggacaaggggcagacaggtgactggctgcccacccaccctgtggtaccgcagagtacacaggtgagtgcctgggaccacctccatcctttattcctgtctcactttgaagaaacctggagatcagtcccagcgactatgtagaggaatcagacccagctttgcaataagacagccctggattctggccatgaagcttcacttacctgctgcgtgtgcagatatcctctctgagctttgctttcctattgtgaggattaactatgataaagtctatacacatcgaagggcacttgaatggataytgtcatcactggaggtggtggaggcagctgtagcccacaccgcagtacagtcagggcctgagggggctcccttacctgggaatcacaggccacaaatgagcagtcaaatgattcgacccctaaacatatttgatttggctcttagtggttttccaacattttgaatttgtaggcaacatttttaaatcaggagatttcatgagaaatatatatccaagcacttggatttctggcttctctggaaaagccaggagctctgaatattgggcctgtagtttggcatgtgaacaggtccactagagctgattggactgcctctggcttaccccagacccctccctgccctacccactggcctttttctggaggttcctccccccccacccctaggtgcccttttaaaggtttagaatttccaagccacagtctttcttgttttctgatgtgtatttttcagttactttagaaagtggagaggaaggtctccctacctaggtagggagtctctgctcatcattctttcatagcacttgggaactgatgcagaacctcttcttcactacttcattctgttcccacagtcactgggagaagttggagtaaggacttctgaaacccccartgtgggtcctgaagaatgtgtaggagtgagactgtgcatggtggctcacgcctgtaatcccagcactttgggaggctgaggcgggcggatcacttgaggtcaggagtttgagcacagcctggccaacatggtgaaacctcatctctactaaaaatataaaaatgagcttggcgtggtggcaggcgcctgtagtcccaactattcaggaggctgagccaggagaatagcttgaacccgggaggcggaggttgcagtgaaccttgtgccactgtactccagcctgggcaacagagcaagactctgtctcaaaaacgaaaacaaaaaagggctgggcacrgtggctcaagtctgtaatcccagcatttcgggaggccgaggtgggcagatcacctgaggtcaggagtttgagaccagcctggccaacatggtaaaaccccgtctcttctaaaaatacaaatattagttgggtgtggtggcacacacctgtagtcctcccagcttctcgggaggctgaggcaggagaatcacttgagcctgggaggcagaggttgcagtgagccgagatcaggccactgcattccagtctgggagagagtagtgagactctgtctcaaaaaaaaaaaaaaaaaaaaaaaaaaagaatgtatagggttgtgtctcagatgagcaaactgaggttaagtgacttgtctgaggttacccacaattaagtgttggtgcccagcccagagctgtggttctaagtcatttctccagcaactgctaagtgggggagacagagtttttcaaggcacaggtatctttaggcctgttgctagctgcttgcctagaaagaggagtggttcagaggagcctctgaatcaactcagaaagtaaaaaatgactttctatggtttcccagcaagaaagcagagttgaaaactgcaatgtaagaaaagtaggctgcgatggaaatggagccaaagcccagggctggggagaccacgaagttttgtgggacttgcttttcaggaaggagggggcgggccaggccaggctgccttgagctgtccagcgtaaatcacaaagaggagtgagaactgcttttctgactytttcccacagtggccattgcctggagcctataggaaggtccagctgagaatagcctcctccctaacagttttcccaagctcctaaatctctccctcaccccagtcccaggagcttcgcaggaggaggttctgagagccaagggaccctcctctgctactgggcacatcctctgtaaacagccacttaggtgtttatacttagagcggattgctagtgccaagtgcctacctatcatgcattggcccagtctgtgttaaaccccactctgtgctcattgtcagaggttagatttcctgaaaaacagtctcagagacgtattagggagtgctcttttgtcagtcaacacttgtggcaaggaaggaaacaggatagagcagaaggagaggttgggctgccgtaagatctcaagcaaggctcgctgagcccctgaggaggctctggacctgggatggcccttcaaatgcatccagaagtgaggcagaggagtgggtctctagattcctatatggggctgcccttggaaggaggtgtggctttgggcaaggtggctcttttcagtagaggaaattcccctaagtgggctgatatctgaggatacagctgggaaaataactctttcattcctgcaggaggatctgggcagcacatcatcgtatccacctcatgcggtatgatgccaagtgctctacatagattaactcattggattttcatggcaaccctgtaagaggtagggactattgttatccccattttatagacaaggaagctgagaggttaggttctttgcaagggagaagtggaaccaagatttgaaactaagaagtgtgcattatttttgcggtagaaagagagagagggagaagcagaagaagaggaggaggaggataaaaggaaagatgagaaggaaggatgaaacaaaagaggaagaagagggttgtataaacagcactgtgggcaacccttgtagctatgaccatagctacaagtccaaggaagctccagagcaagcaaggacatttgatcctcaggtcagtattgggtcagtcccattgggtccacccaaactaaagggtgtgggcaataattcagaaaaggccttaggtctgaggcaggtgggcaaaggaagaatatggcacagcctcccccaaacctcccctgagccatcagagagacaggggagttatgaattataaaactcttccaaacaaggaaaatgtgattctgttgttgtagaaaagtttgcttggctttaaagttcaaggatgctgcccaggtttgccctcagccttttgacaatttgcagaactagtggctcccagcgtaaggtccattgatgtcacgaaaaacagggtgcagtgtcttctctctgaacttgttaatccacagcaggtctgaactctgttcagcgcagaagacactttgttttctctgttggatctatcacattgcccaccatttgtgagtgtgtatcacattacagacaccaagttaagtgctgatgaatcaaagatgacacaacccattactggccttagaagagcttcaagctactgtgaagcacaaggaaatgtacataactataatacaaggaagggagtgataggtttagtaggtgaggaaaatgctatgggaattcagagaaggaagtgataaaattcagaagggaagcttcctggagggaaatgctttttgaactgttccttgaaacatgcaagkgtggtaagatttgtatcaaggagataaagaaattgagaagtaaaatggcatgtattcaagaaagtacargccttatacaaaattggaaatatttcagtttggatggagcatggaaagaataaaggggaaattcaaagggcagcttgggcctagcccatggaaggctttaagtgccagtctaagatgtttgggttttattttacagacatcagggaccattagagatttgggggcaagaaagtgatatatctgggcatgcttcagaaaaaatgaaatggaatggggaaaatccagtagagagaccagttaggagaacagtgcagtggctcaagtgaagatggatgatctgatccgaggcagtagcaataatatgaagataatggaacagatgtttaaaataggaagcaggcacaatcagcagaacttggtgaccaattggctgtggttgactaacagagaagaatcaaagaagactggacgtttttgaacttggaagatacagrgtaacagagagcaggaggacagcagagtaaaaaggctcaaaaggagtaagagggaaaagaggattcatttggttagggacttgtgggaattgggaagactattggacatttgagtagcaatgtccagcagacagttatctacaggtgtcatctacttagagaggacagtaggagccataacaatggatgaggatgccaaggttaaagccattaagcttcacatggccagactttactaaatgttgcatttgccaaggtctccccttggtttctttttcattcattcatttaacagataattattgcatggtctttctgtgttaatgataaactggagagatcagaaataatttcaaagtctgagatataatctttgccctaaataatcatcatcattacagtcataagagcagcaaccatttattcatcattcttactttatacaaggcaccaggttaaaatgagacatattttatttcatcattacaacaacctgaggagttaagtattattattattattattawtattattattattattatatgcattttatggagaattgaagctcagaatagttatctatttgtctaaaattacacatggcacatcatcaaggatcctatattcaaaaactggttatcagactccaaagcacctgccattaaccacaaaggctgttttgtgagataaaatgtgcattttaaaacaaagttaaataacaacccagctgctttcaccatcaaaggtttaaataacaccttgtgcgggtcttggcaggcagtgggtccttaatacacgcttgtgaaaggcaggcaagcagacaggaagggtgtgtggtagatatggcaattcaggggaaggagaaatttcagtagattataatgggcaggatwtatgctgctgacgaatggggagaagaaccctccaggaaaaaggaatagagaggttgagatggagaggtggtaggcaaattcagagtgtgcctgggaagaatgagaaggccagcacagccagagaaggcaattgtgtacagatgtatagcaggagataagtttcagaaggtctgttggattcagataattaaagagttaagtattttggactctattctatggacagttcaaagtaactaaaggtctttgagcctgggaatggcataatgaaaatgggcttttgacacaatgaatctgacrttggttggcaggagagaatggaaggaaggaagatgagaggcaaggagtctggttgtgaaactgttggaataactcaactataaccatggtaggattgcgggtggacagtagatggaggtgagacactcattcagaggagctgggcatgcagtagagtgccctggggcatgtccaggctgggagagtgccactacagagccctgtcaccatcctagggttgtggggataacagcctggagtagcagatttcctctgtttaacttcatgtcactcactgccccttcagcacagagaaggattctgacagaatgggaaccataataaggaagctctaattaggagagatgatagagaaatgcccagagtttggacacccagargcagcatgagggcatagtctctaacagggagatctaccaagaggaggtcagatgcaggctgcagagagggtggcgccaaagcagggcaggactttgccaagatcacaggmactttaccccagccagttggggtggtagaaggagccctgaaccaggaaccctgscctgtcacattcactagaaagatgaccttgcaaagtcatctaatcttttaagataactgatgtggaaacatccagccagtgccaggcatgtggccgacacttaacaaatatatggagaaaataaaggtcttgagcttctgtttgctcaccggtgaagcagagataacaatctcagatccgcctacctgcccaggctatggggaaggtcacatgagatgcagtctttgagcactctccacagaggcagtagaccaatctaagggagaatatcatgattttcatggatctcttgcactctccagagacccttttccagaagcagaggaatgtttttaagaatctctacacttatttccactaaaagagaaagaatggaagtgagaagatcccgtagccctttgggtaccagatcataaactcttccagggaaagaatgggtcttcatctctttacccccattgcccagcaatgtaccttcatggatttaaccaaaccctatggtgttcatagcccatcaggacatttgtagcctagaatggatccaaagccaggttccaatgaagggatgagggacctataaacttaactcttttagagatagagatagctagtgctggtgagcaggtgagagtggcctacaaacaacttcaccgttaccctgaggggctctccttggctagacattcaaggtctttcacagtctgactcctgcctgacttcccattttttcccttcctgcaacctacatctcctcgctccccaawcacatcctacattstccccacccccagcacctctaccctggattttaactttcttttgtatcaaatgcccttctccccrcccataccccacaatctccacctgtccaaggtagggcatgtgtgtccgttcacccatgaagggttatcctcccatcttctaatctctgccaccctttatgctattctgctgcagtccagcttccctcccagaatcatgattattaatatatacattccatctctcctttagcccattaatcctttaagggctgtgtccatgcatatttgcttttgtagatgtgcaaactgaagctcccacagaatttgtcacagtgtcttatgcaaagtaggtgcttcataaatatgtattaaatgaatgaataaaagaatatccattataataatacaattattcctatcatcatcatcagcttcattcatatctattaattcacagtaggtaagccttgaagtagcactacatctagcacatagtaggccctcagcaattctttgccaaatgcaaaaggtaaatcccagtgtagcttgaaactcttcctgatttcatatgcaatartgatcctagaagatgtcacaaggagccctgttctttgcagatcggatttttcataatccaggagtaggtcggagagcacttggattagcctctaaaccctggagctgtagcagcagcacgaacacktattttttattttctcctttaattatgcccttccctacccaccaccccgagtctcaggctgagagtgtctatttagtttccttgagggagagtgaagtgacttaatgtggtttccctccagctgtttctgcagcccccacctgaagctcagaatgcaaggcaggcatctttctgccatctcttctcagtagggtttgtcaccagcctgccaggaaggactggtcacctgcaggtgaataaatgctccggccttatcccagacaagctctttcacaccggcaaagtcagtgggcatccagtcgccaagcctgatgggctggggctgctaaaatgagcaccctgtcacaggaagtgctgtccctgattgatggtgccctgctgtttttcaggccgtggtggtgactgatggggagcgcatcctgggcctgggagacctgggctgctayggcatgggcatccctgtgggcaagctggccctgtacacggcatgcggaggggtgaacccgcagcagtgcctccctgtgctgctggacgtcggcaccaacaatgaggtaacccactgcccagggcaggagctctggggccaaaaggtggcaactgggacagggtgaggagcatgtttgtgggtggttatatctacacagcaatgggccatttcyttcttggcatcctcccgaccagggcattccccctacacagttgtggagtagaggaccttcttccctggttgcccacccctagctccatcctgttccctctcccactcctgggcccccttgctcctctacctccatgaggccctctgtacccacaatgacccctgcttgggcttccttcctctctgacccccattaccccaggcagtttctatttcccttgaggtgggtgtgaccactgggctgtgttttttarcattctcaaggcaggctgccccagtggaaygactggaattcaaagcaccaggggccaaaatgtctgaatcagacagattagtgtcctgcaaacccagtgagagaaactgagccaagcgtaggtgagatccagctgcaggagtcctggcagtttgtggtttaaggagctcaggccccagccaagggtttctctgctctgggaaccaccatgggcatgtctgtgaytcgcagctctgtctctgtgtcagaaaacatgaaaaaatatccaaggattccctcttaattacatttatctttgagatcagtgcatrttattgaggccgggcacagtcactcacgcctgtgttcccagcactttgggaggctgatcggggcgggatcacctgaggccaggagtttgagaccagcctgaccaacatggtgaaatcccatctgtactaaaaatacaaaaatgagctaggtgtggtagcacacacctgtaatcccagctactggggaggctgagacaggagaatcccaggagaacctgggaggcagaggttgcagtgakccgagatcacaccactgcactccagcctgggtgacacagcaagactctgtctcaaataaataaataaatagagaaaattcagagaaatgttaaaaataagatatcagccacataacaagcactaatcattgtttacatattggtatatttccccagcctttttttttccaygcacttataaaagtggtgttcttattatatatacagtattttatatttctttttcaaatttaattatctgtcatgagttttctttcaggctattaaccattmttccatagtgtcggtttaatagctacctgatgtatcataatttacataagaaaacccccacagttgggcacttaggttgtttctagtcttttaaaatataaattgtgctctggtacccatttttgcagatgagtctttgtccctatctctgagtatttccttaggataaatttctagaagtaagtattgaagcaaaaggaatggtcattttgtaaattcttgattcacggtgtcaagaagttattcttatttgcattctgcagtgatttctcttaagaaaatttgccaagactctttacatggccttcctcttccctaaacacaatgcatccccatttcttttcttttcttttcttttcttttgagacagactctccctctgttgcccaggctggagtgcagtggcgtgatctcggctcgctgcaacctctgcttccctggttcaagcaattctcctatctcagcctcctgagtagctgggattacaggcatgtgctaccacgctcagctaatttttgtatttttagtcgagatggggtttcaccatgttggtcaggctggtctcaaactcctgacctcaagtgatctgcccgcctcagcctcccaaagtgctgagattgcagacttgagccactgcacccagcccaggcatccccatttcaaataaaagcaagcactttagatcctagtaaggaatgatgcttattcaggcttcatctgcagatatgatcaaatgatggaacggtgggcagaccttgcttaacagctgggaaatcctgggggtgggaatgagatgagggagagcaagaaagtgggaaaactattggattgggaccttggttcccagtaccatgacaagccagggaccttggttccagtaccatgatgagccaggtaagtcattgcacctccttagacttaattgcctttcagtatattgagagactagaccagaaagttactaagcatccttcaacctctaaaaccacctggtctccatgtgtctcctcaccagctcaggagacaggaggttagatatggatacatgctttacagctgctcatcaaaaccagtcttcaagttttgctctgcacagcaatgcccttcccccagccagatatctgagttttgctgaaattgtcttttggcctcaaagaatgcttctttgcaggcgtggatgagcgcagcaaactttgttttattcttcctttccaacacctcctgctgtgttccagctggatttaattgagaccttcattccttctaaaagctggccttaggcaagaattggaacagattgagtttgattctgaggccactgcatccactggaagggtgctgtctgccctggtgcattgggatcctttgtcattgaaggtccagcactcagcaatgatatgctgaagtttagagctggctctaacttgtaacaaatccaccagaaaaaatgactggaaagtagcagtaattgtggatcaggccctttttatggaccactcagtttaagccttgcaataaccctgtgagtggagcatctatcattaccctcttttttacagcataggaaactgaggcccagagagttttatttgcccaagaagatctgckagaagcggcagggctaggagccgaatccaagtttgtgctcctctccccacattacacctgtgcctaatttctgttgctttataagtaaagattatttcttgatttttagaatttttattgctaaaatgaatttagaamattattcaaaattttaaagaaaaaggaaatggtatttctcccacaatgttgcatttgtgtttctttccaaaatttttctatgcctatacataaagatagttattacctaggtgtaatcataatgtaattttgttctaattttttcaattaagwttattttgtgaacactttgccttatttaataaaagtttattgagtgtttagtgggtatcaggcaccctgctgagcctgagggagayaaatgagggtcagcctgaatagaatgttctagttgtcagtgtttcaacactgtcacctaattggtcactttaatgagtcgcgtgtcacatctactcaaagcgtctgcttctccttctggtgctttaggcctctagaatcacctctccctcctggatgtggaggggagagaaccttccctgggtctgatccttatgtcagggagggaccagagtacccctgtctaggaggagggaacatgccctgatctgccctcctatgtgccccgggggtgagaggaagcagttcctccccagtatattattctcccaattttcagataaggaaactgagactgaaacatgtcaactacttacctcaggtcccacagctctaagtatcagagctgggattggaacccagctgtctggctccacagctgccttgcccactgtggtgcactgctccaaggggtcaggtgtttgcattatagactgggaaatgggggccgagaatgagtgtttcacacaggcaggatcccatggacactcaggatcaagtcagaggatagcaatgctgtttacaccatcctcccctccagggaatggtgggccccctccagacccacttgaagaaactcaggacacaaaattttcaaagttataaagtgaccaacattaggaagatggtgatttttctcttttcaaatggattcactatgtgatctcccaactacagttccttttwtttttttcaatgaawccgtttgcaagatattccccccagaagtcccagggcacaccttttgctcagagcaagcctgagatgtaacagagggaagcttggccttctacacttttatctcacatgtccgtgcagggaggatgctgtcatgagggtttttaatgtcagaataacttgaccatctgtgtgtatgtatgtctctataaaaactcctgaggcaacaggagctttaatcacagtcaaagacaacacccctccaggtttcctgttgaaggaaaacatctgctgtccacagccctgaaactctgcrtcacttttacctgccaataccaaggagatttggraaaataaatatgtggcgccatgatcccatgaagaagggacatcccatgattaagttccaagtgggtaggggaagggagcgcctgctcagccttccatcatggctacgtgtggattggatttattttgtttcatccacatgcagccagtcacagactattcaggttagaaggggcctgagtaccatctcgttcaacccccttgttttacatgggaaacgaggctcagagcagaaagcgcttccccaaggtttgactcgaaacccagtgsttatcccaccctgtgctaaggcagggtgggggaatcccgggggatggagcttggctttaaaatgaccctgctgagccttggagatcttctcttggcagaagtcttgagcctctatgaattcaactcagaaggagatgctgtgtgctcttctggaactgaagaatgggtggagggaggggagtcatgtttggttagggaaacaaacatgggagcagatcattagcagagcctggtaaatagtgctttggatgttattggatcgccaaggaagcatggagttgacaaccaagctgggtattgcagggtttcttctaccttgcaagattatcattattcagcattcaccatgtggtgccatcatagagctcactctctacacacgtgtaacccatgaggatgcccttgctaggatctttgtatcttaccccaggcttagctgagtttcccaaggaatgagtggtaggtgggactgccacygtgaggagaaagcgtgctgtgcccacagcgtgaacccaatcccgtgacctcccagacccccaggttccctaagtaacatcacagaatgcctgttgctatgcaagataaatattttttcaaccaggaggtttatctgtcttccagctgaaatccagtgctcactgatatgggcagtgaagaggaggaaaccatttctttttccatgacattttgtctccaagaaaaaccttacgggaggcagagctgggcaaacagccatagagagcacattcaaccctctaactcccacagcagaggagaaagttctgcttcacccactttgaataaaggccttcacctaaaattataatcattgacttacttggttccaaaggggacttagtaactatctaacagaggggaaagatttagtcactcaatatttaggtgccaggcacccactgaacactaaagtatggaagtgaataagcctggtccccaccctgggaagagtcctggtctagaaaccatgatttctgccttgttgtttccacaaatgtgttttgtgactttgggcagctcatttattctttccaaccttcaaaaactcatttggaggaagcagaaccaagtgatttctaagaccttcttaatttttaattcagcatctccttagcccagtcccaggactctgcaatcatatcactaaatgcttctcaagggcttatgtgtgccatcactgtacaattagctggggagatgcggatgaatgaggagctcaaagagcttgcattgtgtgatagaaatcattattccctatttaacagagagcagaraaaagttaaataccttccccaaagccacagagctagtcaagtgacaaagcctcaattcaaacccaggtctatctgatttgaaagcctagagcccctttgggccctactgaggatgctcagaggggagcatcctgaccacagccaccaggaccagcagtgtcctttcccctgcggcacgttgcctccaaacttgaagattcctctgcctctgtagatagggttaccagatttagcaaataaaaatacaggacaccagtgacatttaaatttcagagaagcaattcaacattttttagcataagtgtgttccatgtaatacatgggtcacacttaattctaaacatttctttttaattattgcctatctgaaattcaaatttaactgggcatcctgtattttatctggcaatactgtctgctgaaatcttctcctctaaacacctatgaagaagtccagacagaggaggactgcaaggagggggtccaggcaggttactactcctaccccttgctgtcaggcattcttatatctgaatcagttggcggatacagggcagaatgtgggcttcttgttccatgttgtgccaagtcagccataggagctctgcccactactgttttagagaagccatttccactcctgctaaaggagaaccagttgactagagatgtatacacagcctttcctctgaactcattccagctctccccgttccccagcccggtctgcaagtcaagagtctggaccttcccagccacwattgacctcctccaggaggacccggcagagggtgaggagctgccccttggctccctggttccctggcccccacaatatcaagtgatgggacgaagaggatgcttcgtcatgagacccagtcaaagctcaatctcagggtagctactttctggctctgtgagcttgggcagtttatttaaacccttgaactccaacttcctctaaaatgggatgagaagaggtcagactattagaaggaacaaatgagtgaattacttgaaagctctatacaaacataagaatctattttttaacgtcatatccatatgggaactttttttcattttttgtggttaaagtatctgagacatagaacattttattaggaaagcaaaatataaggactttttaaaagctttttatagtcacccttgtatctcagcagtatctcattatggttgacctttgatctttactgcagtatacygagaaattttttgaaaatctaaaaatcccttagtgccactggggaacttaacttaccccagaaactgcatatgcaggattgagaaattcactctatgctgcttgatgcactaagattcaaatctgtgacttggcaacattccaaattataactcaccatggacccttttaatctttgtaagaactgccaaagtgaatgttttctgccaatgccaagagtaacactattttcagtcatttttatgtatgtccttccaagctctgtatgtatgtgcttcagagagttataattatgatatctgtgtaattttgtatcctgttttctccactttaaatagtctcttacaaatttgtccaggtgactgcaaagtcttaaaaccaccaattttaattactgcctagctattcatcatgttactctactatcatttatcatttcttctttctggctgtttgatgcttctaagtgacctttgatggtcactttgaaggtagcatgtggaagggtaggcaccatgtatgcaccactttcaccctttaggtcccccctactgacacacacacgcacacacccctatcagtgaagaatcctaaacagtttcaagggtgtccaatccaggggattaggagagtgagagaggaggccaggacccaccatctttctaaatgtaaacctgtggtatctttgacaaagtgctaaacccagctcagatcttacgtgtacccaggccttggggtgaagggttaacagataattcctgttcttttctgtcccttaaactacaccctcccccacacctaatacagtgatatgaaagcagtatggacccagaacagtgtccttaaaaagaaaaattgattcttgttggtatgcagaagagccacccatgcagcatgactgagtgcttaagaccacagactctggacccaacagcccagctttgaatcctgactcctgcacttacgagtccaaggtcttaagcaggctgcttcacctctctgtgtcttgttgcctcatttaaaaaatgggggaaacgatgagacctacctctcgggtcctttgagaaatagatgagtgagaaaggtactggggagacacctgtgaagaataaagggggagggagtgggaggagttgggggtgagtggggccttcaaactctagtacaggtcagacacctgtgaagggagagcagaagggagcgaggactgagtaagagagcccagggagagtctccccagctcagtcaggccagtgagaagttcctgccccagcagagtctcggttgggcaggaatggtttcccccacaccccctccatgctcagtcattaagcaatccagggagagtgtggcggctgaaggctgtccaccaattgccctccctcagcaggttcccttaagatagttctgagccacacacctccatggctgacacaacctcattgggttaagtaaagcacttagggcagtacatgacacattggaggcactgtgaaagctaaaactgctaccactgttttatagcatatgttataattcaccaagctctttcatatatatttttccacttgatcatcacaatcatccccatgcagcccctattttatccccatttgatagatgagaagaagccttcaagaggccccacgacttgcccaaagtcacacagctcgctgtggtggaggtgagacttgattgtaagcccccgagggtcggagtgtaggcccactggtccttatctttgtgtcctgcagcagcagttcagatggagatgaagacaacacaaaatcctgttctctaggaacttatatttttggtgagttagacaaaaaagtagataattccaggaaactaacccatggaattacctcccatttcccaaatacaccaggtatttcttcctcctgcctccagccctcaacctttccttgtgctgtcttctcagcctggaggcccacctgctgaaatctgcctatctcttcctacctgaccattttctccatgacacaatcccaatctgccccccaaagggaatttcttcactcatcactgtgcctccatgtgccacactttgttccaaaccagcgtcactctgccctgcagtataatgtgtctgtttactcagcagccacctgtcagcacctagaaggcaacaatcattccttgctcctctacaaatcccccactgggcccagtgtcagcaatagtacatgagaaataaatgtgtcatgcatgaatgagtccactgactctgtgtaggggtggcaggaatggaagacgtggaaagttggccagcaggagtggtcattcacaccaacgcacacacagataacccaatagcgtatgactgctgtgatggaaggagctgcaggaggtggggtggaggggccctraacacaggctaggtgttaaggtgagcatctctcttgaactgaaattcctggttgtttcattctatgcttgtatccccagggcccagcacaatgtgaggcacatggtaggtattcagtaagatttcaaggagggagggagagaagtaagagaggaagggggaggaaaagagaggaatggaaaggaaaggagggtgggttggttttctaacatgagtccagaccagggactctggatgcgacccaatacttcaatgaaattctgcctgaagtcagctacagtggttctcaaccggtgacagttttgtccctaagaagacctttggcaatgtctcaagacattcattttttcttctttttttttgagacagggtctcattctgttgcccagactagagtgcagtggcacaatcatggctcactgcagccttggcctcccaaggtcaagtgagcctcctgccgcagcctcctgagcagctgggaccaaagacatacaccaccatgcccagctaatttttaaaaattttttgtagagatggggtctcacygggttggctaggacagcctcagactcccgggctcaagagaaccttccaccttggccttccgaagtgctgagattacaggcgtgagccaccgcatcaggccttgaagtcatttttgatggccacaactgcgagtgttactggcatctagtggctagaggccagagatgctgataaatatcctacagtgtgcacgtcaggcctcacgttaaagaattatcccagccaaaatgtcagtaatgccactgttgagaaatcctgaaataaccctaaagcctgcagacagaggttgaaagactgtgtctgacagaggcttgcctggttcaaagcatccttggtttccaaaatgaggaccatctaagagtccaacctcaatcactggcttagcctccagaccctttcagaaatgacacctgggcgggggggatccagttaccttcttacycccccctctcctcccaccttctggttcttcctaataatcctggatacttgttggaaaaaaaaaaaacaggaacaccgggagtaggctcagtcaatgggtgctgtctgttccaggagctgctcagagaccctctgtacatcggcctgaaacaccagcgcgtgcacgggaaggcatacgatgacttgctggatgagttcatgcaggctgtgacagacaagtaagtggaccagtctgtcccttttgaaagaggacttttaagaratgccgtgactaaagtcaacactggttttggctgatatacaaagtaaaggcagtagatgcatgcttttccaggtattctgaaaattccaacttgacccctaggagtgataagactggacaccaaatgggctcattctctgagagaatccctgggagcagtgaggggagggaatgagagggttgatggctgaaggctgtgatctggaggtagttaagtatcattgtccyaggagaaaaacccccttggcctgagctgtttagggttctcagcacaattagggatgttgcaagtgatggaggaaaratgtgtgcccttctgatgaaatggytttggaaggcagcttgtcacatttggttattttccacctctatgtgagaacaaggaagtgttaatgaggcactgtggcagaccacacgggctctgggcctgcaagatttatgaggtgtcatctcttcactggggaagcttcacagtactggcagcttccaccccacttgcctgccccatctgtctgccatcgtggccacccgctcacactgctgtggctgacgtgccgctgggatggaggcctgatgacagccctcacacacccatgtttactctgagagaagagctggtcaagccagagtttcagcagctcagtgggcctctgaagacaaagcatgttcccctctcacttgcaaatctccagccttcttgctgcctgaagattgcacaggtttggcagagatggcctgcccatccttggcaaagtgctcccttgtccaagctcagcttctccaaccagaacagtgggctggagcccacaaactctgcacaaagtctcatctgggtgggcttcaggggtgggcaaactgtaatttgacctttgacccctccacttttcagatatgtgaccttgggcaggttactaaacttttctgggtttccttatctggagataagaaaagagttttgttggtgttgtgttttgttttttaagatgagagcaaaataatattgtggttatataaggtggaaatgatcctgtcaaaagacaaaatgaatgatggactgtaggatggggggaaaaagtccttgagtaagcaagcaggaaaaaggatccagtgcacacctgaagagcttagtcttggagcacagaaaatcatccacagggagaaagggaaggcagagtactgggcactgatggggcaggtgggtagatgtggtggtgggagcgagggggagtcccatctgcttgaagacaaggacatcagcatagagtgaggatggggaggtttaaggatagaggaagtgggacctagttatctaggagagtgggagaatgtccagactgggaagctggatcatgatcactgggcagctctctgggcccccttggggttactgtttatgaatttaacttaagctagttaacctgtttcttgcttcctcaagccaggttcaactgtctgggtccaagggcaggaagacgaagagagcagggtgtaatcagggttggggattttgccaggcaagagaaaacgggaaagagcaaggagttgagagtctattcaagggaatgattataattgtatcatgagctctaggctgggtaaaaggggagagaatgggaggacgtggtaaaggggagggacaagggacagtgaaagggtgatcaatggatagtaagtcctggtgaggtttagaaactgttgagttggatagtacgtggaataagctggaaagaaaggaggtggtgatcagaaagttagatgtttgcagctaagattatggaggaagggctgctattgggatatggccactaaataaagcaaattcaagggtcagctgcattaatagaggcatagcatctaggacaagggaggtgaatgtcacaattcattatctccatttcagaaatcctgaataccacatccagtgctagagaagctacattgagggttaaaaattacctaaagtgcctttggagkgcaataactacgatagtgaagagaaccaaaagctgagcctggtagagagaagactcagagactgctctgtctatgtcagggaygtgctagtacctccagattctaaaagctcttctttcagaagagaattggacttgtttgtatgtatctacatggaaaagaaccaattggtggaatgctaaaggaagcacttttcagctcaaaataaatcagggctgtctcacattgcactggactgtctgtgggaatgagttccctgtcacagaaagagttcaaggataggttgcatggcttatttgtggtgatattataggaaggaattcaagcatcagatgttctttaagctgccttcccaccccagtattctattctaacctcttaaaaaaatcctctgtagccaaccggataggtattattattcccattttatgcaagagaaaactgagactcagagaggccaagttagctatctcaggtcacacagtacctgtcaggactacaagctgaacccaggactactgactccaagtacagactctttctacaatgctgtgtcacctgtggatgaaaagagaagggaatgaaattggctttgaaagcccactttttgcttcctgtttccagggctcactgcttatctaatgagtcagtaatcattctgtgattccccacagaaaagtattgctattcgtgtgagaaggttaaataaactaggatgtaagaagctgttcaaactatcctcaaaatcagttcacagttttacagacacacacacacaggcagtccgggagcggggggcgggatccttggggaggggcatgcgtcagccaacaggaatgtgtcattaaacagaaaacatgatggattgatggttggttgttttgactttctaataagctatagcagatgtttctgtggatactgtaggtggggaatgagctggtctccccaagcactcttgggaatacagtagctccaagacagaatgcccagcctgggggtgagtcaggagttccaaagtcaaacacaatgtattttaagaaagaaccttgggaaatgttgactcctgctttcaacatcctcatctctgtccaaacatcctgctaataaaaagctccaccttcctacccctacccactaatggggatgtatgttaagattttttggcctgaaataaacttactatggctcagttcctgcygtggagcttggccactgaggagaacctgccaggacagaaggaatctccatttagtctgtgaaccacagcaacagacagctgggagtgtccttctcaaagctgagacaaagactgatggcaaggactgattgccccactcttcccgcwctttccctgtcatgcagtggatgggtgcattgtacccgggcaccacctcctgctgtcacgagttttccctgatggtttccattcacatttttcatttctgttacttacagtagcaaggatgggagttgactgtgttctgagtttgcacctggagccctaactctgtctgataattggcctgggctggacagaarcttgatgtcagcagcagctttggcctttaggcaggccaggaaaggaaatcacccgcttcttccctagttcccaaaccctaaatacagggattcttaagctgcttagatgagagtgttaaagaagggaaataataaataaacctttttaaaaagtcatctactttktagctctaggaaaattttttttttagtctctccattttkttgtctctgtgcattcattcattcattctctctctctctttcccctcaccataatcacacacacacacgtaatccctgagatacacaccatattggaaatcacaatttctctattagtgctctttgtagaaacttctagttttcagagaaattcagacagcccttggcctctctgatatctggagccagttaccacaggcccactccttaatgttaccttccacacttgatgtgagcccctgtccttccagagccaaccccgcttgctccagcattcattctctgtgtcacttcaacctaaatgggactcctcccattccatctctcctctgctactcatcccacttgtttctacctttacatttggacggctaccctaaaggtttctgttcaaatatacgtactgtcaaaatgactagatgtctctactgtgccctgatcagatttacagggatcaaaggaattgttacttgtcgggcctttgtgcagagcagagcaccaaagttaaagctaaaaacaagsagataagattccaagactgttcacttgcctcttgatctgtggtgtcaaggaacacatctgtttcttttgctgtgttaaaaaaccatcctaaatcttactggcttaacattttatttgctcttgattcttggaagctgaactgactcagctggagtgattcttctcctggtcttgccaatggtcacacatatggctgctttcagctggctaactagctgggagcgggctcagctgggacactggaaaggttgggctcctctgtttttccattgagtcttagggtctctccttcttcacatggcctcttctcttcacaggatagctgaacgttttacatgatagtctagggctcctaagaacacaagagtggaagctgccaggccttcttaaggatgagacctggaactggaacagtctaacttccaccacattatactggttgaagcaaatcataggtccatactagattccaagggaggaggttatacamggaaataaatactaggaggtatggtgcattgggggccaccaatgtcagagactgccacaccctatctagcctgggtaggatgaggaatggggcagcyctcactataggaaggcgtgagaaaagaataactcagttacacagataagcaggggaatggtatataaaatcaatgagcatgtctacctagtacctgctgtacaccagacactgagccaggcatagtgagcaatacacagagaaataaacagtcctcctctcagagagctacatagtcaaaaacatttcgtatgtatctattgaagtttagataacctgagactctacactttcttagcctctaagtgtctgtgtaagtctggagctcaagargagttctggtgcagaaacataaagttgggagttgccaacccatagatagtattaatatcaagggaatgattgagatttcccaaagagaagagaatatgactcaccatggttttctgaactgtgtcctatggataactgcaagtcaaagtgctcaacaaattttaggactagactaggatattgttggtaagaatggcaaggagggtaaaaggtttcattccttgtgccagctctgattgcttaggactctgaacctctctgggttcaacagggatgagcatcatggttgattagcaatgtctgccctgagcatggaataaggggtggcagcagtgtgctatcctttgccccctttggagctgtgaggagccttgtgacctaagcatctgtgactctgtgagcactcatgccagctgatcctgcaactcccacaactaaatagcaactccgaggctaaaggaggctctgggttatttttctccaggtgttcaggatatttcaagagctaaagtaggcctctattttagtccacatgaagctgcagctgcttcttctgagttacaaaaacatgcaggaatatgctctcttgggtacactccacccccacacccactcccaatacactctggagcaaagcagtgggtctaatatgctaatactgacctatggttcctaaatctggctttgcttctgagtcatcaaggaaacttgtcaagaatacagacttcaggctcctatgccacagaaggcctgggttgagacctggacatctgtatttttgaagctgtcctaatgattctcatagagctgtgcaaagactgaaatttgagaaactcttcggctgagcacagtggctcacacctgtcatctcagcattttcggaggccaaggtaggaggattatttgaggccaggagttcaagaccagcccaggcaacatagtgacacccccgtctcccmaaaaaaaaaaaaaaaaaaaatcagctgggtgtggtggcactcgcttttattgccagctacttagaaagctgaagcaagaggatcacttaagcccaggggtttgaagctgcagtgagctatgatggtatcgctgcactccagcctaggcaacagaatgagaccctcttaaaaataaaataaaataaaaagagaaactaatggaccacatccccagaagaggcaacttgtgcggccccagctcctcccactttcagagtcagactgaagcccaaggtgagggtgtaaggaccaatacacagagactttccacagttttatcagcagggacctacattaggaaagacccagtgtgttctctgagctcaccctgccatggaggtctaccttgcaatacacctacagctctggcagcttccttttagtctggaaacttcccaagcagagctgtgcccattgtttctgctggaatcccctttgccctgaggaacttcagctgctttcatgcggggaataattgcatttctacatgtggggaaagcactcacacatctgggtacctcggccccaaagacacatcrtgggcaagaatcaggcctgcccttctccacaagcaggcacatgttgggcctgattccccacaaagtgccttgacttcatgacagtgaaacggcctgcttgggaagtttctggacagtgagcttggaagagggagatggcaaactcattagttaggtaaagacagtggtgactgccttgtttggggaatttcttctaaatggcttcctgtgaaagtacacaaaatcatatcaccttcccaaaaaatatgcctatttgggaatttgactcttcamactggaaagggtatacttatcccgtgagggaatacattttgccagcaaagagatagaaacagtaggtactgcaaccaaaactctgggaagtgagctttattttcataacagatgagaaaactcatcatagaagcttgaagcagcactaacaaagcatgtatctgatcatgcatttccagtgcttctgaataatgactacatatccaacattctactaggcactgtaatgagattcaaaagaaataaaagacatcagctaggccaggcrcggtggctcatgcctacaatcccagcaatttgggaggccaaggcaggtggatcacttgaggtcaggagttcaagaccagcctggccaacatggcgaaaccccatctgtaccgaaaatacaaaaaaaaattagccaggtacagtggcacacacctgtaatctcagctactcaggaggctgaggcatgagaattgcttgaacccaggaggtggaggttgcagtgagctgagatggcaccactgcactccagcctgggcgacagagtgagattccatctcaaaaaaaaaaaagaaagaaagaaaaaaagacatcagctgtgtcttcaacaaccttacagtccttccaagaagacatttttgaatagaaaataattagggaagacttcagtacccaactatttggtgttgaccctcagttcaatggaaattcagagaaagggacaatcagggatgattgggaagaaatggaagttgtacaaatttaggaccgaattcaagtaagcagcaggagaaaaaatgatgttccatatagaaggtacatcatgagaaaagcaagaacacaggaaaagcaatgaatatacagggaaggcaatgagtatctacaagaatgggccaactaaaaatgaatgttcagtgattttaaataaggttaaataagaatggtgctggctacatctattatttaggtttctccagagtaacagaaccaataggatattaggtatttagatacttsagagtggatttattatgagaagtggctaacgtgatgatggaggtaaagaaatcccatgatatggtgtctgcaagctggagaaccagggaaactggtggcatagctcagtataaatccaaagtggggccgctggtgcacatcctggagwcagaaggccaaagagcctggagttctgatgctcaagggccggagaagatgggtgttccaaattcagaagagagaacgaattcacccttcctctgcctttttgttctatctgagccatcaaccaactggatggtgcctgcccatatggggtgagggtgaatcttccttattcaatttactaatacaaataccagtctcttccagaaacaccctcacaaacatacccagaaataatgctttaccagctatctgagtatcccctaaaccagccaagttgacacctaaaattaaccatcacactaagataggccttgcaatccaggcagaaggtcatgattatgagagctcaaaagtggaaggggmtacagtcatctaatgcagtggtttttaaaccaagcttccctgggccccaggactccaaagaagcatatcaggagtgctagaaatgaaatactttccaccaaccataaaaaatgtaaaccacytgaggaaacactttattgtttttcattgccttctatatctggtttctgctcaatattttattaaagaattattctgcaaaaaatgtttgaaaattaccaatccacaaaataccttatttgagacttgatgtagtgagcaatagggaggcatggtaggttcttgagcaacaaaagtattgtattaaaattgacaagatgtgggaagagattagaggcagaacccataacaatgccccaattcaaattctgccttccctagggaaatctactctgaccagcctggcctgatactcttgccctgactgtaatcttactggctgtagaattcatttgctaattaattaatcatgcactgcattgtgacatctctgctaaaatggcctattgcttttctttaacctttttttttttttttttttttttggtccttaggctttcattgtcagaggagagattgggcaaagatgagtctggactgttgtagaagggttcaagaactggcgtggatggcctttatagatcattcctatctcagggcctatgactcagtaacatctctaccaatggtagttcctaggaagcgtggctttactcgtgcagtaaatggtgagggtgggagttggttgattggtgggtggtcaaaagtccacaccaggctagctaccaattagaatagactgaaggctatgaatctgaccacatctgaggaagcacagaggaaggaaatttgacactcattctggcttgtcttgactctgaaggagcagaacagtttcccagtttcagcctgatatggctcattgttgacagtccagctcccccatgttctcagaagaacaacagccagattttgcatggtgacaaactcctatgcatgcaaggaatctgtcctgggtcacaggctaggagactatcaaaatgcatactagcacccaactctctaggacattttcacttccatcgcaccaagcagactgcataattgagtgagtttgcagttcactagttaaggtccagcctcaggactgaggccaaaatgtgctggaagaaactcactgcctcgggatatgattcaatgacactagctggctatttccttttcattttctcttagcagcctgattttatcgcttggtatcaagaataggaacaaaatcatccccagaactgaaacttttagattatggcagaagagatgaaggaatataagggtcttatgggtggcggggagcagggatctgatccctttcaatgaataagtaccaataataacaatawctcttaattatttaattgcttaccataagcagacactgatacaagcacttcacacaatattaacttgtctaattctcacaacaactgtatgagttaggtactattattcactttattttaagagatgaagaaactgaagtttacaaagtacaagtacctcatctaagaaaggggagcctgattaagaccctacccactaactgcaattgttaaaagcacgaattctagagctagactgcctgagttccaatctcttattaacaagctacttattaacacttatcaacgagtgacttaattcatctgtgcctcagtttcctcctctctaaaatgcatttttaagactgggagagtacttaygatggataaatgaggccatccatgtaaaatgtttaacatacacctgagtgatagtaaaaaaatcatgtttgctattattattaatttaggcagtttccaaagccattctcctttaggcagtgcttcactgtgcccacattcacgcattcatgtttgagttaatatatccattcacatgtccaacactgctgtccacagtccctcacccatccctccccttcattccaatattacttttcctctcttccccagtgctaaacctaggaaggaaaaaacaaaaacaaaaatgaaacagccctaggtgtgatccatttccattttagatccctggtatgtgcaattagtaaatgcttggtcttcatccccacccccaacacagacctattcagttttgctctccctcctccagtggacggtgttgtgtagattcatgtgtacatagaggggagcagtatggtccgtgtgttcctgagggtgaggtgttcttatatttttttgcagctgtttgaagctgagtgttacttgggcctttcaaactcaccactcagagtcagtcacccsctcaagtaaccaaacatcttttcatgagacacagttctctgtacagaaatgagaaacagaagcttgcccaagagaaagctgcaaaattgctctgagatcacccactgatactgacctattcagaggctccacatatagaagccttgtactttgccctcagagctggaaggatgcctttgatggctccaactcccacccctgttcctgccgctccttaaatgtgttgtctctgttacagaggcagagccttcgtgctcgctattttcccagccttgaatgtcctttcattttcagggctgtttccatctcatcattcaggcctscagataggtccacagcaggcaaggtcaagtgtggaggtctgtacaagacaggatgttagaactgagcgtcctgccaaaagcttagctgaggttctgtagctccaagcttctcctgttggttttmacacaacatatgcaaagaaaaatccctaggcatatagcatccagactacaaaggaagttaatgaggattttatkttaattttaaaagattgtgaaaagctgttaggtctaagccccgattgcaatgtttcacaggggtgttcacattctgagtccctctcagcatagagggtcactgctctctctctctctctttctctttctctctctctctctctctctctctctctatatatatatatatatatactgaatattaggaatgccttctgtggttcagtctgtatcttagaattctcattttctcactggatccagcctaggactttaatcttgcattcttggaatatctgagcaagaaacaacccactcatttgatccaatttcctcactttttagatgaggaaactgagacccaaagagaaaattatttccccaaggccagataatgagaaaagctgtgggaaattaaggaaaacttatccaattatgtgccctccttcatgtaattcatgaaatttcctccaaattttcattcaggctatatttatcaygtgccttccctgtaccccacaatgtggccaatacaaatatattagttccttctcacattgttataaagaaatacctgagactgggtaatttacaaagaaaagaggtgtaattagctcatggttctgccggctttacaggaagcatggtgccaacatctgctcagcttctaagaaggcctcaggaagcttacaatcatggcagaaggcaaagcgggagaaggtatatcacatggtgaaaacaggaacaggagagcaaaaggggaggtactacacacttttaaacaaccagacctcatgacaactcactatcacgaggacagtacccaaagggatggtactaaaccattcatgagaactcctcccccatgatccaatcacttcccaccaggccccacctccaacattgggaattacatttcagtatgagatttggctggcaacacacatccaaactaaatcaacaaagaaaagacttgtcctgaagaattcaattttccctgtgattataacatggacacataaagtcaccagaaaaatagtttaagaccacattcagttatttgttttcctatttattcatgtattcatccatccatttattaattcctttaytgaatatggcaagaagtcagaagtagactttgctgtcaaggaatttataaactacaagggaaattcccaaataattactgctgggtttgcatagatttaatgtgtacgcagccaatggccttgcctgcagcgttgatcaaggttgataaagggcataaggtgatcaaaagatctgggacatttacttggactttaaaagtcatgaccttattcccaggaaagcgctagcaactgaagagaacactcagaaagggcctcattaatcaaaaaaccttcatggaggacaccygtggcctcatgccaacctgatatgcacaatctaaggacaaatatgggctgacatacatgctgaagcccccaagccagccagtgggttggtggccaagaaagctttataagcaggaggttgaggagtgagttgccatgtcctagaggaaaacctttgtgttgccactgacctttgggaggttgagaggtcagcaggtcagccaccatcccctccccagcaatgagatttctggcgccatttggtgtgcttgccccggaactcagacaaacagggaaaatcaggaggaaagccaagctgttcctgagtgttttctgtctggccaagacttgccgtcagagctgtgactgaggaatggccacattatcctgggacttttgcttagaagttactgcttcctgtgactatgttgcgagtcaatgggagttttcccccttaggccagaatcccagtctcaggagcctgccagtctggctgccagaccccagcacaccagggaatctcccagtctgggagctgggaagggaagggcctcagaggtccaccctcacatcatgggctgaaatcccttccacgacttccgtgccaagtggagctccggtgaccatggactcacctccagtgaccagcagtctctttccaaccagtgtttgaaatctctgccttatatggcactggaatctgtgtccttctgacttccactcattggctctgcttttgcctcaaagccatacaaaatcaatctgcttaagtccttgtccacaaacagtcgttcctatgattgaagataatcattatgcccaattacacttgcccttctcaggctccgtattccctctttctccaatccacggtatccagttttttcacccatggtatagattccctgtcatccttgtgaatccttccgcaaaacatgaccccctctgctgattcacacccccagcagaataagtcactcttcatgcaagtctgtggcagagttgtgctgtgacggcctcttatctgtcctatgacatctgactgtgtcttcttcccattctaactgtgctctagcccccacctcctcctagctctcaggatctcaccagccctgtcatctctcatctcccctccattctgactcctgtatctcatatgtatacctcccatccccaaaacaaattcaccgttcagtcccacttcccccaacagctgtcaccctgcctacttcacagccaagcttcttgaaatttgtgatgaccaacatttcctccccttccattttcactttaaccccatgccagatggttccctcccttccccaccaaaagtggtctgcgaaggtcaccagtgatcctctaaacaacgactccaatgtacactttgtggtccctgtttcacttgacatgttggcagtatttgatgctcccgaccacggcccattgcgtggctctggtagcagctgctgtgggcccaacctgctcgctatccttggctggactttcttccactatctctctctgctccgtggatgcagggtgtcccagggttgtgtccttgccctgctccctgctctgtgcacaggcgctgcctgagaaccctcayccaatcccatggcttcaactgctcacagtgccctgagctgcctgttcccctccgctgacctcatgtatagcccattgcttcatgaacacgttcgttagaacgttccacagaacctgggactcctcatgtgccaactccgccttatcaagtaagtttgcctttctttccccatccccaaccttgatgagtaaaggacttcaccctccatcctcggcccttcctgggctcctccttctcattcatctccayatctggtctattattaaatcctgtccttaataatcattgcctccgaggactcagtgcctatagtgtgctggatttttatgtacattatctcatctaatttgcacaacaggactgcaagagaggtattattagcccactattatcagtgaagactgaaatttgtatcaagtacatttcctgaggtcatgcgtttagtaagtgatggagccacacctgctcartctcaaagctgtctatgctctgccacactttgtctttcctccaggctactcttttcacttccttaacatattttacccagcttcttctctgcctacatgtctgcactgccttatattaataccaggacttcacaatctctcactgcagttccatgcctccttgtctccagtctgtcctcccagctgtccatcccatcatccatttctgccagaatraacttcctaaaacacccgccaccttcctgcctaaagccctcagtgggtcccccttgccctccagattgcttaggctgtttacatgggcatgaaaggggtggctcctgcattccaccaaggctcatttctccccatgtcctccccatcttcagcctcctctggcaagatccggccctgtgtattttcctgcagctccaggaaggcaccatactcactcagtcctcatgcatatgctgttccctctccttgagatgccctcctccctccttccatccgcacccatccacagtctgtctgggaacctctgctcttccttcaagccccacctcctaatctcctgccctgtgaagccctcattgcctctccccgctgcagagctgcctgccctctttgaggcttcccatgtacctggcacatatctttattattactgatgccacagagtattgcaactgtttttttattttcctgtgtccccattcaactgtgaaatctgtgaggttttagcaagtagtacagtcccttgttcatagtagacactttgaaatgtttgttttgttttgctttgttcttctaagatatgggtctcactatgttacccaggctggccttgaacttctgggctcaaatggtcttcccaccttagcctcttgagcagctgggatgactggcatgtgccaccatatcaagcataaaatgtttgttgaattgaatttttattacatcatacttagtatagtttctggcacaaagaagataacttgccgaatacatttctttaattgaaacagaaatgtcaataagtaattgtaatacaatgtgacatatattgttacagatatgtccagaatatcacgggaccccagagaagacaagaattagcactattttaagggtagggaaagagatgtgtcaaggaagacttcttaaaagaggttacagtttaagatctgggcctacatctgtaatcccagcactttgggaggccaaggtgggtggatcatgaggtcaagaaatcaagaccatcctggccaacatggtgaaatcccgtctctagtaaaaatacaaaaattagctgggcttggtggtgcatgcctgtagttccagctacttgggagactgaggcaggagaattgcttgaacccgggaggtggaggaggttgccactgcactccagcctggtaacagagcaagactctgtctctcaaaaaaaaaaaaaaaaaaaaaaaaaagctctgggccttacagtttaagtaggggttggcctagacaaaaagacgccttctagacagagagaaccagcagcttgagcaaagacaggggaccgtgcaaaggcccacagtggttaggaagcaggaaaacgtgcctagaatgtcagaagacctgagtaggtgttcagcaatagagctggggccaaaatgaacactacctaaggaatttggatataaccccacaggcagtggaagccctcttaggattttcagaaaataagtagccgacataaacttgtgtttagaaatatgtggaagatggattgggggaggggaaataaacttgaaggaggtgaaatcagtcactgtagggtcctggacagaagcagcaatggcagtaatcctggggagagatggcctcgccctgaatccacccagcaccccctgcacaaagttcttcctgcagagccatgtctcccaaagtrtgttccaccataggtggtgaggwtgagatgcaacagagtaaggtgtctggtcaaataagctttgaacatgctgggttaaacaggtttcttattgcaagatttttcagagcttttaatacacattgtgtatgctatgtgtaacacacagagttttccaaatttacttaaccacagaacctctctctaagaccatctcaagggactagagtttaatggaatatgtaaaatagaaaaaaaagaccaagagtttttatgattctgtcagatctagttcctggaaggaaataaaaaaagaaatagttttccattgggtgacaactgataatctcactgaacgctctgctgtggaagtcttgcatgtgggtttttttctggggggaggggaacagcatggactaccatggaaataccagaggtagcttttagtcattctatttagaggcaggttgagcaagttcaccttctcttcccagtccctcatgtttgttcaggcttgaaagaggtcagacccaggtgtttgaaaaaatggcaggtcctgacctatggaaaagagaaactaggtctgcagcccctggaatgctctgcaccaccaacatccctcactctgcatttggttcacacactggggagaagggcagaacagccacctcagaccctcctacccatgggaggatgcatcccaggtggcaggtgctggcactgttggttgtggcctgggtatcatcacaccgtcacacacagctcaccagaactccagaactcccaggcacaggtcactgtttgctggcttccccttgcctgagtactggagggaaaaaaaaaaaaacaaaatcaaacatccactcattagccttgtgtctctaagtgagccctggctttggaatgccttccctggccactccaaggccatttcccagctgagtccccagggttgggaagtctgggaagctatctgtgtggcttgggaaggtgcctctttctccattgcaggaattctccactggagaagcatcagatgttcctcagcccctgccagggctggrgggtgaagagttcaaaattgcaaaaggggacagataagcagaagcctccccggtaagtgggagcttctcgcaggacagaaggatagacakcaggctgctgccagcactagaatcgggaagctgcccagagccctgagtagggagctgagagcacggcttcttgggaggggtcctgcctctgttccacagtatgacctggagggtggctgccttgccctgctcactcagctggtccagtttgtgtaagcacaaagggctctaagacactcaccccccatattttcctcacatgttgctctcacagagaaatrtctaacctccctgctctggacttgtagaaatacctgagtgaagcttctagtattcaattccagccccaaatattaagtaggttgtgctactcctccaatgctctcagaccaggaaactgagacccagacagagaaaggggactcagccaagactcctgcattttttctgtctccctggtcaatgttttcttcaccatacctatgatctttcccaatggagaaagaaatccagccttattacctatttagcttttttttttaagaacctgtaaggctatcaaaattaaactgaagctggttcttgagtcagacagaaccagatttaaattccagctccaccacttaccaagygcaatagagtacatagcctgtgagcaaataacttgcaatctgtagctccagattccttctctggaaacagcgcctacatcataaggtgatgtgaagattaattaagataatgtatgtaaagagctcagcacggtgcccagcaggtaataaacactagataaaagctagctattttttttaccattgttgttagcattttaatgaatatgtaaggcaattgataattaacatttaaattagtgttatggtgaaagctcattacctgtatttggatgtacagggatgaattgagaaacrtttttttatccactaagccatttaaatttccactttgaaattttctcttcttaattggtttttaattagtttaaagagttggcagacaaactccaaacattaagtttccgccaactccttcatagatccaatccaccccttcctaaaacattaaactatagtatcagatcatcayaggtgctcaatgaatgtgtttggatggatgaatttatggatgggtgaatggatggatggataaatcaaggatggatggatgatggatggatggatggatgatgaatggatggataaatgaatgatggatggatggaaaatggatggatggatggatggatgatggatggttggatgatgatagatgaataggtggatggtggttaaatggatggtgctaagatagtagcaccatgaagtaaccacctttggttcagactggatagtggtctggtttcatgaaaagccataatggagggcctgaggcactgggataacatggtgaagggctcagaggtcttggtgcagacaaacagcaggtgcagtggaagtgaagagacatagaaggaaaggctgtggtcagagactgagatgggacagtgtgaaatcctagagtaggagtagttcctgggaataaaaggtccagraagcagccaggggatggttacccaaggtggagaggagttctggggttccttaaatccggtgagttctaggaactatgaatccagattattggatgagtgattcacatggcctcttatgcaattccaagctaggattaaagtgacctcaattaatgaggttttattctatattccatcaaattgctccatgggagggaggggggtttcttatataaaactgaattaaatataaataataatcatacactgaacaaaggtatttatttataattcttgccttatttttacctcagtgaatgaatggtggtgttgcttaaaggggtgtgtgtgtgtgtgtgtgwgagagagagagagagagagagagagaaacagagagagacagacacacagagagagacagaaaacgttcatcacattgttttgttgtctgaccttttcagcattttagctgcaggccagttgtggggcaacactgggaatcttgtagaaattatatatagcaaaatgtcaccagcaaccaaagacattgtgttcctccccacccaatccaaatacttgaaattcacaataaattttggcttggtgagcatggcattatatttgtgcatgggaggttttatttatcatttctattcatagtacaagcaaaagagggctggatggtgggtggggagacacagtgagccccccaccaaacctccatcagcatttgttctatgactgtgaagaagaattgtggccagaatggcatttgtgtttagcattttatggtctaaaaattaccctcaggcttcagttagtaatactgtattgtatacttgaaatttactaagaaagtagatcttgagttttcttaccacacacacaaaatagtaactatatggggtgatggatgtggtaattagcatgattgtggttatcatttcacactgtacacatatatcaaatcatcacattttataccttcaatatatgcaatttgtatttgtcaattatgcctcagtaaagctgggggaaaaacctcaccctcagcttttaaccctcacaatagttcacagatgttagccaggcagatattattgtgcccactgatggatgggaaactgaggtagaatagagaggtgaagtgacatgtgcaggtaactcagttgaatgtggagagccaggtccggcctatggccttctaacccaygcccagcactctaagcactggactgtggcaagtcactgcccctgtgtttctgcccctgtaatgtgaatccatctcccagtccttctaccaayagccttgactagctaaggttctggaaggaccacggcaggaacaaatatttgcccacccactggtatttgggctggacagcataagccatgcacaaaattataaggctggaaaaaatgttttgtgggccatttcagtgctcctcactccctcatagccaccagcctcatcagaaagatgccccgagagcacaggaagccccccaagcatgtgccccacccaccttctctaacaaggtaataaatatttccacagccagtcccaagctgctcccaagcctgtaggtcaccaggttggaagggcaggccacttctacctgttacatgccctgacacctcttatggatcaatcaggacattttttctcaatgacatgacctcagatgctgttactcagccacaaattgacccatgaggtgaaacctatttttatccatgtattaagtagtttttaataatccatactacacttgcttacagaaaggctaaagacacaaacaaaactatcaaacaccagcatcaaagagcaagaatggagtaaaggggaaatctgtgtgcagaagcccacagaagctgagggggcctgtagcaaatgagcaaaaacttcactctcagcttccttacaggcaatgttaaaaggaaaaataggttacaaaactcgaacaaactcagtcatttttaagggaaggccatgaaatctaggaggcaatgctagcatggattttaaataaggcayatcaagcatcttaatggccattgtcttcacccacaaggcattgtttctcagggttctctgggctgtcagaatcagaaccatctggggtgcttgttcaaaatgcaggttcctgaccccatcccacactccgagtgagactctgtgagatgggcctggtgacctgctttttaaacaaggtcagtaactgattcttctacacctgcaagttggagaacaacttcaccaagatgttagtagataacagtgtcttaatgcagtggcctttcctaaccatcctttcatcttaccagagaacaatgcctggtgccagaggagtctctagtggaagagctccaggcctcagggtccagcaagagagatatttggaggatgcaggggctmcccacctacttgtggtggggaagctggtctgtctgcatgcacttggatgtggagtgagctttcttctgggatctcagatggccacaggctacacagagggcaggcccctccttggccctcttgtcactcccagggctggccatggcagccatgggagccaccagcgcaccttagctatagtgatgctgccttggctgaccaccaaagccagggycctactctctcccttccccatcctcatccatgatagggcaggcagagctccaagcccaggagtccaggagccaaccagtggcaaaaacacagatgaaggagccatgccacctcccacccccaggcctgcacctccccaccccactgtgcaagctgggatctgtcagggatctgcctcagagaggcaatcatgggtttcttcctctccctccacacaggtttggaataaattgcctcatccaatttgaagacttcgccaatgccaatgccttccgcctgctcaacaaataccgtaacaagtactgcatgttcaatgatgacatccaaggtaggtttccaccccacctgatgaagctacaggggactaacttatattctcaacctcactgggatgccaaaggggtgaggaaaggctgtcascccatagttggtttgctgccagcagctgttgaaaaaagaatattaaacttagattcaactcctacttggctaattcttaattctctgaattcagtttccttttctacaaaatgaagatcattactacttcagaggtaggtaagaattatgtgatttaatgtatgtaagaaattctaaacaatgctgtaattcactagcaagttaaacatgaaccagtcacttctctgaccacagtttcatcatctagtcaatggagaggataacaactgccttgaaagagcatggtgaaaatttacaaggctaatgctatagaaagtactaacccataaaactcatcagaccgaagcaccaatcaccataaaaatggccttccccagccataataacttgcttttagactttccaaatacaaggcgtgtctctgtcaggaagtcaggacaattccttctctggttttgactgaagtgtttgttgctcataatgaccctgagagagacactgacaccaagaacccagagccttccaaagccaacatgaagcagcttctagttcaggttccctttggtcatctattctgtgacccagaaatatctgaaggtacttgcttcttactgtggagttaccagtgtccaaagctggagtggaaagggattcatctcacttgatctagaagtgcacaggaaggagcactgtgagctgttcctagcattttgtaaagtccgagagaaaccttgatgatgytttaacaaatgaagtttgccaagcaatcttttaaaaatcaaagatccatgtcaggtggaaagaataagttggcaagagacaggtgttggccctggattgctaaaggttggccaacttctcattttgcagatgacttctccagaggcccaaagaggtcacaacttttcttcaagtgagtcagggatagatctaaaagaaaagaactcaaactcaggtaataacagctaaggttaawcgctgaacgcttattgtatgtcgggcactgttctaagcactctacagttttaaaccgatgagacattagcatctctgtcttatgaatgaaaacactgagacagaaaaagagtaagtaacttttatagccattaagcatagagttgagatttgagcccaggcattcagactctaaattgcagtctataaccattcaccatgccattcccagatcttatattacaaaccaagttgcccttttttccccattatggtccatattacagggtataagaaatgtgatagacgactttttgtatttgtcatacattttcaagaggcaagatagcacagttagaacacactattagaaaatttagtttaaaatatatgacttcagtgcctgaagagtgggtatccagagggaggggagacccaaaagagaaagctgggacatggtgccccctgccagcctttctccattctgtctcccccttaccctgttgcataggcctgggacaggcctcacccacacaagccaggacactgcgcagacagggctgtgcagttcaggaagatgcgctggtggggggaagcattctctcactgccctcactcacctcattgtcagctcagcaggtgggagtgtgccttggccctgaggaagcacctgcctgctagagcctgaccggctccccagcatgaattcacccatgaatcagcagcaggacagccagtcccctgagcccaccgggctgccaaggccagagggtggaagtggaaaacaagtccatgcaggcggcacacctggtgcacagcctccagctgtacagacacacagacagccacatgtgtatacatcctcctaaacacaggcacaggaacacggccaggccctgcagccccccaggcccatccgcccccaaactgctgcgataatgtgcctctgagatgaaastatcactcactatgccaccctctcttcatgagaaagttcacaccccttcaatgaaaatataagacttcgggatctttcttctgctctctgcccttccctttattttactcctctgacctccttacctgccatttctttctgtgtttgaaagccctgctcaccctttcccatcatctttacctgagtaatttctactcacccttaaagacccagctccagggtctcctgcccagggaaggcccatcagcccctgttccctcagtctgatttgggtgcccctcaggtgttcccctctgtcagttctcttacttcattgtaccccaaaagcctgtattgcattgtctgccttcccagaagataataagcttctggaggcaagaaccatgccttatccattcttgttccccagctcccagcaccgcgcctgctacatgatagatgcctaataaatgtttaaagaatatatgaatgatgtctacacatacaaactgacatcctcataagcacacccacctgttcatgtgagtatgtctacactggacacctgcccctgcagcctctctsttatccaggtcatcattcatgtacagctgacccttgaacaaaggtggtggttacaggtgccaatgccccacacagtcaaaaatctgcataacttttgcctctccagaaacttagctactaatagcctactgttgaccagaagccttactaataacatcagtagtggattaacacataaatagactagtatctatccctattttatgtatgcatgacatacctaacttcttaatttttttgatatttctaggctacacagttcatctgtgagtgttcgcaaattgttacaaacctccaaaattttaaaaaatatatgtattgaaaaaatctgcatataagtggactcacacagctcaaccccatgttgttcaaggattgactgtgctcacatataaatgcacctctacatgtgctcatacatattcacatgtgtaccccacatgcagacacatggagctgtttgtttttaattaaatcaatccatttgtttacattcattggtttttgtgtcttgcctctatagccaattttgctcccaggcaaaaccaagtgggatggttttctgggtcccagagcaaagagaagaaggacttcccattcttttctcagaaattcaagactaaagccatcaatctagaactcatgaggacagctggcaaatagtgctggaatggcaggagccctgtaagaaccagcctttgatcagctcagcctgatgtttaggtgtgaccatatcattaacaaccataaagaggtgggcaggagcatgcgccacccagatcctccttcaaggaaagacttgttgcccagctgacagcaaggctgtcagcacatcatgcagagcctcagagagagagagccacctcgccatcccaccagggcctggcctcacccagtgatgagggaatatgaaggcttaactattttagcccagtgcaggacaactcaagctccccatggagctggctgaggctttggggcctgcatcacagctcaacttccctctcaactcattctgcttccttcccttccttcccacaagggcacttcctaaaaacatcctgaacactccaatataactcagaatcttcttccaggggacccaaactgtaccaaataacattttgcatgcacacagaacttaaggttgaaagtgcttttcatcctcactatcttacaagtgcctggcaacatccccccctccctcactgggggacaaacacagctgtcccacgtcactaatgaggaaactgaagcccagggggttaaagcttgctcacggccacacagccagacaaaagacacaaagctggaactggaaccccattatgtctgatttggaattctccactctctccatggcatcaggctgcctgttgctcctgcacrtgtgaagtggtggagggtatcttctcgttaaggatgaaattccagaccctgctgaaacagtgtgggtgtcactgctccctggcatcctgctgctgtcrtcctgccctccccatcgttcccattccttcctctaactcctacagaatgcagacctgaagatgaggcccacrgtcacaagctggttagggatgggtccaggccagaagcctgtgatgtgtgttctcattgttaagcagacaatgagaagactggtaaggaattccaggactaatgagccaacatggcagatacagcccatgctgcaatggtccccctttatctccaaatacaaagtaaggagcaatgccacttaagactacaagccatgctcataatgggagaggagcatctccatgcacagaaccacagagggttgggagtgaaggggtgagagggagtgtgggaaggaggaggaagcgatgcagaatcatagttgtaaacagaaaccaaatcacaccacacgtgggagctggagacagattctcagaatcttcttgggaaccacacatggagggggctggaatcgagcaacccacatgaaaatgagactagggtcatgctacctactctgaacaccagcctagcctcacatcctcagtggatagatagaattcaatcctcgggagccccactctactgatctcccagagggcagggccatgcctggtgcagagcaggagccyagggcacattatttractgtctcccaaccagtcccactgtaccatgtgmtcagaatcactgaccccaaggggctgggcctctgaagcccgagcacttgaagggaagagagctccccagggcttctcatcatctctgcctcccaccccagctcagacccacataaagccttggcccaggcccaggctggtccttggtgatcagagctgccaatgcactgactcattgctggcagcctctcaggaattttggaaaaggcagaggctcaggtgacttttgttgtttcagctgggaccagagaagcatctctgctcttagggaggaaagaaaggcctagaaggggaaaggcagtgggaatggtcacactggggacaggggaaggaaggagagccacacaaggggccaggtccagggtgctgctgacccagtttccgtgggtccctggcctccacstgcaagctgaccacacagcatggctggagccaggaaagccccactggctcatcagctctgcagcttcctccacctggccagccttccctggacctgcattgtccaccaatcctgctaaatctccaggccagacgcccataaaggctcctgtgtgttatgtcaggctattagcaccccctgtgagtccaatgcttaacaatcagacatttcaccaagacaagcctaggtctgaatccccattttcctgctttgtggctttggacaagtggctgaaattctcggtaccttcctttccttatctgtaaaatggacttaacagttttaacagccacaactgctcatcagctagtaccaccagaatggtcagggtttttttataaggccagcatctgttatggttggttgcagcctatgccaattccttgctaagtatttccaacacccgtttatggcactgaattgttgtaaggattgaagtgatgtataggtagggacaggcatgtagcagtactcagttcatggtacctattactataatctctgatgcctaataggctcgtgacacacagatacgggagggaagaaggaaagaggagacttaaggcagagattttgatggaggtgaggagagggccacatgtgagcacaggactggggaactctggggagaagagaagcagggccccatctcacttttctcccctttcccacatattccctattattccagcccattgtattagtcactcttctgtgagttttctgccaactccatgattttgaatgtgctggtccctctgcctagaattctcttcctgttcttcactactttctgtttgtccataaaggctcatttcacttcccccaggataatgcatccagggccaagccacagactctaaatgatcccactcttccccaggatctgggagtgacactggacggtggtcacccactttacagaaggcttcaaagtgagccaggggtagggttctcagccaagaaatgcaaaatacatccctggaagataatgaccttgttggagagggaaggtgtgggggactttgcacaggcttcagatgccacaatagggaagaggcagacaggcaggaatggctggctcatctctgaagaccgtgcagctcgtttgtcttgtttacaagatgccagggattatttccagctgtcgggggtcaactgccctctctctcacccaccaccaccactacacacactgagtagcagttctaggcctttccttgatctctccccctgccrtgaaacttcccctggtctctttaaccttttctctcctctgttcccaaagccttccttttcactaagtcctgtattctgaggctgttcttcacttccagggctgttcctagtcctgaagttcatgtggatctcatgtatctggctcctccgagatctccccttttagctgttgcaacagccgaacctccagagaagccaagaagatgatcatcattccttctggttctttccaaattgtggcaaaacaggcctaaccctatcttctccattggccagagaagtgccctctagagagtccaggagctccagaaaattcccttatgacacaaaattgcactgaagtaatgtagaaagcctttgcttggtgtccaataaaggggaatctgaatttttggaacacttatgctagcaactccttgagagttttatttgagaacaagacttttatttgtctttatttattcaaggcctagcccagagaaggcccagaacaaacactcagcacatactaatgaataaatgaatggcagtatctactgtagaaaggtaattcttatggatcgtggaagcaggtgtggcctcatagcagmggttgttctgtcccaatagggatccaggcctccaaagccaccgtggccagaccctgacagagcctaactctttctgtccttcttgctgcctgggtcagaagttttcccttacctgataaagcagtaaattctttcctccaataatctattgttcagcatggcaactcctttaactttgtcaaatctgactattaaaagcagaaactacattttcagcatgtccttttgtgctatttcctgaagctacaacctcaagtactcagtttgcaggaaatgtaattatggaaatctccctctggaaaaaaaaacttctttttcttttaccatgaataggaacaacctgccacactttcagctgcccatggcatttatgggcacaagtcatgttccagcacatccctggacccatgggcttctcagagtggttacctcgaaacagctaagtagcttcctttccagttttaaacccctagtgcatagcccaagagcaccccaaaaatgcaggttaatgatggagataactttatttgccaaattttgtaatttggagcttaagaaccactgtttttcctcttgagttctggcctgtaccaagtgcagaaatagcttcccaaaggaaaaaaatgggcaacagtaccaaatgctgctgagaggtcaagaaagaagaaggctgagaactgattactgaatttggccacctggaggtacttggggaccctgacaagaggtgggtcagtcatttgattggactgggtttcatggggaccaaggaggaaggaactagatgcagytaatatattcagctctctagaagagtttgcctataaaggagagtaagaaatagggtgggacatataggaccaagggagggccttttaaagatggaagttttacagtgtatttgtatgctgatgagaatgatccagtagagagggcaaaattgaatatgcaggaaataggagtgggaataatgggacaagtaggcaaaaatgatgggatccattagacaagtggtgctttagctagaagcagggaggcatcgatggtaacagggggaaaagcaagtacttggacattggaggcagagggtctgaagacttggtggtgaaaggattcagaagttctgtcctgattagttccatttcccttgagcgtcactctccacttttaagggcaaaaaataggagcacagtagtccctacttcatggagttgttgggaagattaattgagcaaatcctgtgctggtaagcacacagcacagagccaaggccacagtaagagtgatcaataaatggcagctgaccttgcatccttttattgtaatgtgtgactctttcccatcagatttcccattgttctgagctcccctccccttccagaggtacagctgaatgttgacatctactgcctaagttcacttccctctgcctctgctaccaccctgctccgtccttccccagagaaaccccataacacctctcctgctgccttcaactatagtcaggaagggctgtctgagcagcagagatcatgaagggatggaagcaaacctgggaaggaaacccccaggtttccttgctttgggtgactgacagggccaagccacctttctctgtcaatttcctcatctgtacaactgttaaatgccatgatctccaatccccatccagcaccgaatttctgtgaggaagcccagttattcaacctgcaaataaccccagaagacggttgacacccaaaaagaaaaagacccatccagagtgtagtgtctgcgggatcatctctgatggaatacctttggcgccatctggtggcaaatgctttgcgcaacccctcctttcagggaggcaaaaggctgtcctgaaacagactccgatgagcagaaaactcccgctagccaatggcaggaaactagtacctcacctagagasgccatctagttcagtgcatctcaaactggaatggcatacaaatcatctggagatctttttaaatayaaattctgactccgtagaactgaaatgaaagagagttttatgggcggagagtaagaagtatggagttacttggagggaggcagagaaaatagggagtgccacataataagtggactttggagaaaattaaggacaaaggggatttggggatttcagaagagggtcatacaatgcaattctcctcgccctttctttaagtgatttaaatacttatttaaactgcttgttgatacttccttggatgtcagcttggtgtttcttttgaatgcagtacagtgctgagcctgaycatgatatagtccagcttcattcaggttagataaaaaagtagatatgggaaaaggaggcatggttaaggatgcctggggtagcaaggaatgtcttgctgatcatttgggcagtcttaaggaataatgaactgcaaaatggtcttctagataggtagaatagcaggggaaatgtacctaagtataaacatgcatgatatgtgtagggaacaatgaataaagctactggtacatggagtacacggggaggcactgcagaggtaggttgatactgataacatacttttctgtacataaactaacaaaaagtatgtcatgaacaactgttttataaaagccatcacacttgtaatcatttagtaatttctttccttacaaacagaaatgagcttggtctattttgttaccatggtatcctcagtacctgagcctggttcataattgatgctcaaaaaataaatgaatgtaacaatttccagtgatctctgactacccactgtgttctactgttttgtgcccaagttttagtaaactgggagttctctgatggcagggatcatgtttgattcatctgtcttcgacagtgcctagcatggtgcctgtcactttgtaggccctcagagggtgcacactgtgtactttgcagaccatgggaaggatgttaggaagtcccagtatccttagccctgtctctgtgacactgccaacagttcagcactccctctaggccacagctgtgtgaagacaggggtgcctgcaccccatcttctgagaagtatgatcctgcatagagtcccgccttctgatgtccacaatgatgaatgtgcacttattggccaccaactgtttgctgtaccccctatctcagccactgagccaagtataaatctaggagaaggcccacccyagagctagctaaaaataagccacctggaaaactagaaacagagaatatagaaaattcactcatactcccaccctgcaaccattagtattttgtaagttccttctggattctatgtgtgtgataaatgtatactatttaatgttctcttccttccagccaactcaatggaacataggttagtgcttaagcacacaggccctagagcttgattccctggattcacatcctggctctgttatatgatcttgtacaattcagcaaaccataccttattttcccaatytgtaaaatgaggatggcaataatgaggattaaatgaataactgtcttcatgttaagacatataaagtacttggaacaatatctgatgttagtgactagcttcacagcattttccatgttgctgcataatattcatgatgatcatttttaatagctataaaacagtctactgtgtctacactggctactttacttaatcattactcctttgttagatgtgtaggttatttccaggcattctgtattataaataacactgtcataaacatcctagtatatacattttggacttttctatatagagattctcaaaagtagaagtataaggtcaaagggcaaaaatattttatgcctttgctctagatggggaaacagttctcactaaagattgtagcactttaaaacacaaagtatattggaacattttacttttcattccttcctcaccagccatagatgacaacaattttttwaattatccaaatgtagtaagccataaatagtcctactttmatttccttttgctttgttttgttttggtttcaccatcgtggagtgttgctgattgtgattactttattgtgagctctctgtatcagagtctataccacttgctttaatagagaacacttaatattttttaaaatgttaattgtctattaaagaattcaaaagccaaaaaagaaacactaaggatctgctacaacttctgaggctaagggaacaaaggaaagaggaggtggcagttagtggcgttggtgtcactgagtggcagctatgagactagttctctcagtgacagccaaactgcaaaccgggttcaacttctkcttcaggaacaaactgctgccatggagttgaagaactaaggctgtggggctgccagatttagcaaaaccaaaatgcaggacactcagttaaattttggtgttagaaacaaataatttttagtgtatttatgctcatattgcataggacatacttatacttaaaaaaatcttgttgtttatctaaaattcaaattttacaaagtgtcctacattttaccttgcaatcctaacaagatggatgatgctggggtggtgggggggaagcatattatccccctcatctagcctttgtctccctctagcacctactattggcagagcccagcatagagcaagttggcaaagctgaaaagtggtttgcagacaaagcagtgtaaagaagctaataaacaattacccaataattggtacagtccatccttctggctacccagcatccatatacactgtctggcacatgtgtacttccacacaacaaaaacaactctggccaggtgtggtggctaacgcctgtaatcccagcactttsggaggtcaaggcaggcagatcacctgaggtcaggagttcgagaccagcctggccaacacgccaaaacgttgtctctactaaaaatacaaaaaattagctgggcatggtggtgggtgcctgtaatcccagctactcaggaggctgagccaggagaattgcctgaatccaggaggcagaggttgcagtgagccgagatcacaccattgcactccagcctgggcgaccgagtgagattctgtctgaaattaaaaacaaaaacaaaaacaaaaacaaaacctctaacaaaatgcctcacaacattcaactatttttccaacaaatgaagacattctcaccttttctccaacatggggatagacaatgtcccaacagacattttagtcatctctggaagacagtcactgtatccacctctaagcagaattaatagctcataaaattcagtcacatttgaaaactctgttatctaaagactaacatgtggaattaacctccaacagaacttatataaaataatagggaggagaagggagaagaaattagcccatgtgtaccattatatatagtcacattatgatcaaggaagaaaaatatgcctggctgctacattccttgtttctgtaaccagtcatgaagtcaaagatgatttttataaatttcttcctcaaccttccattccatgttttcttgccctcagacaggacctcaggtggctgggattctttacccagtagagtgacccaaaccttcatttctgaaggatctgaatcctccatagtcctgaatatccttacttgcaatatatttattaatatttactattgagcatagaaatatgaagatacgcccctagaagactcccctaagcttcagacatagtcctccctgtcctcactgtycctttgattatcaggatgaatcacaacagccagaaaagtaatccccttctttgcccactgatttagtggcatgaagagccccagctggccagggagctgtttcaactccaaattcaatagaaccatgttgtaaatcctaatggaagtatttccttcttggcaactaagacctccaatccagtagagcacaaaattaaagagacaggaagcaaaaattctgtacgtgggttattaggtgaaatggtaagaggagccactcccatttccaccccacgatttctagacccatacattttggctatgagagaaaaacacaatgtcttgcttgctaagtcataatacattgcatcccataaaacagaagctcattatctccataaggtgttgcttctacttaagtcttaggtaattcttcagtaggccattctactgatctactaagccagctgctcctgagtggttgagtacatgttaagaccagtgaatttcataggcatgagcatattgctgcccatcttttactgtgaattaaagtccttgattaaaagccttgctgtctgtaatatatctggatggcaaataggtattccaaacatccatagatgatggtgctggcagaagcattacagacgaggaaagaaatccatatccagaatgtatatctgctccagttaggacagatttctttcctgtccatgatgggagtaatccattgcaatcatcttgccaccaggtggatggtcccccccagggaatggtgcccataaggagctcagcattgttctctgtgtttgacaggttaatcattcaacagtaacagtatcaggccagctyggtaagaggaagcccatgcatagcctccatccttaccaccatggctgttttatgcataagtccgttaagcaaaccctgggtgactaaagaaagatgctgtctaacatacataggtcatgccattttgtccacctgattattgaaagactgttttcatcatgtcctttgataaactctcacatggggcacaaatatcctcttactctgtacctatcccaagaggtccatccacctaccttttccccagacctccttatcaccagtcttgctattttgttctttccaagtccctgatcatccagctaaaccattagcaactgctcatgaatcaatgtagtgctaaccatcccctggaccaaagtatacaactaaatttaccacttgaagtcatgtccactgtccttcaccattaccttttattggggctgtgaagctgccaccttacacttctagttggtgccaacatttattcacaacaacttgtaaaccaagcccaagttttttctccttggtcagctgctcttaaggaatccccagtgaggccttagatgtggattcagggagaagaagtcatgtagcagtggctcaaatgaatctgagccacctacttatacaacttacttgtcccttccagacatactcaagccatttgacgatggtgtgcgaccagacacagccaaccttatgacttggtagataagatgggcagctcaggccatatggtcatttaatgcctcatggtcaggttgtgttctcatttttttaaatgtttttatccatttagcccttatataattctatgaggctcatgcttctttttgtcttccattatatttatccttgtcattttctttatgaatgatgatggtagcagcacctggctatctgatcccatcttatggggtcaagtaacaaatcaggagctgtttctcaacttcaacaacaaaaaagttatctgcaaaagagagcatggatttgcaccaaaacttgcatgcctacagggcataagggctaagaaaagttgcctgttcctccacmgtcccagatgtggggarctctgccaagggtcttctcttgggagctggcggcctgtggccagaggttgatctcaggccactctgtttcaggcacagcctccgttgctgtggcagggatcttggctgctctgcgaatcaccaasaacaagctttccaatcacgtgtttgttttccaaggtgcaggcgaggtatgtggcattgagggtttctttggttgctccaggaagagaataagaatgggtggaagcataccaaaaaagggaggcattctggggttctgaaaagaggaagcagcacagacatattgtgatcattgcagctgcctaggctctgacaattgggtgtctcaaggcaaggacttaattgggcctcctgggagtcatkgaggtgggggaaagaaaagggggtccttatggcaagacatcasataaatgttcagcagctgtttgccctgtgtctgaacatctaccctatggtaccttccaggcagctatgggcattgcccacctccttgtcatggccctagagaaagaaggtgtaccgaaggcagaggccacaagaaagatctggatggtggactctaaagggctcattgtcaaggtactgtcagtctggagacctggaggtttcctgacaccttatagctcccaggaactggactggaagaggtctccaagaagtcaactgctcaaacagaatagagagcaaaatgagggcaatggcctaagctccaaagcaaaagattcatcccaaagtagccttaattgcttctgtccaaaagtttgtacaagtgtgtagatgtgygccccttctagtcttgtcccccaccacttcctgacttgcactagcctccagccacattaaatcatagtttccaaaagcagcctgctctctgtcttccacatctttacacatcttgttctgcctgaattgctctcctctgtttttccacatgccaactctcaacccttaaccccttcccagtttcctccttatcttctgatagtgctcaaatgttaccccctccaaaaagcttatttcctgcatctatgctccatacattgtacttaccacactgtagagaagttgttcctttccagtttccccactagactagtcttgatatcaatgcctggcacatggtaagtgcataattaatgtgtgaggcatgaatgaaagcatgaatgagagagaaacagtccagcttccagctagcacgtgttgagagacacaactgaaggacccctccattagagctacactcagtgctttaattcccagaatttcactaacatagaatgtcagtgagagatgaaaaattatggcagagatgggaacagaggaagtacataaggacattgaccaagaatggcagagatcctcagcagaactgagcttcctattgttccatatggggccagatttctgctgaaaggaacttagccttggagattcctcttcccacccacccctacgtctttccagagcataatctggccacaggtgtaagctgccagagacagccactcttccctcttatccatctttcaacatcatttttctcattccatcaaccctagccaaggagctctcaaagctgacatctttgcactggttcctatgaggccagctaatccaaagcagtcatcaaaagcatctgaacccatttaccagcacttatgccagcctgtcacctaccaacttccatttgaagaaatgtaaggaactggagctggttgggcatggcctgtcattctaagaccttcctggagcttagtttagtattattgacaggggaattaatggctcttataagcatattcaaattagctccctgaccctgggtggcacaggtccccatccctcaactgagcttggtgctggatgccttgggccaaagggtcttggtgagactcaggcattgcccaaaagcctttctgtcctggcccaggaagccataatcctaacagctcaaataaattctttatggattctccatatgtggtttgggttaaagaaacatgcacacacacacacaccccactctcacacttatgtcccaccataggttctgccaggaaatgtagtcaagaagatgggccccaaaacatctgacagctcaaaccaaagcatggggctcagcaggaaacgctctcagagtttccaaatgcatctgtactcctacccaacaggccatcacgaccacaactgctctgtgttccttttcctgtaggggaggagccacctgaaccatgaaaaggagatgtttgcccaagaccatcctgaagtcaactccctggaggaggtrgtgaggctggtgaagcccacagccatcataggtaggaggagggagggtacccactacccagcccagctaaccctcttgacttgcagatggagagacagaggctcagctaggaagcctaagtaacccatggaaacagctctttcccctatcccatgtgcaattcaatgccacaaacttttattgagtgactattgtatagaaaccacaaaactaaggcaccagatttagggctcagtgatgcagaaatatacaatgcagtgagtaagtgcagggctagtctgtctctctctctctttctctctgtcytttttttttttttttttttgacagagtttagctgttttgtccaggctggagtgcagtggtgtgatctcagctcactgcaacctccgccccctgggttcaagtgattctcctgcctcagcctcccaagtagctggcattataggtgcccgccaccatgcctggctaatttttgtatttttagtagaracaggttttcgccattttggccaggctggtctcaaactcctgacctcaggtgatctgtacccaccccactgccccccagcctcccaaagtgctaggattgcaggcatgagccaccacacctggcctggtctctctaaccacaatgagatgggcatttctctcccaaggcagaccctggcatctccctgtgtcctgaggagcagctcactctccatggaaatgcccaggaatgccttcacaggagcagcttaactggcagggacctgaggtggaccagtggtcccttagagatgaaaaggaggtctcaggcagctcaagcaggaagatcattttcccttctgctccttcagtccttgtggcagatgctgggcccaagaccgagtctttcatggtattcctagttcccccaccaccaccagcagaagaggaatgggttgtttatagagagcaggcatccccactacccgccttttccctgtaggtgttgctgccatcgcaggagccttcacggagcagattctgagggacatggcctccttccacgagckccctatcatctttgccctgagcaaccccaccagcaaggccgartgcacggctgagaagtgctaccgggtcaccgaggtcagcggggagtccttccttcccccggctgagaggacatagtaacaattacaatgagtaacctcatgagggtgaaaaatactcctacatcgctgatgagcaaactgartttcagaaagatgaagtaacatgcccaaggtcaaagagctaataaggagtggagctggctgtcaaacccaggtctgactccaaagcccaagttcttacatttgtgctatgctgctcaaggttcaccctaaataacacagagctttgaccagcacccaaaacctgaggcacttgtagactctaggccacatcctgtcatgtcctgggttggccccaccaggaggtgacaaaaatggtgctgtgaaccccatcacctttcagcagtttcttggctgctagataacasgtgagggctgagctttctggtcaaatgacaaatgtgctttaaatacctgccatgttctcagcacagtgctgggcgtttgggagaggatgaagaagggtccaacatttggaagataagaataggccactattattaccccaaaccaatctccaagttcatctctggttttcttcctgcctccagggccgagggatttttgccagtggaagtccttttaagagtgtgactctggaagatggcaagaccttcattcctgggcagggaaacaatgcttacgtgttccccggggtggcactgggagtcatcgccggcgggatccggcacatcccagatgagatcttcctcctgacagcagaggtatcactgtccttgctccctcaaatgcttgcagtagggtstgtgggttgacactgggtcctataccagatctctcttatctcttctgcccatctgccccaacattgccagtggattcccaaagtgcttaaacctcaagcatctctcatggccaccttgaagcttgacttcttcaatcacacatggggcttttgagggggaatggggaatagtggtgaagggtattagcaagaggcactgacagaggaggagacatgcctcatactgccccctgcgtcctagcaatgccatctagatgcctagacagaagagatgccatcaaagccacctgaaactgagggcttgtggaccatgataggtgatggattcttccagccacaggccttaaccaaatcactggggtaactggcggtagtaagccccactaggacagctttctgtaagggagggggtgggtgtcatacttgtttttttctccttggaggacccagatcttgagcactgatatgaagtattggagatgtacctattccaggtatcttactagataagcgcacaaaagagttctttactagacatgatgaaaaccatgaaagaatccattaagaatgacagcctatattcacactcatggttattgataacagttacagtggctgaaattaccaggtagttaccaagtgccaggcacttgacatttatcctcactctgacaaaagcaaggcatagaaatgtctctgttgagaggttaagctaatcaaagccatatacaaatattaaacatatttacacgtaacaagctccaaaggctctcctgtgacttctaacatccttctgcatttccttctcactgaggcactggtgaaagcctgaaaccaatgagacatgggtatggcttccacacagccctgtctggatccacttctgtgagtcccacagggagctacctcatgcaccaggtcccttcttactatgtctagtctttgagccctggctctccaaggctgtgcaaataatgtcttccaaaggcttttcagctkcccccagccccacgcacactacttatgactttgtgttacagttctctgttcctcttgtctgagtactctgtttgtctttcttctcattgctatgatgggtgttcttgtcctgtagctgtgggcagagctgtgtgaagtccccattggatggaaagagtcactttctgcttgaagtcagcctgaaagcaaagtcctctgttgagtaaaaacacaattgctacagtcctgcctatrtaataccatgggacatccacacatctgccccactacctccagtgctgtgagacagttcagctccawcatttcatgaacagtgtccatcaattacacaggaacctctcctggatctacttattatcacctgctgtgagcaagataaggtccctcccctataggagctcacattatggtcttcaaaggcctggcaagttatatttctgaaaagggtacttttagtgaagataatttaagttgaatttgattttcccatggaaaattaatatagactttaaggagatgtgcattcaccacctcctttcattgtaacaactctgtaaaataggtaaaattcttactcatatgtgagtttaagtcacttgctcaagatcgctggtcttgtgagcccaggatggctccagacaacttgactccctgctgaagagcattgccagtgcctaccgtcttagatgtgatcacacataccatgatatatctcttctcaggataacttttctagatgcatatctagccatggaaatcttgcttctctcttatcaatccatcttctataccttcacaaagagaatccttcaaaacataggtcaggtcaagtctctcccctaatttcagaccttcgtatggctccttggtgcatacaggataaagtccaaactccttcccatgatttccatacaaggcacttcatcaccaggccctcctttcctctccaacctcacttttggtgtctccctaacatcgacctaaccaatgtgctgttttcaatctcttgtccatgctctctctcacctcccagcatttgcatgggccattctctctcccctaattcatgctttgtccttcaggtatcagcctgtgacacttctgagaagcctttcctatacatggtagacaggatcctgccatcctccatgcctgtatgtcccctctcattgcactcacccactataattgctataatcatttgttacttgtccactgacaccagtctccataagagaaaagactatggcttctccaccatagaatccttccttatatggctcctcagcacctagcacagagtctagasactaaaagtgaggctgaagaggaaaggagggcccagtgatgaagtgccttgtatggacaccatgggaaggagtttgaaggagccatataaaggtctgaaattaggagacagacttggccttctctctgttttgaaagatatagtagagcacagtgaatgtatgactgaatgaatggaaaagaaagatggaagtgtgagaaggaggtagagagggaggcccacttccytaatatctgaaaacattgaggggagaccaacttcttrgccttgtcacttctgagacacacagttctcagagagcaccagtggcatttcccaagtctaaatttaacaccagaagcctcagtgggagtagattcagaaccaccacattaaagaggctgatttgcaaggctgaacaaactccagcatctgagcctggaggatcaggccctgtggcagatgaggcttaaccctcagaggcaagctctgaacctggaagggaagctaygggaggctctgttctcaggatgatgtgcttaggacatttattccaataaggtgtaagactcaatcactcactggaggagaggccttcctcagactgagaccagggctggaaggaagagctccaggaractgaacacaaagayataacatagcctagatggtcactcaagatggtaccaagcacgtggaaggaggctgggacccaggaagtgagggacccagggatccctatgcaacaggctggaccagccaagaggagatctcatagcctttgctttgcaggccacagatttattcatcttggctttagtgattttcctttggaattcagagacacttaatgttgttttaagcctcagccagtcttatagtacagaaaggatgtgtcctctcttacgcccaagcattaagcttccctggtaacagagtcaacagttggaactgcagtgtttgaccaactatgcagggtggggtgagtctctggggtaacgggttgggcttgttttgggaaggcagagactcagcttattcctctcggttctctccttctccccagcaaattgcccaggaagtctctgagcagcatctgtcccaggggagactctayccaccactcagcaccatccgagacgtgtctttgagaattgccatcaaagtaaggggcatcctacccctgtaatatgggtagtgaggctcaaccactttctctgtctgtgactttaggagggttaaggggatggaaactgtggagacactggatctccttgagctgcactacmtgtaacccagaggctgggtgacaaactctygtttgcagcttgagctccaccccaaacacccacccaggccagttctgggaaagctcctggatttcccctaatacaccaagcagaaaggtcatcaatgtctgtggaccagaatatgggaattttttagaaatgactcataagcgcccatttataagaaaggtcagcttgcatagcatcacggaaaaagctcaggctttggggtcccagctctcccaatcagcaatggtataatattggcccaatcacttcacttccctgagcctcagtttcctccttcttcaaagggccagtagttcctcactctcagaattctggagattggcagagaacagtgaaaaagctccatacccagtgctctctcagccagggtaaatctctttcttcccctttttctcagaatggctggctatggggtgatcagcttcatggaatattccagactataagactgtgcagagatgatgggttttcaaagaatcagaacatggtgcaataaggactggcccaacattgataattgttaaagctggataatagatacatgacagtttatcatactattatttctattagtrtgcatgttttacattttctataagttttaaaaataatttcagaaaatgcatygtacaacagcacacacacccatgagttgtctggtacagaatccagaatcaagcctcaagattaacagtccagctcagggtccagcttcaccccgtcagtttcttcctttgggcgatatttagattcacattctcgtgaagccaaatctaatacccagagaacagtgtccaggctgttcatccaatttaacccatattcaagtggaaaaaaaatcaggttctggacacatttgcctcttgtctaattttatcttaacactgctccagagaaaggtctctttactcccattttacagatgaggaaactgaggctcagcaaggataatatcagctctgaggacccacaggcctttggaagcaggcagaatttatgctgaagcctcttgaccctggctcagtatttattccactatgttaaagctgcctgtccagaaagaaagcttaaaatccttcctatccagttgtttcatgagccatactcatgaaagaaacaagtctggttccttaaggtgtattcccctcccccatgctcccaagcaaggatccttaagcaggtttccccttagatccggttccttagccaaacatgtttttctctaggttctcgactacgcgtacaaacacaacctggcttcctactacccagagcctaaggacaaggaggcttttgtaagatccctggtctacactccagactatgactcctttacactggacagctacacttggcccaaggaagccatgaatgttcagacggtctgaggcagtctcagaggctagtatggggctagatgaagcccagagtaacacccacaatataaatgggttccaaaatggcccaagtgaatccttgtcgctgtgttttttcttttaaactttctggtgtgagargagatgccaaggcatacagtgaataaaagccttgtctctgaaggccctgggagttcacttttctgaaccctcctctgagttccttcctaagcatttcttcaaccattaatcaccaactactggccaggccttgtgggaaatgcagaatctcatctagaatcctgcctttacagagctcgggatctagtggaggagattggacacaattcattttgccataagggagaaagtggtaagttcatgaaagaacagataaaaactgagggcagtcagaaaagggagaggatacttcctatggaaatgtaagagaaggcttcagggagagcagtgtttacactgagtcccaagaggaaaagatgggtgggagtcatggggagatgaagaatgtgagcacagccactagccagaaagcacagcccacccatcagggagtttagtccatgtcagccatacacacccttcaagtctcggcagtgtgtgaaggctgagtggctaacggcagctcgctaactattcaggtcactgccctgtgggttgttgagtcttagacattcttttttctaaaaggaaaaccagagaaatgtgggtggggagggtcagcctgccaagcagtgaggaggaagagaggcagtgagaggaacagcaccatagggagatctagggaagacttgatttcattttcctggctctggaacacactctggcttccatccttcactctctgaagtagttgagcaacacaaagcagttttcttagtgagtaatatcagtccatcctgggtgtttcttagaccaagttcagtgctagccttcatctctctcatgttcagcagagcccatatcataggggtgggggcaggagagagcttgcagccccctgaaattagatactgctaagatgttaagacatgtggagatggcagcttcctgcctctaatttcattgtataatcaaggaatcaataaatcatgcttagggtcctactcctgctgctacctcagcctcaggatctccactgccagcaacgaataggtcctatatgaccaactctcaaggacaggctagatggactattagacttctagaagagtaattagcagagataccactcacttcttgctcaggtcttattcttccaagaactgcttccttggtgctrgtgctcagccaagaataycctgagaaaacatccctcctctatgatccttgggatcatagagaatgaaaaactattcagaagagagtttgaagagtgaagctggaatctgaacaccatggagtttttgacactacctttttacatcatgtcccacaatttcctctgtaycgctgctacatatcctttataatcaatatagtagaaaagaaaaacaatagtagagaaaacaaatgaaagcaaaataggttctttgaaaagatcaaataaattaacaaactttagctatactaaccaagacaaaaacaaagaagacacaaattacacttcctttgttccagccacactgaacatcttgccagccctaagcacatgtgctttcaagcctgtgctgatactatccatgcttggtctctccttctgggaagtccttcccttccctttttttctctttactgattaaattttagttcactctagctttctgcctggaaacggcattcatccttggaattcaaatgcaattggctctatagagtaacagaattaataactaaattagaaatcaataaacagaaaactatgggaaattccaaaatattggaaaacagtacatttcaaaataacccatagatcaaagaagaaatcacaagccaagttatatatgttgaactgaatttttaaaatcatatcaaaattaataagatgtagctaaagcagtgtttagagagaaactttatagctttaaatgttgtcacggttaattttacggcaccacagggtgcccagaaatttgatcaaatgttattctgggtgttgctgtgagggtatctttggatgagagtaacatttaaatcattaaactaagtaaagtagattgccctccactaattgccttcatccaattagttgaaggcctgaatagaaaaaatggattcgccctcccttgagtaagagagacttactcctacctgatgcctttctaactgggatattggctttttcctgcctttagacaggaactataccatcatctctcctagatctccagcttgctgactcaccctgtagatcttagaatttgacagcttccataatcatgtgagccaagccagttccttataataaatcaacagagagagagagagaaagatcttattggttctgtttctctggagtaccctgactaatgcaaattcctatatcagaagagaaagaaagagagaaaggaaagaaaaaaagtctcaagtcaataatttaaacttcctccttaagaaaatgggggtgggggaaagcaaacaaaattcaaagcaagcaaagattagagcacaaatcaatatacctataataagtaaagaaattagtaattaaaaaatctttcccccaagaaaaaccaggtccaggtggcttcattggttggaatttatcaaatacttaagtaataacaccaattatgcagaaactctttcagaaaataggggagggaacacttcccaaatcattctatgatactagtattgccatatcaaagccagataaacatatcacaagaaaagtacaggccaatatccttcatgaatatagatgaaaaaatcctaaacaaaatattagcaaaccaaattcagcaacatgaaatttaaaaattacatacaacaaacaagtgggctttatcctcagaaacgtagttttttaacattcaaaaattgttcaatatggttgttcaattacattaatagaatgaaagacaaaaaaatcatatgatcatgccaatagatacgaagaaagcatttgaaaaaaaccaacgcccatttatgaaaaaaccctaaacaaagtagaaatagaaaagaacatcttcaacctaacgaaggacatctataaagagccaaagataacatcatatttaatggtaaaagaatgaatactttctccctaagatctggaacaaggcaaggacgttgtttttaccacttctagtcaacacggagggtgtttagccagtgcaatgaagcaagaaagagaagctaaaggtgtcaagattggaaagaaagagtaatactgccttgattcacagatgacctaatcctgcatgtaaaaaacactaaagaacacatacacattcattcattcattcattctctctctcctctctctctctctctgtctactggaactaataaattagttttgaaaggtcaccaaatacaaggtcaacattatttctatatgctggcagcaaatgatctaaaaataaaattaagaaaacaatttcatttacaactgcatcaaaaagaaaagatacttagaaataaattttagaagtgcaagtatagtataccaaaaactacaaaacattgctgatagaaattaaagatctaaataaattgagagagattctttgttcatggatttgaagactcaatattgtcaaaattgcaattatattcadatctataaagtgaacactatacctatcaaaaccattgtagggttttttggtggaaacttacaggctgattctaaaatgtttatggtaatgtaaaggatctcaaagagtcaaaaaaattataaagaagaacaaagtgccctattcaatgtcaagaacctactataaatatacaatgatcaaggctgtgtggtccaatagcaaagacatgaaattaatctaagtttcmatcagtcgatggctggataaagaaaatggataagaaaatgaatatatatgtgcaatggaatactattcagccataaaaggaataaaatcatgtgttttgcagcaacataaatagaactggaggcccttaagtgaaataattcagaaagtgaaatgccatatgttctcataagtgggaactaaataatgtgtacacatgaacaaagaatgtggaatctcactggagacctggaagggtrggagagtggaagaagagtgagggataagaatttacttaatgggtataatgtgcagtattttggtaatgattacactaaaagtccatacttcaccactatgcaacatatccatgtaacaaaactgcacttgtacaccttaaatttataccaaaaaaggactgtgtggtcatataaataaatgaagcagaactgagagttcacaaataagtttttacctttatggcaaattgatcatcaattttaatcaaatttactaatttaatcaaaattactaaggtaattcattgggggaaagagagtcttttgaacaaattgtgctgaaacaattgaatatccacatgcaaaaaaaagttaacttagacacctcacactaaacacaaaaattaacctttacacatctcaaaccaaacaaaaatcaacctgaaatggatcacagacctaaatgtgagagctaaaactgtaaaatttctaagataaaatatagcagaatatctttatgacttaggttgaggagagttctgagatacaactttaaaagcatgattcataaaagaaataaattgtacttcatcaaaatttaaaattttgcactttgaaacacttttttttgggagggaaaaagacaagcagcagactgggagaaaataattgcaaatcatatatctgacgaagacactggatccggaatatataaagaactacttcaacttaataagaagatgacaattcaaattttaaaatgagaaaaatatttaaatcagcattttatccaaaaagataggtgaatggctaacaagcacatgaaaaatgtttaacattattagtaataagaaaattaaaaccacaatggcataacaacactcaccagaatggctataataaaaaaaaaagatctgttggtaagaatgtggagaactttgtctcctaagcactattagattaagggagagttcccttgccttgtaagtcttcactctaactccccagcctcccatacatagccccagtattcagcaagtgtcatttaagagagtggatgctgtggttgcaccacctagatcctgccttgggtctgaaacactcattcctccagatgccattgtcagctgagggccacmagctgcatcgctctctaggaattgccctcgactgaaggtgaatgcttcacccaagattatgccatcatccccaagggaagcctacaggcaatgactggttgattcaagggcccaaaggccagattcctagcctcaattgagaacatctctaaatagccatcccatcctcagagctccctatgagactggctgaggctactgttgcaactgctatgtatcaccattcaacttcttatgccctatcctgtttctcttgctcccccatagatgttctctgagaagacaccccagtaatcctctggatgygaatctcagattcagtgtctatttcctgaggaacccaacttataacacgtagaagaaactggccaaagttcttaattttccaatttgttgcaccagccccacgtgaccaccaaaagcttttctgggtttccctttccctcaggagagaccctcttcacagaccaagcttgatccttattagtccatgtccagaatcagtaaatgtccctagaaaataaaatggccacttacctcaggaggactcctccctctctggaattcccattcacctagtccttattgctttcatagctctcacatatctttaaatatgatctttataatttttccatctttttctagttgttgcaggcaaagttttaggctgccatgacctactatatcctatttagaagtggaagtctctagagagattttcaaaattacagatgtgtggatattagcttttctcctaatttaattgaattgtggtgagagaaggtgttctgtattattcaaatagcttaaaatttgctgaaatgggtttataatcaaatatatggtcaaatttaatagttcatgtactcttataaatatgtattctcccattgttggatgcaatgccctttgtatgttcatgggatcaagtttgttgactgttttgtgtaaatctatatgcaaaatcttgatttttgtctacttgatctgcttctgaaagaggracaataaaacttcccactgctacggtaaacttgccaattttccttgtaattctgtccatatttgctctatttaccttggaccaatgcatctttaccttttaacaaacacttactaaattaaaagtcctagaccatatgttctgcacaagatcaaaacaacattttactagaaatatttcatagtctcctctcattctgtcttcagggccctctgtgttaagttacaccccaaccgtaaacattaayggtaaggcctttttatttgaagacattcaacacatgtgcttctgtacaacatggattttgcatgaactttcaatcagatgtcgatttttcaaaatggaggttttcataacaaaatgagattagacaaagacatcaaataaccacaagatgtgtaaagaatccaacaaaatcacctgttggacaaacctgatgtatactgggacccgtgtaggatggtaaacatgaagcaggcaaataatcatataggccctacttgcagtgtttgatatgacttaagggatgagctacataaagttatagttcctggagttttaattctgtatgatactaaaaatatacaaattttgtgctggggatcttggcatctaatctctagatttcttatgtattttttctggcataggaatagcactaagccaaacatagaagttgcatttctgttaaattcgtggctttttkatatccctatggaagcttcatcagacttattcactaagcccatatgttggctaaaatgtacaataaattaggtcttttctcaagtcccactttcaaggcaatagcatcaggcagccaggtttattgaatacaacagttgtttctgtgaccactggagtctttgaagctgagaggtgacagcgtgctggcagccctcacagcccctgctcactctcagcgcctcctcggccttggtgcccaccctggccacgcttgaggagcccttcagcccgccactgcactgtgggagcccctttctaggctggccaaggccagagctggctccctcagcttgcagagaggtgtggagggagaggcgcaagcgggaaccggggctgcgcccggcgcttgtgggccagctggagttccgggtgggcatgggcttggcgggccacgcactcagagcagccggccagccctgccggccccaggcaatgaggggcttagcacccgggccagcagccacggagggtgtactgggtcccccagcagtgccagcccaccagcgctgtgctcgatttctcgccaggccttagctgcctccccgcggggcagggctcgggacctgcagcctgccatgcctgagcctccccacctccgtgggctcctgtgcggcccgagcctccccgataagcgctgccccctgctccatggcgctcagtcccatcgaccacccaagggctgaggagtgcaggcgaacggcgcgggactggcagccagctccacctgcggccccggtgcgggatccactgggtgaagccagctgggctcctgactctggtggggacttggagaacctttatgtctagctcaaggtttgtaaayacaccaatcagcaccctatgtctagctcarggtttgtgaatgcaccagttgacactgtatccagctactctggtggggacctggagaacctttatgtctagctaagagattgtaaatacaccaatcggcagtctgtatctagctcaaggtttgtaaacacaccaatcagcaccctgtgtctagctcagggtttgtgaatgcaccaatctacactctgtatttagctaatctagtggggacatggagaacttttgtgtctagctcagggattgtaaatgcaccaatcagcaccctgtcaaaacggaccaatcagctctctgtaaaatggaccaatcagcagggtgtggatggggccagataagagaataaaagcaggctgccccagccagcrgtggcaaccwgctagggtccccttccacgctgtggaagytttgttcttttgctctttgcaataaatcttgctgctgctcactctttgggaccacactacctttacgagctgtaacactcaccacaaagatctgcagcttcactcctgaagccagcaagaccacgaacccaccaggaggaacgaacaactccagacgcaccgccttaagagctgtaacactcaccacgaaggtctgcagcttcactcctgagccagcgagaccaygaacccaccagaaggaagaaactccgaacacatccgaacatcagaaggaacaaactccggacacgccgcctttaagaactgttaacactcaccgygagggtccgcagcttcattcttgaagtcagtgagaccaagaacccaccaattccggacacaaagcgaagccgcatttgagaatgatatttctccaaatacaaaagttgcttgctgttaaaagcgccgtgccgtttatctctaataaaccgtactgcatcttcgtttttcattccactttcaattaatgctagggcaacaagcactggagtcctcccaagacctgcaacacagtgaaggcaatacaacaaccaggttcttcacgaaacttaacgtctagaagacttaagcagtgatcaacaatctggttggatggtgatgaaccatcatcaaaagcccaatccagaaactggattggccttctttctccacaagagcagggtcatcagttgcttcacatactcttactattgtggtaaccccgtatttcttaagttcttctaaaaatctgtttaaggtcgaattggttgggttgtgtataataagaaatctcatgttcccgtatgtgacttccactggagctgggtgattcattggagccatgttaatttagttaaaaaaaaaaaaaactgatatggttacgaaaaaaattaaaaatttttgaatacagaaatgatgtcaagaaactgaagtctacgccaatatactccacttgaaattcacagagctttgaatatgaasttggtagtgacaggaaatgaaatgaacctaccaacaagaagctgcggttcttcaattcagtaattctgggccaatggaaaggaagtgcaccaagggttaccccatctaggtcagaactcttgtaaaatgctctaatgatctcarttctacacttctgtgtccaggtgacccgctctgtgggggcttcttggtggggcagtaatgactttccaccattcacttgtcctcataaagttcgtgctgaacctggcagtaatctccagggccctttagaaactctataaatgcattatcaagaacaccacagaaaggaatatgtttactcacgaacgatggtggcctaaccatacagctgggcccgcggcggccgcagcactgcccggagcagccgcagccgcagtcgtggcggggcagcggcggcagggcaccaaactctaggaggaccagcggagcgcctccactgaggcaatacgcacacgcscaggtgtcgttgcgtcccaagtcgtctctttcctagactgcgcgcgacgcaggaaccccttcaccaatcgtggttgggcggaccaatgaggacgtcatcacggccgccgccgacgggagccccttgctgaggcgaaggaacgctggatgaatgctgagtttccttgtctcccactagagaggagaggggctgaggagcgacgtgggggtggtgggataggaagcctggaagaggctggagagaaactgaaggaagacaggtaaggtagcgaaaggtttcccagccattgactctgactagtgtatctttttctacctgcttcatgtttaagtatgtctcttgggaacaacataatatatggagctttttttccgcatcagtccagtctgacagacttttttagctgaaaaagtgcacgtatgcatttttgccctcttattttatgctatttgacccatatttctatattttttaccttttcttgacctcttttggattacgattttccctctactcttttggaagttttcattggggctaatacttccttagcacttattttagggtaagcactgttcaaagctttatataaatgtaatacaaaacccctatgaattagatactagtgtcatttctactgtcctgactttaaaaacctaagcacagaacggtaatttgcccaaggtcacacagctagtaaatggcagagatgagacttttttaaaaaataattttaacttttattatagatttagggggttcacgtgcacatttgttacatgggtatattgcgtgacccagagtatgaatgataattctgtcactcagatagtgagcatagtacccaagaggtaattttgcaagggctaagatttgaatcccgcgattttggctgtggagtctccctctctaatacagatggtctattatataccctgtttctgttcttttagtgcttaactaacttagaaaaagtcaaacatggttcagaatcttttcctgcctcttgaaggaattcagcatgctttaactattaatgtcgtcaagcatcttaatcttttaacgccacaaattggacattattgtttgtacaaatcaatgtttgtttacatttattcatgttatcagtttctttgctcactattccttcttggagctccattctttctgaggttactttcttttatccagaagcatttttttggagattcctttgggtatcgatacgttgataaatgttttatatatgctagaaaatctctcactgttgaatccatttcccttaatattagtaaactgtattttgtttttttcttcaggtttcttttttggcttttttctaaaattcttttattttcccttcattgttaaaagttttgctgggtacacaattcttcactgacattttctctcagccctttgaaggaaagaagaaatagggctttattgcaaggggccatgtgaaggtcaggaagcaaagtctagacattttagaaaattgtaacagctgttagagaagaaacctgagaataagaatatcttcagaggactgagacaaaatgtcagtatagaattgtgtactcagaaaaactatgtaaaaatgaaggcaaagtaacagaattttagggaaaaaaacaaaaaagaaaagtgaaagggaattttcaaaagcaaattaaatcctttacttttgatagcctaagcctgtaaaaatggtgaaggaaagctatctagaacagggattcttggcctgtggtccaggggttctaggaaacttctaactgcatgcaaaatgttgtataggaatatatacctgtttttagaagaagagtatatatttttcatcagattcttagaagagtccatgactgtccaaaacattgaaaaccactgaaatagggaaacctttgatacattaatctggtctggctgtgctgtatttctggaaaagacagaacttgatgatagcaagtcggggctaattacagagttagactaatacaagaataatagttaacaatgaggatcattgaagaagatccaaattatgaagacttgctcagaaatcagctgtttagtgaaggactataataaagtttgattcttaaaatggttgaatgatagaaaacatattagacctcatatctatataattcatataaccatgcctccatctcagtcttgatagactggagcacacagccttgacatctgttgtcatgaccccttcttctcttcacctggctttttcccgttggtcattaaaattcagcttgggcttcatctcctcaaaaagctttccctctctgtgccatggtaaacttaccagaaggaatctaccttgttcttctaacaaccaatgcacaataatattaggtttttaccttgttatacaggggttttctagcttttaccttgttaaaccagaggtttcacaatggtatgaaactggaaatcattaacaggaggaattttggaagattcacaaatacatggaaattaaatatgctcatgaacaatcagcgtgccagtgaagaaattaaaagggaaatctagaagtatcttgagacaaaaaaaaaggaacacacaacataccaaactttatggaatgcagcaaaagcagttctaagaggaaagtttatagcaataaatgcctgcaccaagaaagaaaattacaaataactaaaagttacacctctaggaaatttctttaaaaccctaagcccaagttagttgaaggaaagagataataaagatcagaccagaaataatctaatctctattttatttctgctctggagattaaaaaaaaatacaaaagaaactaaaagttcatattttgaaaagataaaatcaaacagcctttagctagactaaccaagaaaagaaaaagagaaaagacccaagtaaaatcagaaataaagaaatcattacagttgacaacacagaagtacaatggatcatgagagactattatgaacaattatatgccaaaaacttgaattacctagaagaaatggatatattcctacacacatacaacctgccaagactgaatcatgaagaaatagaaaatctgagcaaaccaataatgagtgaggaaattgaatcattaatacaaagtatctcaccaaagaaaagcccaggaacagatggcttcactgctgaattctaccaaacatttaaagaagaactaatatcagttctctacwaactgtctcagaaaaaaacaaacaaacaaaaaaacgaatgggagagaatactttcaaattcttttcaggaccagtattaccctaataccaaagccacacaagcacatcacaagaaatgaaaactacaagccaatatccttgatgagcatagatgcaaaaatcctcaacaaaatactagcaaaccaaatccaacaacacattaataggattattcaccatcatcaagtgggatttatccctgsgttgcaagaatggttgattattctcaaatcaataaatgtgatatatcacatgaacagaatgaaggacaaaaatcatatgaccatctcattaaatgcagaaaaagcatttgacaaaacatcctttcatgataaaaacactcaacaaattaattacagaatgaatatacttcagcacaataaaggccatatataataagcctacagctaacattatactcaacagtaaaaacttggaactctttcttctaagatctggaccaaggatgtcaaggatgtgcactcttgccacttctgttcaatgtaatattgaaagtccttagagcaatgaagcagaagaaagaaagaaaagacatccaagtaggaaatgaagaaataaaactactgttatttgctgacaacataattttgcatacagaaaacctaaggccaagtgtggtggctcaagcctgtaattccaaccctttgggaaaccaaggcaggaggatcacttaaggccaggagtttgaaaccagcctggtcaacatagtgagaccccatctctacaaaaagaaaaaaaccctaaaggttttaacaaaaagccattagaattgatcaacaaattcaggaaagttgcaggatacaaaatcaacacacaaaagtcagtaacatttctttacattaacaatgaactttccaaaaaagaaatcaagagaacatatcatttacagtagctactagaaataaaatactgaggaatatgtttaaccaatgaggcgaaagatttatacaaagaaaactgtaaaacattaataaaagaaactgaagaagacaaataaattgaaatatatcccatgttcatggactggaagaattaatattgttaaaatgtccatactacatgaatgatgtgcagattcagttcaatatcaaaattccaatgttatttttcatagatatagaaaaaacaatcctaaaattaatatggaactacaaaacagccaaggcaatcatgagcaaaaagaacaaagcttgaggtatcacactacctaatttcaaactatactacaaactgatagtaattaaaacagcatgatactggcattaaaatagacatttgaaccaatggacagaataaagaacccagaaatgaaaccatgtatctacagccaattaatattcaccaaaagtgccaagaatatacaatgggaaaaggacaagttattctataaatggtgctgggaaaactggatatccatagacaagagaatgaaattggacccttatctcacaccatatacaaaaatcaactcaaaatgaattaaagacataaacataaaacctgaaactgtaaaactactagaagaaaacacagggaaaactacatgacattggtctgggcaatgattttttagatttgacccaaaaatgcaggcaacatttgcaaaagtggacaaatgggattacatcaaaataaaaaattgctacacaacaaagagagcaattagtagagtgaagagaaaacctacagattgggagaaaaatatttgcaacccatacatatgataagggattaatatccaaaatatgtaaggaactcaactctattaaaaaaaaaaaagagacatgggcaaggaacctgaataaacatttctcaaaagaagacatgtgaatggctaacaaatacacaaaaaaatgcccaacatcactagtcattagagagatgaaaattaaaactacaaatagctaccacttcacatgtattagaaaggctattatcaaaaagataaaagataacaagtgctggctaagatatgggaaaaagggaacccttgtacaccgttggtgggagatataaattagtacagccattatgaaacactgtatgaagattcctcaaaaaactaaaaatacagttaccatatgacccagcaatctcacttctggttatttgtcccaaagatttgaagtcaaatatgaatatatcaaaagagatgttcattgcagcactattcacaacagccaagatatggaatcaaccaagtgtccaacaatagatgaataaataaagaaaatgtggtatatatacacaatggaataatattcagccatgaaaaagaatgaaatgctgtcatttatggcaacatggatggaactggaactgagagaaataagccaagaacagaaagttaaacactgaatgttctcactcatatgtggaagctaaaaaatagttgatcttaaagacataaaaaggatatgtggatagcattggagaatattatgctaagtgaaatacaccaaacacaaacaaataccacatgttctcatatgtggaatctacaactcatataagtggagagtagaatgatagttcccagagggtgggggatgggaggaatgacgagatgatagttgaattgtacaaagcctcaggaaaaaaaagtttgatttttttttttttgagacagagtctggctctgtcactcaggttggagtgtggtgacatgatctcagctcactgcaacctctgcctcctggattcaagtgattttcctgcctcagcttcttgagtagctgggactacaggtgcatgccacaacgcccagctaattttttgtatttttagtagagacagagtttcaccatgttggctaggctcgtctcgaactcctcacctcaggtgatctgcctgcctcggcctccgaaagtgctgggattacaggcatgagccaccacgccaagccaactttgatatatttttgagatctgttgcacagtgtggtgaatataatgagcactgtacatgtcaatatcactaaaagaataaattttaaatattcttatcacaaaaagttaaataaggtgatggacattttaattcacttgatttaattattccacattgtattcaaaaatcacaatatcactttataccccataaatatatacaacataaatattacaaataatttgtcaatatataatttttaaaaatagtttttaaagggtctgactgtagtactgactgctacctatgacagtaaattgtaagttcaattcctccagtgaaaaggtctatgaagttaaatctgctcacctgaacataccaaaattaacttttttttctttaacaaggaattcttttttttttttgagacagagtctcgctctgtcaccaggctgcagtacagtggcacgatctcggttcactgcaatgtccacctctcaggttcaagcaattctcctgcctcagcctcctgagtagctgggactacaggcgcgtgccaccacacccagctaatttttgtatttttagtagagacagggtttcaccatgttggccaggatggtctcaatcttttgacctcgtcaaaagatttgatccacccgcctcggcctcccaaagtgctgggattacaggcatgtgccactgcacccggccagcattctatatttttaaaatatattagtacaacactattatagtaatttattatatattagaaacaaattacttcaagggtgcagcagatatagattcaggcaggtcaggcagtcttggggaaagcctattgttttaaatattggttaatgatgattggccctccatagaatgattttttgaggaaatgaaaggcagaaacggagaaagattagggaagacgttccaaaaaattgtgatcatcagcaggtatgcttgttttcatagaaaaagataacattagcaacaaaatttgcccaatatcagcttgagtgaatattttctccacaattattcagggctcaacacattcctattttgtatttgtagggcaaaatgaaagtttaaatgttcacaaacatcttcccacaaaaactttcccttatttcccaagggagagatgtggcgggcagaaagcaaatagtctaaaagacatccttcttagcttttgtatttcagaaatctagacttcactctgttttacttcaattggtcagacagggcagggagaggagaagaaagtgttgtacctgagcaagttagagaaaacgccacactttgagacaaattaagagtcggtttatttagccagtggccaagagacggctaacgctcaaagttctctcagccccraagaaggggctagattttcttttatactttggtttagaaaggggaagggggtctagttaaaacaattttacagaaataaagtaggcaaaaagctaaaaggataaatggttacaggaaagtaaacagttccaggtgcaggggctttaagactattacaaggtgatagactcagggctttgggcgttatcagtcagacgaattcctgggaattgtggatattgctcgccacagtatcttatcagttaattgcattcttggatgtgcagcttgcacaagttaagtccttcaggaaggggctgccagtgaaagagccaagatagagtctgtctggctctcttagctaagggagagtcaattcacgtggaaacaaggctaggtgattaaaggaaaagggagagtctaaaaacagggttagtaaaaacaaggttgggcattacaaaagtatgaagataaacgaagaaagtttttagttgagaacagccataccttaactgaaagtcagtcctctgacagggagttaagtcctcttgaacagcacctacagcttaagaatgaatgcaagtgaagtagtgggagactcacctcacagtgcacagttactccaagggtgtagaaatagctggacaagggaatgatatcttgggaaggcccactaaagtcccaggtatgtcatcaatgagaaaactcagggagcattgttctggcctcctgggggtaaatagtctaacccatctctgtgatattcacacatatacccctctggaaaagtctaggactgggggaagagggaggggtaaaatgtaccattatgaattgtcatgcacagtcaggcgcttaaaaaatatttattattgccactattcattacagatgaaaaaagttttgtacacaaagtcatggagcagcagcagggctgggtcagcagcaccccagcagccataatgaagctggatcccattcccagcccctgtgcagcaggttctagccctcaggaccattcagacaccttcactgccatcagaaactagtataggaaataaytgggggtgggaggaaagcaggagtgaattcaataagggcttaacaagcaatctaatgaaagcaccaaacctaaacaatgatttttttctctgaggtaaaaatacgcagtttcacaatcacccccaaacaygtaaaagataaaaactttccccrggaaacgaagagccaaactttgagttttacacaagcaaccgggagccaggcaggaacttgttcaggggccacaggttgctctcgcccacgttggaggtgcgcctctggcattgcttgcagcgccgatacttctcacactggtctaggagaaacagcttgtctgaagccctgaggagaggagagcaaatgccgatcagcaggttcctggagttcctggaggcccaacttggaagctggtatggcaggaggtacacaaaagaaaagtgacaccttgcgttctctgcctgtatgctgcagttcaccccatcctggcatyccctgcttccagacttctgctggcttgtcgttctctactaaataaaaagccrcgacttgtgccttcacaacagtctgaccctacccctccccagcctcaaccacccaagcccacagagaacttgccgaaggtcacacagccagcagacagtggctccaaagcctctctgttgactgctttcccacgtggattacacctctacctgttgagctcctgggagacagtatttgagaggcagatcaaccattaagttgctggttatcagctaacaacagcagagagttgagaggacttacaatgaactatcccaggaggccagaagcctctggagagttaagggcaggagagggagtggagacaaagaggaagacaaaagcaactaaaagcagaaataaagaggcagtagtaactgactttcccctttgatggtttttcttcgttacgcaaaacagtccctcatgtgctcctctaccccatcaaaatttctccatgggkggatttttttttttttttttgagactaggtctccctctgtcaccagcctggagtgtgcgatcacagctcactgcagcctcgacttcctgggctccagcgatcctcccacctcagcctccagagtagctggaatgacaggtgtgcaccaccacacccagctaatttttgtacttttggtagagatggggtttcaccatgtttgctcaggctggtctcaaacttctgaactctagcaatccatctgcctcagcctcctaaagtgctgtgattacaggcatgagccatggcatccagccagaattctgtttaagaaggatgatcggccgggcgcggtggcttacgcctgtaatcccagcactttgggaggccgaggcgggcggattgcgaggtcaggagatcaagaccatcctggctaacacggtgaaaccctgtctctactaaaaaacacaaaaaattagccaggcctggtggcaggcgcctgtagccccagctagtcgggatgctgaggcaggagaatggcatgaacccaggagacggagcttgcagtgagccgagatcgcgccactgcactccagcctgtgcgacagagtgagacaccatctcaaaaaaaaaaggattatcaagggcagtcttaaaagaaaaaagaataaactaccttggaagtgagcaggggaagacctacctggcttggtaatggaacagagtatcatgtgctaactgcatacatatggactttggttttacttttgctttattttctttttgtgccaaccaattccttcttgctactgctgcgtgctcaagtctctgtccacacttggcctaggtcctcagagaagtctgctccacgatataccaggagtagatttgttagcctgccactcaacattatttcctgtgtctcctcagtcctttatcaccatgttggccaagcactcttcctagacacaactaaaatctccctggcattaatctcactgacttttacctgccttcccaaatcactgagaaaattgaaatccccaactgccctttcctctccttttctctaagccaaatgagtccacttctcctttggaacctattttccacgtcatcactcatactttcattgtcacaaaatatgggttctactcattagaaagacaggtgagaaatgctttacaagaaaacctaaaaggaaaaggagagttacagatcaagatccattctacaaattttatccatgattaaaaactgataattggcaatttaaactattattttggtatatttgggttttaataacttgattgtatagacttgatctgtttcatcacatttttaacatgctataaaatcataccttacattcgtattttaattttttttcaagatgtaatacaacagtagtgatgtgaatatttaagctgaggattgggcaggcatataataatttcagaaagatgctcttggttggctccataataggcatcttacttttccaattgccaatcttacaacccctgaccctgctcttaaataacgattctctaagccttgaaaacgttcagattggaaactcactccccctacttccaaatagttatttccaaagagaatcttcactctccacaaaaagcaaataaagccaccctaagcagaggcaaatattagagcacggttagtaaatacctagcatacaactcagcattctccaatcccatgtctgtaacagacatttctaatcaatcacggcagtatttcccatggaatacagacttgctttctccacaaggttctctaggcagccactgctaatcaagtggagttccacttgaaacctgttgctgtcccacaaggagcaggagaattttggggttccaatcaggcattaccgttcaaaagccttgtcctccaggtctcgctgcttcttcatcgcagcactcctttcccagtcctcctgtaagcattggttgactctatttactcgctccagctcagcggttctgtctgccaagtgcctggagagaaaagaacagcctggctccataatacttggaagagcatgcaccaaatttgggagccccattccttttatgttaaacaaaaaaaaccttctggttttgttcactactctgaaatatactaaaaagcatgaacactgtaaaagcatactgaaattcctagctctcaaataatttatggrtcaaaggtcttttatcttcaatcctggtttgatttaataggattgaaacctttttccagttaacaacttcaacctgtaaaaccattaatttcctttgaggctaatttaacttatctgaagaatcatcccaaatggatttcctatactctgtttctttccttttagtccagcctctcagctgccagtactcagcctaccagtcactgcagacatattacaaggcaaaatagatagrtatacaaatgaaagtctacaaaaagagaaaataaacacaagtgactaagcaagggaaaagaaaatagagaaaacattaacattgtgaagaaggcaagaaaataaaacaggaatgtttggtgaaggccatgtcatcgaagaagtgactgcagtataatctctgtcttcaaagggagatattcccagtgttgtgtttctatcactggtctccaaacactccatcactactgttgtgaatcaccttaagcctggttctgattatgtgtctatttcttgctaaactgaaacctttgctgtcagttctcactgaaatctagaaggagcttcacaaaatgtaactgttgatgtagcctgctctgaagggctttgtgttacaggtaccaacgaccactgggtgtcaggatcctccaataaaaatcagttaatgtcctctatactgtctcactttttccttaaacggcacaccttttcatctaacaagcattgattgaacagctattgtatggttattataaagactaaatgatacacaggaagtgccagtgcctatcatgtaactggagctcaatgactaaagagtacctattacttttttcataagttatttttcttttcgtagattttttttttgtggtttaaaaaaacacataacaaaatttactatcttaaccatttccaagtgtacagttacttagtgttaaatacattcatgttatgcacccaatctccagaacgccttcacgttacaaaactaaaactacacccattaaacaactccccatttctgcctcctctagcccttggcaaccaacattctactttctgtttctatgaattttacttctctggataactcatataagtggagtcatacagtattttgtctttttgtgacttgtttatttcacttaacataatgaccttgagggtcatccacagtgtagcatgtgttagaactttcttcctttttaaaagtgaataacaattccattgtacagtgtatatatatacccacactacattttgtttatccattcatctgtcggtggacacctgggatgcttctacttcttggctgttacaaaaagtgctgctatgaacatggctgtacagatatcttttgagatcagctttcaatttttttgaatacatatccagaaggggaattactggatgatacagtagttctatttttaattttttgaggaaccaccatactgttttccatagcaactgtaccattttatgtttgcaccaacagtacacaaaggtttctacttctcactaacgcgtgttattttttttcatagtagctatcctgatggatgtgacatggtatctcactgtgattgtggtttgcactttcataataatttgtggtgttaatcattttttcatttgcttgttggccattattatgttatttttttaaggataggttaaaataattttaaatgcccagaaagtaagaaaatgaggcagagattgtgcaggggacaactagcattctcacaacattgctgagaagcragttgctatgccttcttagaaatgtaactgtcagtttctggtaatatttcaaatgtatcatacattagccaggagtggtggcatgcacctgtagtcccagctactcatgaggctgaggcatgagaatcacttgaacccaggaggcagaggtttcagtgagccaagatcgcaccactgcactccagcctgggcgacagagtgagactctgtctcaaaaaaacaaaaaaaaaaaggaaaattagatgtaccgtacattggacacagcagccccacttttgggaatttatctgatagaaacaaaagaaccagtataaaaatatatattaaaaatgtttaatacaaaatatctggaamcaaagtgaatgttcatcaataatgcaaaagttaaattattatacatctatattatagataatatgctgctattaaagaagaatgaatctcatatatatgtactgagttgtatatgacattgctaggttaaagaaagattagtttgcagagtaatatataagatctcatagactatttcatttacaaaagtagaaggaaaaatatrtgtgcatattgcttaaaaaggaaaaattgtttaaatttttttataaataattaaggttaatatgtaacctacttttaaattattttttacaaaaaaaatttaaaaaattttcctatttaagcaatatgcacatatgtattggctacttagtaggggagattattaaccttttttttttttttttgaggcaatctctgtcgcccaggctgaagtgcagtggcgcaatctcagctcactgcaacctctgcctcccaggttcaagcattcttgtgcctcagccacccgaatagctgggattacaggcgcacaccaacacgcccagctaatttttgtatttttagtaatgacggggtttcaccatgttgcccaggctggtctcaaactcctgggctcaagtgatctgcctgcctcggtctcccaaagtgctaggattacaggcatgagccaccgtgcccggctaaccttcaattgacttcttttaatgagcatgaattgttacttttgaaaataagagcaaaaagaaaaaaaacaagtataaatagcttagcagtcctgtctggatcaccctgactaaattatcccctctgaaagaaagtggccttctatgagtcacaagacaatctgagatcacatgttaagatgaaccagagaaggaccagggagttggaaaagataagggaagtgagagaatctgccataaccagtaaagaatatgtaaatagaaaacaaggatctgaccaatacagaaacagggatgtgttcagagctttacagtttccgaaaatgctctcacatacataatctcatctaattctcccagtaaggttaggaggggcagatgtgattatccttctttctcatatgaggacaataaggctcagagaccttacatgtgatctggcccaagtcatacaacttaaaagtgacactttaaccctccaagtttaggaaataactagagaagccaacagatagaagcagaagaggaagtagcaatagtcttagcaacaaatacagagggtcccatatctggctatggaaagcacactttgcttcccactatgggacaagtgatggtggttctgctgttataaaacagaagctaaagaggagctgaatgcttacctaagggaataaatttttttaaaaaatcagtgggaaagacatcttcctttcaggcatgtttaggctttacaaatatatcagataaaggacttatatacagaatatataaagaactttcaaaactcaacaataagaaaagagtttataaaataagcaaaagatttggattgatacattatacccttaaccaaagaagatacacggatggcaaataggcacatgaaatgatgttcaacatcactagtcattaaagaaatccaaattaaagcatgagacaccactatgcacctgttagaacagccaaaattaaaaagactgatcaggctgggtgctgtggctcacacctgtaatcccaacactttgggaagctgaggcaggaggattgcttgaaccctgaagttcaagaccagcctgggtaacatagtgagaccctgtctccccaaaaagtttaaaaattagctgggcgtgctggcactcgcctatagtcccagctactccagaggctgaggtgggagaactgctcgagtccaggatgttgaggctgcagtgagccatgatcatgccactgcactccagcctgggtgacagagcaaaaccctgtctcaatcaataaaataaaataaagactgattacaccaagttctgggaatgatggggaggactagaactctcatatgctattggttgggaatgtaaagtagtacagccactttggaaaacactaaagtgtcaagagaggtttttaaaaatttatttaataacattttcttcatataatgaattaagataaaacaagatgaagcatgtaataagtttaaaacaatgccttgcacaaataactcctcagtgtgttagctattattcttatttctccactattgtatgagaaagatgaggggcagggacagggtggaaaaagagagataaaggaagcggaataagtgaggagaagtggagggagaaagatcaggggtctccttactctctttgtgtcctctgamgcatttgcaaatcccgcctstggtccactagttgatgcaggatggctttcctcttgtggttagcagctgcctccagctggtgtttcatgtaattttgttctcgcttttgcttttccaccatcagttcaccctcattcttaccaaagatgggctcagaggagtctggctcaaaggggggcagccgagagggtttgttctttatcttaaacagagatacacataatgcaggttatcattctaccagggaataagctttatgcacaaccctgtaatgtggtaaaataccagcatcttacaggaaggaatgcggggcacaaaaactaccaaatgcataacacataaaaatattcgtaacaacttacacatattttaggatgttattgatgcattgcataattttaaaaataatatttgtctgtccccttacctgtgcatccaaagctctcttgtaacactgtgtttcttccatcttatcttttaaaaatttcgctctttgcgcagcaagtctggcagttaagaacaagagaagatggaccacagttttgcagtctttagtaatatggattaacatcatcaaaacatgtttaataagtattaaataggaacaagagtctggtaaataaaaattgatgttttattctggtagctttcattttaagaaagaaaagagtaattcaaatccataggcggccaggcacagtggctcatgtgtgtaatcccagcactttgggaggctgaagtgggcagatcacttgaggtcaggagtccgagaccaacctggccaacatggtgaaaccctatctctactaaaaatacaagaattagccgggggtggtggtgggtgcctgtaatcccagctactcaggaggctgaggcaggagaattgcatgaacctgggaggtggaggttgcagtaagccaaaatcacaccactgcactccagcctgggcaacagagtgagactccatctaaaaaaaaaaaaaaattccatacgctagtgaacaatgtgctgaacacaggacaaacaagtataggcaggtgaccgaccatattgtccaaatgccttactactaaaacagcagacacatcaccaccactccacctcttcccacacccaccagttcttttaaaaatctacataagaaagcaggaagtgactattcattctataaactgatttattttgaaatctcttaagttacctatcctattaaaaattatggttctattatatgtaacttctaaagaacccatatatgatctttcaagtgagtataatggaacatatacattttatagaaatagatttttttcatcacagaaacttgcttcttatttgttttaggagtttctgttcacactataatggcctccatagttgctctcccaatctcagcagcaaaaatgtgggcccccttaggcatatgtatgtaagcagagggaaagccgctctacatggatttttagtctctggttccagtccttcctatgttccctgtacattcctgccctcaggttccatgggacacccctacataattataataaaacctcagctttgccatgaggtcatttgaacatctaatagctaagaacagctgctcaagacgagtccctttcttcatctactggtattggcgattgcaaaaacaatacaaaatgatgctctatattatagtaattacagattgaccatcactaccataatgataactatgacagctttttcatttttgtaataaaaaattgtggtactgatacagaagggaagtgctgggaagggaagagcgtggtccctttaaacgatatggaagtggggaaagggcatggtccctggctagggctccaccctaggacatggtccctggctagggttccatctgtgcccacggacctagatgaggacaggcatttttgttttcctgcctaaatgttgcatttctcaagaccaccctggcctgccacacccccatcctgtgcctataaaaatcccccaagaccctagcaggcaggcacacaagcggctggacgtcgagagaaacacatcagcagaggaacacacaagtggctggatgctgagaggatgtccagagcacatcagcaggccatcaaccagtggaatgacgtggagtttggctggggtggttggaggggaacccgggccgcacagcagcccgactcaggggaataccatctcctttctggctcatccatctgttgaaagctacttccactcaataaaaccttgcactcattctccaagcccacatgtgatccaattcttctggtacaccaaggcaagaaccctcggatacagaaagccctctctccttgtgataagacaggggtctattgcgctgactaacacaagccacctacagatggctaaactaaaagagcactctgtaacacatgcccactggggcttcaggagctgtaaacattcacccctagatactgccgtgtggccagagccccacagcctgcccatctgtatgctctcctagaggtttgagcagcagggcactgaagaagcaagccacacccccactgcatgccctgcgagggggacgagggaacttttcccatttcagtactggctgctaactgggttagtttgctcagttggttacagtgtgctaatgaaactaccaatgctgattcaatcctacatgaaaagtaacttcacatgaaaattccaaatccatttgtcagagcgtgtgtagctggactcactcctctgtgagttgcacttgttccaggckgtccatcaactctctgyattgtctttgctttatttcgttttcctgtctgttatccatttgtttcaggagactccgggaatattcctcttgcttaagagcattaagygcrggactgagtggccgtttgtcaaataggaaggatttctagaatgaaagagaagcaattcatttatgctagagtactgaaaaacaaggttaataattcagaagactaarataaatcagaaagtatttcttaatttataatatttgcccagccctcaacacacggaccagctggtgttgaggtaacacatagaatcatatgagtgtgttcaaggatgaagctgagctgagctgtgttaccaaaacaccaggggtttggtctaggtgctcacagcacagaaagccaatcactgagacaatgattattgccarggaagaaggatttaattgggtgctgtagccaaggagatgagagatcagtctcaaatccatctccttgaccaactaaaagtaggggtttatatagcagggaagaattgaaactatrtatgggaaaaccagaattcgggagggataaggaagcaatcatggtcaatggaggggcctggctcattgtctgaatgcaatcatctggtgagtttcaattctttgacactttttggaaggcctagtggttcttttctgaggaagaaactcagataaaacaatgttaagtttcaagctttaagaccaaaagggtcaatttctatgtttatttaaaacaaaaacaaaaacaaaacctgtctgtgggactattgggtcagtttcaactggaatcccattgctgagacagagatgaaaaaggactcctggagtaggttgtgagttagcatttacaacatccagatggaaggaagaaggaattctgagtgcatgcgaaatcatgcaaggacagagaggagctgaaaggagggcaaactgaatacctactgtgggcctggccattctagaccctggtgatccaacagtgagcaacaacagagatcttcgcactcatcaagcctgcatgctgatgcaggagacagacaatgagcaagaaacggtacatcaggtcatttaagatagtgctaagtgctaggaagcccttatgatagcaagtggctgggtgggaaaagagctaaactggttggttattagggaaggtttttccatggagaaaatgaatcaccttcactgtaaatatcagggagacccgtgttccatacagaaggaacattaagcgcaaagacactagatggaaacaagctaggcatgttcaatgagcagaaaaaaagtctctgtggctgaggcatagtgaccaagggaaaggagaaggcatagtgaccaagaggaaggcaggagtcaaagcgtgtagaatttgatagttgaaggtgaggagtctaaatttcattttaactcaatgggaggccagtggaggttttaaatgggagaatagtatgttttggttaacaatattataatatcactttggctggtgtgtggagaataaattataggagagcaagaatgcaagcagtgaatctaagggaagtattggagaagttgagcataacaatgtggcttggcaacactttcagtgtggcarcattaaagatgaagacatttggacagrtattggatacattttggaggtaaaggcaactggacttgcaaatgatcggaagtcaggaacagagaaaggaatattgtgatcatgactaaatacaggtttgtgcaaaaatggctggttggtgatgccacttactaacatgagaagacagaaaggaacaggttaaggagggaatcaaaagttctgtttaggtctttttaaatttaagatgtgtatagatatatcaaagaagagatacacagcagtaataaatataatctggagcttatatataaagagagagaaagatcatgcctaaatttcagaagccccatgctcgctcgctctctccttccttccctgtttccctgcctggaatgctcttcctcccttgatttctttacctaactcttgtatgtcagaaagtctttccagatctctggtctaggttaatgaatctcttcttttgctcatatagtgcccttttttcagagatttatcatygcatttattataccacacagttgtctctttaagtgtctgtctctcccactagagacctcttcagaagagggaaccttgtattcctagacaccagcacagtggctggcctggaggaattcaataaatgtttgatgatgaataaataaattataatttattwgatttatgtccggagtgtcgactacctagatggtgatatataaagaggaagattcaggcagaaataaaggtaggcacatgatgattgaaaacattaaaacaagcagtgaagcagttggctcaccaccatctgaatctgagtttctcaaacattaatgcaaatacaaatcacctggggatgttattccaccatagatgcccattcagggagtctggggtgaggccctagattcagcatttccagcaagttcccaggcaatgctgatactgctggttctcttaggtccttgggctggactttagtagtatactgctccctcctctccacccatcccacgtcctggttgagaattaccataattaacaagacctgcagtgactagtaggaatggtacagtgaatgtgagtggtgtggctatagacactggacaacacctgccctagaagaaagcttcaaactgcaccacccacttttcaactccgctgcttaaaaaaaatggcacaactggctgggcatggtggctcacacttgtaatcccagcactttgggaggccaagacgggcagatcatgagaccaggagttcaagaccagcctggccaacatggcgaaaccctgtctctactaaaaatacaaaaatagcggggcatggtggcgggtgcctgtaatcccagctactcgggaggctgaggcaggagaatgacttgaacccgggaggcagagttgcagtgagctgagaccacaccattgcactgcagcctgggtgacggagcaagactccatctcaaaaaataaaaataaaaaataaggcacaacctgcaacacagggagtggatccaaaggctcacagatgggccaggtgttagcaacrgaaatttttaaaagacttacataaaattccggtttctcattcttgtggtttcttatagcttcagcaactccaagattataggcagcatttttctgattctgttctctagtagccagacttttcatctattgtttaaaaaaaaaaaaagtttatttttaaattttaaattacatattgaagtggagcccccaaaaattttaattctattacattaaaataatccagccatggtagaaacctgcctttkggaggcagkggtactttctgatatctctatagatttataaaagtagatkgggaaaggtattttatttccttttcttggcctttaggtaccaccactagagggatctaaggaatggaagaattcatcacaaatgcaggaaagggcaggcagcagggtcaattattagacaccacataaatctggatacagcaagtgtaaaagtgccattctgtctttgcttgaaataggacatgaatctgaagggtaaaagccttcaccagagttatattttatcagaaataaagaaacataaatccaataattccacctttaaaattcagaccttaggttaaagaaaatcagtgatatgtgcaaacattcgactgcatggaattcatcccagtgttgtttattattagtgaaaacttcaacgcaagttttagtctaacagtaaatacgtgattagatatcccacagtacagacatatgatggaacatttttaaattacattataggctgggctcagtgggtaatgcctgtaatcccagcactttgggaggcagaggcgggagttggagcctctggatgcttgagcccaggagttggagaccaccctgggcaacatggtgaaaccctgtctctacaaaaaatacataaattagccaggtgtagtgacgtgtgcctgtagtcccagctaatctggaggctgaggtcgaaggatcatctgagcccaagtaggtcaaggctrcagtgagcagaggttgtgccactgcattccaacctgggtgacagagtgagaccctgygccaataaaaaataataataaattacattatataatcatgttctattgccccatattaaagactaatcgaggtgttggactacctggtgtctgaagagagcctcctgatcctttaacatctgatactgctgtatgagtctctcatcttctatctctctcctcctttcctcactgtagtacaacagggaatttcgttgtgctcgttgcaaacatacatagcacatttcctacaatcccaaatttcaggacaaataaatttttacattttacctttttgctttcgcattcccttcacaagctctccaaaggctaggtatatcaagaaacctattattaatggatatattagtgacagcaaaatgagatttgcagagtggaccccagaaatactctaaaggatcttctgaactctcacttcatcagaagtatttatagcagctgaaacttagaaagggatttctcaactctttttttgtttaccagtacatcttgactagtagatagatttatcacagtctagttttgagcctgagtacttgagtacttgagccatactcatataattaaggaagagagattcccagaactctctttgagaaacaaaaatcagtataagattctgatgggacttatttgtttggaaacactgtacctgtcctgccttgttatgatcctggcaagctggagatgtttggggcttcatctcactgtcktgtttcagacaacttggatatgataagctataaaaacaatgcaacattaattaatgtttaatacaatctgacctcaagggcaataataattttagaggcaagtataagatgaagaaaaatatttcagtggtttacttcaaaacagctatatgtatagaggttaagaatatgtaycacagaatctgaatttgtgtcagataaaggtgggtttgaatcccagctttcttgcttgcaagatgactgacatcagaccagctgtgtaatcttgcaaagtcccagttaccagtcatgtgaaatggggatgaaatgtattcattccacagaaatgtattgagtgcttaccatgtacactgttctaagcacaggagaagcaatgaagaacaaaatacacacatacaaaagtccctgccctcatggaattaacattctgatggggatagacagcccagtgacaagataaataagtgcactctatagtatgttccatgatgataaatgccttgcaatgctggaggaatggagtgttaaactgtaaagagaatggccagggaagttcttaccaaggaagtgacataggagtaaatacctgaaggaagtaagagaacaacagtgtagatatctgatggaaaagacattccaagcaaacaaaccagtgcagtccttcaggtggaaggtgcctatggtcagtgtggtggagggagatgaattaggggtgagtattaatattaatactagtattaattcattagaaaataggacagatagtatcacctaaaaagcagctcgaagaatgaaaatatttattttttaattttatttatgttattttattttttgagacagagtctcgctctgtcacccaggctggagtgcaatggcgcaatctcagctcactgcaacctctgcctcccaagttcaagtgattctcctgcctcggcctcctgagtagctgggattacaggtgcacaccaccatgctgggctaatttttgtatttttagtagagacggggtttcaccatattggtcaggctggtctcggactcctgacctagtggtctgcccacctcggcctcccaaagtgctgggattacaggcatgagccaccgcgccaggccaagaatgaaaatatttaaaagtagagaaatagagaacagattcagaagctcaaacatgcatttaatagaagtgctgawtttttagaataaaggaaatggcaaagaacaatattctagaaaataacagataagaattttccagaaaatcatgactcctaagaatagtcatgcagaacatcaagaaataagaaagattcttaaaagctacaagaaagaatgacaaccagattgattcggacgttgcatcaggacaactgtcaggagaaaatggagcaatatcattaaaatgctgaaggaaaataactgtgaaccaagaatcagcactcaagagcgacaacacagtaagaatcattttaagcaatacaaagaataagtgtactgaaaagacagggaaccattacaggatatactttagcaagaagaaaaatgaacctaggaggaaggacagggatataagaaacaggccaggcatggcggcccacacctgtaataccagcactttgggaggccgaggcaggtggataacttgaggtcaggagctcgagaccagcctggccaacatggtgaaaccctgtctccgctaaaaatacaaaaattagccaggcatgatggtgtgcgcctgtaatcccaactactcaggaggctgaagcaggagaattggttgagcgtgggaggcggaggttgcggtgagccaagatcacgccactgcgctccagcctgggcaaaaaaaaaaaaaaaagaaaaaagaagaaatgatggtgaccaaagaaattggtaaaacatgttgacaaatccaaattaatcattgaccataaaataatacaaaatgttttaacacttaaaaccaaattggaacaaaagttctagacaaaaaaaatacaggtttggaaggggatacagtttgaaggaaattgaaagcatactgaagaaacatggtcaaaggaaattcaaagcatactaaagaaatgagatcagtccaacagaaaaggggtaataatgaagttaaatgcacagtaaatagaaaatacaaaataagacagtaaagataggttcaaatataccaataattacaactgaaattaaagtctagattgagttttaaaacatccaaatataagctatttagtagagacacacatgaaataataaaacacacacaaaaattcttaaaatggcattaaaaggctattccaggtaaatactaatcagatgttgcactgttaattacatagtacagaaatgaaggcaaaagattttagtagagatgaaggaaaatatttcataatgataaaaggaactatctaccaaaaaaaatcctagacatgtagaatttaatattgcttaagaagcaaaaattgatgtaattactgaaaaatataccatcatggtgaaagatttttaatatctctctcaaagaaaaaaatagtgaggatttaaaagcttttaacaacttattttaacaaggtttagctaatatctaaatatctagaaatttacatctaaggaatagtagtatacaatgtcttcaagtatacataaaacaattactgtaaaagtactcaagctagaaaagaaggttcagcaaattacaaagtaccaaataactaacattaaatgaaccacagcataaaatgagaaagcgccccactacaaacctctattcatttggaaaaagtaataaaatgtgtcttctgaataaccaatgaattaagtattgtataagtctacactcccttactgcaattccaaaatgcaaatgctcgactctgaccacactggtcatgttttctaatttcttataccttgttcatactctccattcttttaatttatgtaaagattttaaacatcttattctatattctgtattttataatattcaggatccacaatccttgagagctcaattcttccatcttttgtttctgatggctctcattatgtggcagcttatttccatgtggtctttgtaattttggattctgacttcatttttagcccaactccatctgtcagaagtcaggagcctgagatgaaaataagatcctttagagcaggggttgcaaaactttttatgaaaacagccagagagtgaatgttttaggctttgagggccatacagtccctgacacaactagcaggtacagataatatgcaaatggatgggcatagcagtgtttcggtgaaactgtttataaaaatatatggtggactagatttggctctcagtagaggaccttttcagattatttagaccaccatattgctataagcagaacactttattttttaataacttctcttaggcctcaaaatctggggtggggcgaatgctgattccctaaaggtttgatttaaataacctgtcagatgcaactgacatgaggaagtaataagaaatatgtctcaatctggtttcttatgatccaagaggattcatttgtattttttttaatcctctaactcggagtgaaaattttacagactcactaaccactacatgcccttcagcaccagccaaatttgcacttcctatagtagtccctattttgaataatggtgccatcttctcccagttacctaagccaaaatctggggtcatctttgacatctccttcttaacctcccttaactaatccccaacaaasstaaagctttccatctgatctttgtttcatacccttattacctttccccaaacgagttatactcaactgttaaacaatgaaagtcctatccttcttagtttaaacaaatgttactcaaatcccaataatataaaacagaaaaacagcacacatcctccagtggaagtgaggaaatagagcccagagtcccacccatattacctcactctcagcctttgatatgctcttaaggccctctgaggccttagggtcatttgttggaaacagattgcctagactactgccttgatctgctaaattgtgctacacttttccattttattacacctcttcctctgctgctaatcttatccctctaaatcattctttactcttctaaaagaatatttttttcaaaatgaaaatgtaatcatggactgacattcccaaacatggtgtttggggacttggacaggttggtaaatcagaaaagatatattttaaacttctgtgcactaaatggtgcagaaacaaaattaaaaagaaaaaaaagaattgggaaaatgtttaaaacatayacatcagaaaactattcatacttatgatatatgaagttctctttataaaaatacaacttttttttaagaaaaagtaaagctcccagttaaaaaaggacacaggattcaagcaggaaaactgtaaaagaactacaaatggccaagaaacaagataaaaataaatgcaggccaggtgtggtggctcatgcctgtaatcccagcactttgagagaccgaagtgggaggattgcttgaggccaggagttytagaccagcctacacaacatactaagaccccatctctacaaaaaaaaaaaaaaaaaaaaatcaaaaaattagctggtgtgtggtggtgcacacctatagtcccagctactcggggtctgaggcaggaaaatcacttgagcccagcaggttgaggctgcagtgagccatgatcatgccactgttctttagccttggtgacagagtgagatgctatctcaaaaacaaaacaaaacaaaaaaacccactagaaatcaaacaaacataggttaaaaacaataatgaaataccatcatttcactttgctatggtattagcaaagctgtagaaaatatagcactctctcatattactgttgctgagaggataatttgctacaaccatgaagaagataattggaaatgtgtatcaaaggcatgaaaatggactcacctcttatctctgaaatttaactttaaagtttttatcctatggaatatccagttgtatgcaaggaattatgtttaattatattttcacaacattatttatagtacttaaaaactggaagccatctaaatatccaataggagattggttaaacaaaaggtttaacctttcattaagatgatgtgcaattatttgttaaggttttagaatatttaatgtcatggggaaatcaccacttattaaatgtaacaaaaatccatataatatctcaattttatttaaaaactgtgtatattccaagtgtaagtatctgtatatattgtatatgcattgaaataaacgacatacatcataaggttaatataaagtttcctctatgtagagggattatgggtgattttttataactcttgcttttttggttttctcaaaatttctatgataaacgtgttgttttagtaatcagcacaaaaaaacattttttggttaacttctttttttttttttttttttgagacagagtcttgctctgtcacccaggctagagagcagtggcactatcttggctcactgcaasctccacctcccgggttcacgccattctcctgcctcagcctcccatgtagctgggattacaggcgctcaccaccacacccgggtaattttttttattttagtagagacagagtttcaccgtgttagccaggatagtcttgatttcctgacctcgtgatccgcctgcctcggcctcccaaagtgctgggattacaggcgtgagccactgcgcctggcctattttttggttaacttctacaggaaacaaacatttttgagtcaacttctataggaaacctttaccaaccacttccaacaattactctgtccttttgcagcctctgtacttttgttgtcttcrtcgcatgcattttttttttaatttcagtcttcctgcaasactgtaagttttataaaagcaggtttatacatctgtaactctgaatcttcagtgcctagaatattacctggcacatggtggtgctcaatatttgttgtattgaattaaattcccaagtactatacatctaattctcaattatctttcataacagtgatattatccaaaacaagcattcctagagtttttaacatgactttagtaatccacaaagtacataaattgcacatatgatagctgataaattttgacacattaataaattaaaggttggcagcacaatgcaaagtacatagttaggtgctcagtaaacaatgaatgagcatggttgagtatggttgactgatttgaggtcttaaaaagtatcctactcagagagaaggataaaatattttagaaatcttttgacataccatcacaagaagaaaacgaccatgataaattgtaatacactcattcattcaagtaatgtttattgagaactaatggagtgctggctatgtttggcaaaactactttccaatttgatgtaaatataacattgtgtcacatcataatatscaagcactcggaaaacatgaaagttttgtagatttgggaagcccaaatctacagaaaaagttggatgatcccaactctgtgctattttgtttccgcctgtgtcataacatctattccactgaatcgtaatttatccctctgcatatgtctggctttcccactagatggtgaaccttggtcacctttattattcccatcatgttgcatatagaaagctctaaagaacactggataaatgaattaatgaacaattacagttccccgcatcaagcaacgactcaaaaatatatttagtaaagtacaacagaaaaaaaaaagtcaatgcattacctttcaggggtcataatcttcccaccactctcacttcgttcaaacttttccagcaagctgacatttgtcacttkggcagggaacaaagctkgtctatctcgaagtctttkgggtgatgagatatctgtagaataaagaatgaawgaaaacgagtctcctttcaactctcaaaccactaactgtgtagtttttaccaagggaaattttcatataagatacactctcttatctttaaataatcaccccttrttctattgtggtataaaaaaatgtttttgctgtatattcgcaaagaaagcactgtgctaagcatttagaggacaaaaagaggcaataacataaatgcaggaagtgggctggatataacatgaccaggagacgtgttagtttagttaacatttctcatgaaaaatgaacagtggtagttttacaactttgatatctgtagatttagacattttgcctgtaaagatctttcgatagatatagttgaagagaaaaataagatacaaacaaaaaagtgagagctcccatttggaggtcatcttatgtgctaacagtgctaagtgctttataatatacatttaataaataacaacttaggasagtgatgcaaaatgtataagtcacaaataaatgttgcagtctttttcttttttttttttttttttgagatggagtctgactctgtcgcccaggctggagtgcagtaacccaatctcagctcattgcaacttctgcctcccaggttctagcaattctcccacctcagcctcccaagtagctggaataacaggtgcacaccactactcccagctaacttttttttttttgtagtagtagtagagatggggtttcgccatgtcggccaggctggcttcgaactcctgacctcaggtgatccacccacctcagcctcccaaagtgctgggattacaggcgtgagccaccatgcccagccaaatgtygtagtctttaaggatctgatatgttcagaggagagaagccacttcagaattcagtgataagttttcatggagaaagtgagatgtgaaaagggtactaaaaggtgagtaggatggagatagattgaaagaaaaggaaggacaattcaggctgcaggaaaaaaaaaatgaacaaaaggatgaagttggggaagggcaggcatgttagaagagcatgaataggccaagcatagtggctcacgcctgtaatcccaacactttgggaggccgaggtgggcagatcgtttgagctcaggagttcaaaaccagcctaggcgacatggcaaaaccctgtttctacaaaaagtacaaaaattakccaggcatggtggcgcacacctgtggtcctagctactcaggaggctgaggtgggaggatcacctgagcccaagaggttgaggctgcagtgagccaagacagtgcactccaccctgggtgacagagcaagaccccacctcaaagaaaaagaagaacatgaatagataatttttcccaaaaaaggggtctctatagggcacagtgggagatgagactagagaaataaaagcatatgaatattaggctaaaagttgatatgcaatcctgtaggccacacgtagaaaacagacatgcacaagccaatgttcacccattggtatgttttgtttggcctaattagcattttttgtttcaatatcaacaaaagtcgtcaacwtttaacagccaatagattttacattaaagtcaggatctctgcttcttttgaaaaatcagaagattgtgctcactttagtagcacatatagtaaaattagaaaaattagaagatctgatatcacttgggccacatttccgcaaagcaacaatctgctagaggaacagtcctcaaagtgtggcctggcaagccatactttttggggtccctaggaccctttcaaaatgtctgtggctgcgtgtggtggctcccacctgtaattgtagcactctgggaggccaaggcaggcggatcacctgaagtcaggagtttgagaccagcctggccaatacggtgaaaccccatctctactaaaaatacaaaaattagctgggcgtggtggtgcgcgcctgtagtcccagctacttccagggaggctgatgcaggagaatagcttggacgcaggagaatcacctgaacccaggaggcggaggttgcagtgagcccagattgtgccactgaactccagcctgagtgacagagcgagactccatctcaaaaagaaaataaaaagtctttggttaaaaaaaaaaaaaatctttggagtcctaggattttcttcatttgcttccaccaaaacaacctatcacaacagattagatgcagacataggtatgagaatccagctttcttctacagacatcaaagtgataaaactgccactctttgtttttcattagaaatgttaactaagctaacatgtctccaacccacttacatccagaccacttcctgcatttgcgttacctgcctgcagtcatctgagttttggcccctttgagcaatggggagccagcaaagagatgatgatctaagagcctgagagtcataggatctaaggctcataaagtaagtaagctcataattaaggtcaaatgcaggattctaggaatagaacgtatttgttagaaataatatagtgattatttgtggctgggtgcggtggttcatgcctgtaatcccagcactttggatggcctaggtgggcggatcacttcaggccaggagtttgagaccagcctggcccatctatacaaaagataaagaaattaaccaggcatggtggcacatgatggtaatctcagctgctcgggaggctgaggcaggagagtcgcttgaacctgggaggtggaagttgcagtgagctgagattatgccactgcactacagcctgggcaacagcgagactccatctcaaaaaaaaaagtaataataatatagtgattatttgtaaatttaactttatttaccttgggctaagcaatatggctgggctcatagcagtaaagagtgacagattggacccagaaatcattggcctacctctggtgccttcttctttgtctgactggtcttttaacttgcacttcctttctctattctctccacattcttctacaagggtctccataggcagtttgttttccatctccttgagctcaatcctaggaatgagccaatatgtttttctgctgcactgaacctgaacaggtaactgtgtgaactctcaagttttggaagcaacccagccagctggctgattctgaaataagcccactttcttcaaggggtgagtgctctgatgtgctaagtacatatcatagattaattttctccaaggctttctggaagcygaccaaggcctttccctctataccatagtctcaaagcagcttgcatatagagaaattgccttaaagtcctttatttaggttattggtttttgtttcaatttgaatttttatatcctacttctttaactagatgctatggggtgatacagtggaaaaaaggttgttggatagcttgaaggcaaagattcatagcctggtagagtatgccccaaaataaccatttgtctcctccctcctttgccacttcacttcatcattctctccccaggcaaaagtgaaggacttgcaaagctacaatttgcagcagggaggaagggggatgttcagttggtgtgtgtagttgtaggatttctttggcctcaggtatggagtactaggttggagtagggagtgggggtgggggtaccttcagtcaattcaggggccaaatgtcacataaataaaacaccaacaattgttttgagtatttaagtccccatgtccatttctaggcccttgacttgatggcgactccatctctgttctttgacccactataattatttccctcctggagtgcctaagccaaaatatgtcaaagggaacagccatgtttgccttccgaaaccatcaaaataaaattcttttcaatccactgatttatttttagtgagtaaggcaatayggtgcaatggaaagaacactggaccaggagccatggttttatttctataagcttggctgcttattagttgcatggccatttcgtgtgcaagatgaggcggttggaaaacaacctctaaggcttactctggacttcacactgaatcttctgaggtatgtgtcatacagctcttccaggagggggttgttccaaagcaacaaacaagagaatgtcacactcaaaacatctcagaaattctcatacttttatactttactcatacttcctaaagtaataatgctttaggaagctagttgttattccccaaacttcctccacctgaaatgcacagtggttaatggcacagcaattaagattattaacataattaagggcacacaatgaataagtgatggccaaactggaaataaaactaaagtctcctgactcctactccagtgttctcaatagtgcaccatgttgcttcattcatgtaaaagaaaaaaattaaaattaattttgtatcatgataaaatggagaattataatacataagtcacatggttgtcgtgaagattaaatacagtaatatgcaaccaccagtaacaaccactgtgctcatggagtaaagctgtttccttattctaacttatctgtttaacccgtttagtggtaaaaatccgagcaaggacaggaaatgggctgaactgaaggaagaagcagcagctagggcagaagaagtggtacaaagtagtggaaagttcagcaggtgagaagagttttactaatactgcagggactaaggttaatggaaggtagtatcagaatttccaggagccaagggtagttttaaaaaagagtaaatgggccaggcctggtggctcacgcctgtaatttcagcactttgggaggccgaggcggatggatcacttgagaccaggagttcgagaccagcctggcctatatggtgaaacctcatctctactaaaagtacaaaaattagccaggcatggtggcgtgcgcctgtaatctcagctactccaaaggctgaggcaggagagaattgcttgaacccaggagaccgaggttgcagtgagcagagatcgtgccactgcactccagcctgggtgacagagcaagactccgtcgcggtgaggggggataaaaaagaataaatgtccattgttatttaacttaactacagaaagtgtatgcaataaactcttctttgttggtggatttagagagggagagacagacagaatacattaaaaggaacatgagctacaaaacattgagaaacactgcccaatgagatcagcagatcagcaaggagtgctagtgcctagaggaacccgtgaagcaaagcactcaccttggaaacgcaagcacactgctgggccacttcctcaaggcckctctgctagacaacaccgagtccacagtgccaggcctctagaggacagcaacagagcaaggttacatctaggctgaggtccaggactcagacaaattaaaaactgcaggctcataggcaaggctaccacratacttttcttgttgttgtttatgttaagcgcttataagtccagagcttaaaaatccaatgaggaatgatctcattcatcagagcaatcaccctgggtagctgcacagcaattctttcggtgttgccttttctcaaaccatttccttttagggaattgccttcagagttgacagattcttttagatgtctttaagaagatagcagactttgtaaaaatatctggaaagtgagcaagctgtctaattccactcttgacccaaataactaaaattaggcaattaagagaaaagctttcgagtcaggtgggctcatgttcaaatccccacactgctaacaggcatgtggccttaggcactaggtttctggggataataaaaggatctaatagcacttccatgaggtcctctatgtaagtagctagcacatagtaaatactgaacaaatgactattttaattctcatgtaactgtaaacataatagtcacattgtcacattttaactgtagaataatatataaaattattatttttgcatgaatgctatcacttacaaaagcctttgaagtgaattcccaaaaagaagtatagaaaatatttctaataaaagcagcattactgaaataagcacacagctttccaaggggactaccctacaagacagttttaagttacgggtcatttgggaataaactctcactcacaccacttcacagcagttttccaaaatgtgtcttacagagctaatgagatattggattaacctacaattccatgattaaatacattcaggcagttaaactgactgctttccagccagacttctcagctcctttaacatgctgatgtgctctgtccctctgtccatgagggtgactgattcgatcagcagttttcagtcagctttgacctccaaacccttttttcatagagtatttttcaggactagttcttttggaaaacgttctgtaaaagatgtgctttacagttcagcaggtcaaggaaaatgctgtcttctcttttaaacacgtattgaagctacaaagttcagcagaatccctgagggttagagatgagctagccactttggccttgcttatggacttgcaaatcttgccttgtgttttcatggaaaagcaagggtttttcctgcatgtgtttcccactttccacacacagggttggcaatcctcttagcaatcctgtatgaaaccagattgtgtagaaaacaccaggagtttcattatgcacaacttcatttcctaaatccccatcccaaagcttcataaaaggagaaatgggtagactgagatgatattaatagccttttcattaaaaaaatcagagtttggctttatgggatataggattatataacattccataataattcaattcattcatgtctactttgttagtttccagaggagtacctgaggcacactaagtattcagtaagtctggtagattgactatttcatttgtttaaactctgctgtatccaacttagcatgaaggtcacaccagctacttaatggttgacaataatgatrccaattaggaaatttcttctacaacatggcaaattaaaagctaaagattcaaaaactccatgactcaaattagattttgttatagaactttcattaaaataaaatagtagaaccaacattaaaaaataaaatagtagaaccagcaaaaaccaagtggttaggaagtctgggcttgaattccagttctagttcaccttgggattcccacatagcctctctgagcccctacttttctcaattgtaaaattaggatgataataatgctgcttgtatrctattttgaggctcaaatgaaataatacatgtggaagaagtttttaaaccatacgccaggcatggaggctcatgcctgtaatctcagcactttgggaggtcaaggcaggcagatcacttgagaccaggagttcgagaccagcctggccaacatggtgaaactttgtctctactaaaaatacaaaaattagctgggcatggtggcgcgcacctgtaattccaggtacttgagaggctgaggcaggagaatcactcaaacccggcatgtggaggttgcagtgagccaacatcgtgccactgcactccagcctgggtgacggagtgagactctgtctcaaaaaacaaacaaaaaacctataaggtactataaaatgttcagaattctaagagtttccgttactatttatatccctcaattgactttgaytcttaatgttcctttgccttcctgatcttttttgtcaaagagttaatcaagtataaacaagcacttccatgtacttcaggtaactgtcactcaaaatatgtcaaccttcgtttttcttaattacaacacacctatagatgagtcagaaccacaattaggagaagacttaggagaaggaaaatattaatttacatttgctagggcctttgccaaagccccacttccatccatggtacaaaggaagtctttataaaacctcatcttcactttgctgtctctgatcatgaggaccccaattcctttgaatgtaaactccacattttgtttcatggaaatggaacgcgataaaaaaagcaacgtctccttcacacatccttccactacatctctgttaaatggaccctccagggatatcatgacaaaattaagtggaacaattgggatttcacctaaaggagaaaagacagttggggtgggagaaagaaagtggtgattaccataaggacatatcatacacactcacaaataattatctgattctcaatgccctaaaatrgaatcttctggatgaagcttttagttgtacccaatgtaatattattactgcagacaattaagtagttactaacatattaatcagtacaattttctctaaaagtataaggttcaatgctcaaaataagaacagttagctttctaaataacactgtagacaagcttttgattttctctaggaaacatataataatcaactgattctcttcctcagagggtttcytaaagttttcatcccccttatcttttaggacatactgcagcaatatttgctgatatggtttggatctgtgtccccacccaaatctcatgttgaattgtattccccagtgttggaggtggggcctattgggaggtgattggatcatgggggtggatccttcatgtatggtttaacaccatccccctgggtgctgtcctcatgataatgagtgagctatcatgaaatctggttgtttaaaagtgtgtagcacctccctccatcctccctcttactcctgctccagccttgtaagacatgactgcttcccctgcaccttctgccatgattgtaagtttcctgaggcctccccagccatacttctgtacagcctgtggaaacgtgggtcagttaaacctcttttctttataaattacccagtctcaggtatttctttatagcaatgcaagaatgaactgatacatttgcctatctcctccagttatcatgccatttttacatgattacaaatacctacaagtgttaaatattttgaaaagatacccatcttcactagaagttatcatttaaatgaaatagggtcttatacaagggtatcagactaaatgactcacagaaagcttttcctctctaatgagcccatatatgacactacaaaggaatacgattatatctagcttgaaagaagcacagggtctatccaactagaacagatgtaggagcaatacaaggttcacgagtcagaaaaagggtaaatagcaaagaggatcaagatgacaaagccaaagagagacaacaacaaggtccactgataaagaggacatagagaagatgagaatattctaaacattcactcagtaagcatgagttatatcctttcaaatgtccaccactgctaaatgatgaaaattaacaagacctgagcttcactgcatcagcctgctgtctcctgcacaatttaacaataattctaaccaccaccctccatttttaaaaaaaatacacatttcttaaaaagaaggctgtcttgcctgcctctggattttctcctcccatttgcccactgcctctctgcaatctgtctttcagatcacttatctgagttaggacactatcatctcatagattgtcaagtcaatggatagtttgactccttggccccctttgctggcttccctcctcttctacttcttataagatactgaggtttgtttatttgttttataggattttgtccttgtttatctcttctgctgagtatatattctctcctaggtaaacatccaaatcttgatctctagtctccactcttctcctaagctctggtatcacctctacctaaatatccccacatgtatctcaaattcagcatgtgcaaaagcaaattcactattttatccaccaccgaaatccacctttccccttcattctctataaaggtaattgatagcatgagcatccatctgttctccaaccaagaaatctgagtcatactaaacgccttccttcctcttcctacccaccactctcaacttaagccctaacaattctacatctgaaatgtctcatgagtaatatctcatgagtagataccctcatttcccctcctgatcactgtcttcgttcaggcttttactgcattttaccaaactactgtaactgaaagagtatctttctaaattaatcctatctgtacagataattccctgctcaaaaactttcaatggctcctcagtgcctacaggatgaattctaaagtccgatcacaccatataaggcccctcacaattggtccctacctaccattttcatcttatcttcctctgcctgcctccacaatcatatgcctcagccatacggaagtacccgttacttccttaacaggcttcattccatgttcttgacttgttcatattgttcctgaaatatcttccaacagattctctgctcacagagtcctatcatcctttaagacctcttcacatgtcatcttcgtaaagcagagttaggcatgctgtcctccgggcgtcatagcatttgatccagttctgatcaatttggctttcatagcacttaatcatgtttcatcatattttttttctttttttcttgagatggagtctcactctgtcgccaggctggagtgcagtggcgcaatctcagcccattgcaacctccgcctctggggttcaagcaagtctcctgccttagcctcctgagtagctggaactacaggcatgcaccaccacgcccagctagttttttgtatttttagtagagatggggtttcaccatgttggccaggatggtctcaatctcttgaccttgtgatccgcctgcctcagcctccgaaagtgctgggattacaggcatgagccatcgtacccaacccatttcttatatattaattatctatgctagatttaaaagaactatgtcttactaatatttaaaaaccactataaaatgtttgattagttactgatatggtctggatttgtgtccctgcccaaatctcatgtctaattggaggaggggcctggtgggaggtgattgggtcatgggagtgaatttcccccttgctgttctcataatagtgagtgagttctcatgagatctcatggtttaaaagtgtgtggtgcctccccatttcatgcttgctctctcctgctccgccatggtaagatgtgcttgcttcccctttgccttctgccatgattgtaagtttcctgaggcctcttagccatgcttcctgttaagcctgcagaactatgagtcaattaagcctcttttcttcataaattacccagtcttagctagttatttataacagtgtgagaacagactaatacagttacctagttaattaatgatgaagaatcataaccccaaagctaaactgtagacagaaatttttctttgggggttttaaatttttatttatttccttatttatcttattattattattattattttgcagccttcaactcctgggctgaagtgatcctcttgcctcagcctcccaagtagttgggactggtggtgtgaaccatcatgcccgtctaagttttttaaataattttttgtagaggcaggagcttgctatgttgccaaggctggtcttgaacttctggcctcaagtgatcctccctccttagcctccaaaattctgggattgcaagcatgtgccaccattgcatgtgccaccatgcccggcctagaattattcttttgaactaattcagtcatatatgtctaattctgaaattgcctcacccagtaaaaaatataattttagatctaaactacttttttggactacagtacaagatccaagatagaaaatgagctttaattttaatgcacagatgtttttgcaaaaatgttagctttattttcattttctttaataggtttttgatgaaataggatatatttcttctgacataaaactctaggtatttctttttgttcccatgaaagggagaaacaaagaaaagaaaaaaaaattctaggtaaaaatagctgaaaagttcatcaagcccaccatactgaatatatacctaagaaattctaagtatggtttgttgacatttgtttttctaatatatcattcttttgaaagtagaaagttactcaagtgactctgaaaattaactttcaggaacattatcttagaggacagtttcagccttttcacctgttgccatcggagatagattgtctccatttatccaggagtgagtctgatgctgggggcggggacaatcaggaaggtcgaaaggaacacagccaggaatcaggaagtatgcacccaaaggctgctaagtaaccaagggaggtgttacgaagcccacacactaaagctggatggaagcagtctgtkgcagggattatgcctattttgtttaccactatatctcaagcacctggaacaaggtctgacacatagttggctctcaataaatatttgaagaaggaaggaaggaaggaaggaaggagggaaggagggaaggaggaaaggagggagggagggaggttggctttagggtatgcgaaaggtatataaggtatgcattaagtctttatagaattattcaacttctaacttttaaattttaatgatttggattatacatatgatagaaagacagttatctttttgacagctgatactgactgtagttctcccaaccagagatcctaattaactttctcttctttgtaaccacttttaatttcttaggatctgaaataaagggcttacagctctgtggtgtggcttttacataaattttcctttacgttacatcaggttttttcactccttcctcttaggttactggggtttaaaatggccttcaggaagactctattatttttccactttggcccctccctctgccaaaagcaccttgtgaaaagtgagttcctcaaataagaaggtaagacagcagcactggctacgctttgccctttcattttttatccccaggacagtaaccttctgggaaaatcctacatatcagaattatttaccaggagtatatactttgttttgtttgagtccatgratctgcactagcttctccaccatgataaacacaggcctctggattaagataaatttgttgtttcccacctcaagcttttgtcttatgaaagtgaaagttccaaatgctggaatctgaaccccctgaaaggaaaaaacaaaacaaaacagaattcattgaaggagtgaagaaaaaataatccttaatattattatctaaaaaacacgaagagaagtaagcttaggccttaaaaattcagtgatctctaggactcttcagagctatagcattttataattctaagttttcaaataagcttagtataaaatgtaatacattggtccatgatgatttgcagacatcagatcgctcatctctgtatcatcaaaaggctaagaaattggtgtgaatgccatagcatcttttaatctttaacccagattactcctgtcctaaattgtgtgacattttaaattttaatcatctgccattagaggaatttaagagggcatgagaatctctgctttctcattcctacttttagattttatgtctgccacagcagacaaccagcatccaaatcatatgctgcaatgtagtgatcctggctgatgagtagaagcaaatgtttttgcctctcatactgggtttctgtctccctggagatatcattcatcaagractacaaactcaaatgcctacaggagccaaaaaagaaagcaagagagtgaaagtagccagccagggaatgtgatggctatggactgcacaccccgtctaaaggggagagcacatcttgagctccaaatgtgtcaccacgtagcaatggaagactagtactgttagatctgctgatttttcaatgaaagggagggaaaaaatccaaaacattatatgatttttcccaagtttaagtgctgataacaaattcaaattctcaaacaaaacaaaataaatttgaagtatgaattctgcccaagagctctcatagtaggacctctgaatggggtataaaagttccacaacttcccagcttcccccaagctcatccccaaatctctgtccagttctatggcatctaaacccaagacttaacaggagggaacagtccagccctaggcaaagtttctcattttggcaagtcttctatttcagttaaaatccattccctgcaaggaggcaagacaagaagcgttatatccttctatagctatgccaggaactatcagatcacagacaaacagaactcatctagtttccttacacacacccaggctgatcagcactacactctgtaacactagaagagcagaacttacaaattcattacctaaaaataaaattcatgtttgttaaatctattacccacaagtccgaacatgagcatcaaaaaacataggactgaaagttaaacaggatggctctaaagtctactgccctgctcccagcaacattatataagactatgaaggaaggatcctttagatgcctacattaaaattaataaattaatttattaataaattaataaattaataaatcttaccttgtgcagggttaactgccgtctcacaaattctgatacattcccccagataatagagacttctgaaattcaaaagtaaccagaaattattcaatttatatgcgcacccatgtgacagtatcttagtgctaataaataaaaatgtaaatatgaaatgtggaagcaaatgacattaattcctgattaatttagaattaacaaaaaacaaggccattcccaaaagttaattttcttggtaactaaggcttactcccttaagttcagaagatgtgatttaaaataataataataatacatttttaaagaaaatatttctacagcaaagggaactctgtcacacccttttctttattctgtaaagagagttaatcaagtataacccaaccttttcttaatgacccagcaaccgtttatcgggtgtctattctgtgccatctgattaataagaacgttcattctcacaccattccacaacacaggaataaggcaaaaggccactaaggcgtgaaaggctgttgtgtgtacattaacttttcctacacttctatttttgctaaatcctcaaatctgcattttattctcatttttcactgctaagctaccagctgtcacttgctctactagtactctgtgggctcctggaccagtcataattcattgcttcttatctactgtgttctggaaataacaaatactaatagtatgtctaaaataacttttttttttttgagacagggtatcactctgtcacccaggctggagtgcagtggcgtgatctcggctcactgcaacctccgcctcccgggttcaaacgagtctcctgcctcagcctcccgagtagctgagattacaggcgccagccaccatgcctggctaattgtacttttagtagagacagggtttcgccatgttggccaggctggtctccaactcctgacctcaggtgatccacccgcctcggcctcccaaagtgctgggattacaggcatgagccaccatgcccagcctcaaataataattttttaaaaacacacatttgagtaggacaaggagctttactttgaattaatgcatacacttggcactatcaattttgactgactggaggaaagccttccaagtttatcttcttgttctgagctgtgttccaaacaagtgtggtagaaaaataggtagttgccaataatgaaagtgttaatgtatgatatgaacctatactgtagtatgactaatatttcaaagtctagaaaattatatctgtgttaacatcgcccttccagacctaaccatgtgtttatcaaagatactttccagttaagaactctctgcaaatcaagamtgttacgttttaattctcaaaataaaaaatcaagaacagtgacattaacaaacttgccatttagggacatagatgcagctggtgacaaaagcccaatcctttttccactttggaaactgcttgttttattggtttattggtttatcttttttctaacaatttaaaccactagctaaaacacggagagtgcaatcttttaattctggtatatcagagttataaatatttttattaataggccaggaaaggggcaggtttggtggatgagaagtagcaatgacttttatgactatctgggaacaagtttggtgatggaaactcactcacccattaataaaattagggctgcaagctacagtgagcacgagggccaagattctgcccctcattaatcactttctataatcaggcatttcccttactctgcccaccctaccttgttccccactcctccccacccccacagcccatagattctactacaggctgctaagaactaagaaccagtcctaactgtatactgaattaaaaytttcatcatgaccaaaaatttcattaattcacaaatgcaaaatctcagtatccagatgtacatggagaactttcaaagttattaagtcaaaattgttaaatttatgactctaacagtctttcacctctaaaagctcgtattttaggaaaacaactacactgaagatgaaatgatttcattagagccaggagaaagtgtatagtttgcaaccaaaccccagtgaaaagactcagctgagtttaattgaaaatttgaggattctgtctttcttcatttggatgatatattcaagcccactgtactgttttattccataaagcctaacagataacattacataagagcagaactaattattctaaactaaaatttgctatttctcattgaagagaaagaaaactatgcatatcatttgccttaggaggctttaggcccctgcaatccaatcggaatagatttggaaagcttacagactgtaatttctaaatttgacgttttctgacatcccaaagagtcagagaggatatcattaaatctcaaaatgaaaaatatcaagtctaaaaagcaaattgaaggatatactactttcatattttaagggaagccagggttcttacttatttcaatcaaacactgaaatgccaagaatcactcttataaagaactaatccctagacatatactctatattcagttcaaccttcatttggcttcaaattcttaacattccatgcgctcaaaaccatatgtttaaacaccgtgccaagtaacaggatactgtatcttacatatgatcattatttaaaaatcctacatgcctgttctgtaaattatacaatactatatgcttgaaaaagtcattaatgtcaaaaaacagatatgtttcctgatgttataaaacttatcttctaaaattaaaatactgatatatggaatagtatagcagaatagtaaaggatgatttgaacaaagaaacatattcccagagcataatgcaatggaaagagcagtgtgctacgtggaagacccacagccttcctgcttccatggactcaasttttacccagttcacatctgtaaaatgatgacagggccttctaagaactataattacataatattaaactttgctaaaacatacagaagcagcaggaatatacaatgatgaatatatacactgatgaaagttaatttatgtgttttgctcagtttgaagtttatcttcatccttgttgcaatagataatttgtgaaaggtaataaatagtagtttgactttsacttcagctcttgctgaagtcaccaatggtctctttgtcaatacattcaataaacgtatttaattctgagccctcagccatgtctgacactattgatcactccctccccgtttaagcacctctccttttggcttttatactactactctcatttgggttttctcctaactgtctggccatttcttcagtctcccttgcaggcttatcctcctccacccaaccattaaatggtagggtttttcaaggtacagtcctaggttgcttctcttttcactctatactctccacttcagcagtcacacccacactcaggatgattcccaaatgtttatttacagacccagactccttgccaccccctctttgagattctggacccgtttatccaactgcctgcttatatatcacaaaaaggcccttcaacttgcccaaaaccrcaatctttcttctcttaaatcttgtcttttatccaggatttcggtctcagtgaatggcaccactatctattcagttatatgagccaggaactcagaagtcatccttgagacttctcttatccctcacccctaacatccagtccatcaccataatctgtagattttayctccaagttgcccctcattcattgcattcctctgcatttctactattaccagtttyagaccaagctaccatttgttctcaccaagactattgctataggtattcttgaccctcctattcattccccacatggcaaccagagtaatcttttccaaatataaactgatcatataattcaacttctccttgacctccagctcaaaacacttaatggcttcccatcaggcttaacataaaggtcaacatccttaatatgacttacaaggccctgtattacttgaccccttcctttctctctagcctactttagaatacactgcctccccacatctacagagcagccagtcaactgtctttcagttgctccatcacatcatactctcaccataagtttttgcccctgtcattccctttgccaaaatcattttcaactcacttccactctctacctctctgatccatttcatctacttaattccaactcattcttcacaactcagctcaaattatcccttctttagccattcttggcacacacccccatccttactctctattaaatgttctcatttgacttccatttcttggtgctgtatgtaaggaagtcaccactccatcctaacaactaaaaagttgaccagacagaaaaatcaacaactcttcttgggtccataagatgagggaggacacaggacaaactgctgcccctaaaattggagagacagaaaggcaaataccaggaggaatggcttcctgaaacggactcacatgcagaaacagcatcaagaaccaatgctgggtaagaaaactcaaagtgtaattgacaaatttctggaggctcagtgtggacaacaccaagagttaaaacctccaggggaacccagtcatggagggagggtccccacatattttaaggtttacttcccagagctcaaccagattcccacagccaaatatccaggtaaatataagagaaaaatctccttgtgcttcaggtgggaggaagaaaaaaataccatttttaaatatgccagagtactctgttgtccttaatgacctgccctcagaagaaactagttcaccagagcctaacctgctgggatattatcagagcctaactgacctgagagaaggaaaatgaccaactccagtccactttagccattctgtcccacctaaggagaaaggaaaaatctgagaaacatttgtaaagttcacagtccagaggcacaggctcactaaaagactgagacctgatcataggactatagaatgctttcccaccccccacactctacccctacattactaaaggcctatttatagcagttacttttacccagtacatcacttccagctatcaagaaaaaattacaaggcatactaaaaggcaaaacatacaatatgaagagacagagcaaccatcagagccagacatggcagggatgttggaactatcacactggcaatttaaaacaactatggctaatatgctaagggctctaacggatatagtagacagcatgcaagaacagatgggctacataagcagagagattgaaatcctaagaaagaaccaaaaataaatgctagcaactaaaaacactgtaacagaaatgaagaatgcctttgataggcttactagtggactggacatgacttagtaaaaaatctctgagcttgaagatgtgacaaggaaacttcaaaaggaaagcgaacaaagactggaaaaaaaaaacccagaatatccaaggattgtgaggcaactacagaaggtgtgtacccataatgggaataccaggagaagagggagaaatattagaggaaatgcttgaaacaattactcagaatttccctctaatgtcagacrtgaaaccacagatccaggaagctcaaataacaccaagctggataaatacccaaaaaaagatacctaggaatatcattttcaaagtacagaaaatcagagctaaaaacaaatcctgaaagaagccaggcagagagagggaaaggaacacctcatctatagagaaacaaagatgagaattatattgaactacttctcagaaaccaagcaaaaagagagtaccataagacatttcaagtgttgagaaaaagaaaacaccaacctaaaattctgcatcctgtaaaattattttycaaaagcaaaggagaaattatttttcagacaaacaaaaattaagggaattaattgccagtaaacctgcttttcaagaaatgttaaaagatgttcctcagaaaaaaggaaaatgatgtaggtcagaaacttggatctgcatttaaaaaaaaaaaaaagggaagaccatcgaagaaggaataagtgaaggtaaaataaaaactttttttttctttgagacagggtctcattttgttgcccagcctggagtgcaacggtgcagtcttggctcactgcaacctccacctgctaggctctcaagcagccctcccacttcagcctcctgagtagctgggactacagtcgtgtgccaccatgtccatctaatttttttggttttaattttttgtacagacaaggtctcactatattgcccatgctgatcctggactcctggactccagcgattctcccaccttggcatcctaaagtgctgggattacaagcatgagccactgcacctggcctatttttattattcttagctgacctaacagatagcagtttgtctagtaatagcaataatgtattcaattatgtatgcttatgcatatatcatatatatttacatttatatataagtgaaatgaaatgaatgacagcaatgatacaagggatgggaggaaggaattaagattttgttattataaaacaatcacactacctgtgaagtggtacagtgttatttggaagtggacttgaattgactgtaaatatatattgtaatctaaggcaactactaaaattttttttaaaagtataactgggcctggcacggtggctcacacctgtaatcccagcactttgggaggctggggtaggcggatcacaaggtcaggagatcaagaccatcctggctaacayggtgaaaccccacctctactaaaaatacaaaaaattagccaggcatggtggcgggtgcctgtggtcctagctactggggaggctgaggcaggagaatggcatgaacccaggaggcggagcttgcagtgagccaagatcacaccactgcactccagcctgggtgacacagcaagactrtgtctcaaaaaaaaaaaagtataactgatatgctgaaaaaggagaaaatggaatcgtaaaatgctcagtggaaaataaagatgggtacaaaaaacaagggcaaaaagtagaaaacaataacaaatatggtaggtattaatctagctatatcagtaatcactttgaacataggctaagtgtaccaattaaaagacaaagattgctggagtggaccaaaaaacaaaaccccactatatcttgtctaaaagaaacccaatctaaatctaaaaacatatagattaaaagtagatggatggaggaaaatacagcatgataatacttatcaaaagaaagtaggggtagctatattaattttagaacagacttcaaatcaaggagagttgtcagaaataaagagcattacataataatagaggggtcaatctttcaagaagwcctaagaatttttaatatgtatgcacctaaaaatagtatgtcaaattacattaagcaaaaactagtagaactgcaagaagagataaatgaatccattatcatacttgaagacttcagtactcacctatcagaaatgaacagatccagctggcagaaaattagtaaaggcatagttgaactcaacagcaccatcaatcaaatggatatagttgatatctacagactagttcatccaacagcagtagaatgcacattcttctcaagctcacatggaacattcaccaagacagaccatgttctgggccataaaacacaccttaacaaatagaaaaggwtagaaatcatacaatgcctgctgtcagattacaatgggattaaagtagaaatgaataagagaaagataagtggaaaatcccaaaatacatggggactaaataatatgcatctagataacacatgggacaagtcagaggactgtcactacccaacttcaagatttacaataaagctgagtcatcaagacagtgtgtattgacaaaagaacagacaaatagattaaaaggacacaaaagagagcccaggaatagacccatataaatacagtcaacttatctttgacaaagaggcaaaggcaatacaatggagcagatagtcttttaaacaaacattgctagaacaactggacatccacatgcaaaaaaaaaaaaaaaaaaaaaaaaaagaacctaggcacagaccttacacctttcacaaaaattaacttaaaatggatcatagacctaaatatgaagtgcaaaaccacagaactcctagaagataacataggacaaaacttagatgatcttgggtatagcaatgactttttagataaaacaccaaaggcataatccaagcaagaaataataagatggacttcattaaaatttaaaacttctgctctgtgaaaaacaatgtcaagagaatgagaagacaagccacagactgggaaaaaatatttgcaaaagacactgtcatgcaaaatatacaaataactcttaaaaacacwaagaaaagaaaaactcaatttaaaaatgagccaaagccctttatatatatctcatcaaaaaatgacaagcatattaaaaggtgctccccattatttatcatcaggaaaatgcaaaataaaacaatgagataccaatacaccatctattagaatgaccaaaatctaaaatactgacaacaacaaatgctgacaataacatggagtgacaagaattctcattcatcgctcttgggaatgcaacatagtacagcccctttggaagacagtctggcagtttctcacaaaactaaacatcctcttaccatacaatctagcgattatgtccctgggtatttacccaagtgaattgaaaacttatatccagttttttaaaacctgcacacagatatttaaaacagctttattcataattgccaaaacttggaagcaaccaagacatttttcagtgggtggacagattaaaaaaaaaaaacctgtggtacatctagataatggaatattattcagaactaaaaagaaatgagctatcaagccacaaaaagacatggaggaatattaaatgcatattgctaagtgaaagaagccaatctgaaaaggcttaaactatatgattccaactatattacattctggaactggcaaaactatgaagaccgtggaaagatcagtggtttccagattttgggattaggggtaggggtgaataggcagaacaaaggggagtgaaatactctatatgactataatgatagatacatgtcattttacatttgtccaaactcataaaatgtacaacaccaagaaagaactctaatgtaaactatgaaacttgggtgattttgatgtgtcaatgtaggttcaattgtaacacatgtaccactccggtgagggatgttgacaatgggagagtctatccaagtgtaggattagacagtatgtgggacatctctgtctgatatggttaggctttgtttccccacccaaatctcatcttgaattgtaatccctaggtgttgagggagaggcctggtgggaggggattggatcctgggagcagtttcccccatgctgttctcatgatggtgagggatttctcacaagatctgagagttttataaatggcagtttcccctggtcccccgggcttctctctctctctctctcctgccgtcatgtaagacatgcctgcttccccttctgccatgattttaagtttcctgagggctcccccagccatgaagaactgtgagtcaattaaacctctttcctttataatgacccagtctgggatagtatcttcatagcagtgtacaaataaactaatatattgtccctccttcttaatttactgtgaatctacaactaccctaaaaaatcatctttaaaaaaagttcttactgtaccatttacctcctccctggtatcatttacctaaattgtaaatttgcattgatttgtgtgaytatttgattaatgtgcatcttccccactaaacagtaaattccaagatgtttgttcaccgtaagttaactagtgctcagcatatagcagggtttcagaattccttgaatgactatacataaatttacaaatatagcaaatgtttttaaattcattaagccattatcttcaatgcatctttcaggatgatttgagaggaaaagataggagtgatgcaggggaagagaaagaagcagccattcctatttgttttctgcggtcatttggttaaagcctaagcaacatctctaagttacaatggtttgataataatgagtttgcattcctgcagcacctctcttctcctgtggtttgcagacagatctcagcctcactttggggtgactcttctacaaacgatgctaaaaacagatcttgtcttgctactaaccaagcctaatgagttttctctgagaaggtgccaggtccccttccaaagtacttaccctgtagctttttatgatcatctcattttcttaatacaacggcatgatgtcaaaggcaacaaaatcaaccgtctttgcatgaactctcaaaaggagccatttagggtccctgcatctcttttctctaggtaggcaaaagggttgtgatccatcccagcgrgtggtgtgggagtggctgtttttacctaacctttattgagcacttactttgtgctagtccgtttattgagcacttactttgtgctgtctacgcatcccctggtttaatcaaaaccagaaaagggtctctgggcgtccaacgtgggcaggatgtgattaccagctggttgtcaaggcaacttagccackgcaggccaggcctgagccagggaattgggaagtgggtccccccgcctcccctgcaagcagatgaagattcaatccccagggccaccccctgctacccaacacgcttaccctcctggctcagcgagggcagagtgggcagcacctgcctgcccaggtcctgcagggcacgggcgatcgtatccaacatctccaatttccaggtgactccgtactgaatgttcgatgggtctcttctttcttatatggaatgtgcacaaaaataattttcccaccctccagccccttctccacggagctttggatgtgccttaaaaataagagtgacgaaaatcttgaacttcttgactctttttcttctttcttaaataaacttaaacattggttctcgccgtccctccccactgctctggctctcgggcagctcccacagcaagagccgcaggaactgatgtccggcaccgagtgagagtgtgcagacccgcgccctcctgaccaacgagagacccaatgaggggtgagctgcagcctcgaggaagggaggggcaccagggagaataggcccggcagagggaagggcgcgttgctgggacgcgagaaaggctcgctcggttgctaaggcgtcaaggctgggattcgacctcacccccttagatgggcggcttccaggttgcccaggcgattcagaagctcgaggcagcgaggttggaagtaacttaaaaataaataaataatgggtttttacttctctgaccccgggcagcgaagaaacgtggttagagtggtagtttttgtaccttggacaaatctaggaatgccttttgcccagagagatcgatatttgagtctccagatctgtttgagagtttgagtttgagctggaatttgtttcttggtttgcttttccctgggctctcttcctaggaaatggagagctggagaagtggggaggagggaattgactttttttaaactacagtcatttcccccttttctctacatgtcaccaatctcatcctgaagaattgcgtgcatgctctcccctctgctggtaattatcacaagctgaacatacctatgcaaaacccatccaggtcaaaaaatagaatgctagcacattgcacagatcagcacttcattacccctccagtcattagccaacacatactgcagattcattttgcctgttgaatctttggaatcatatagtatgtatccttttctgtctggctctattcaaattcacattatstttatgaggttcatccatagtttctatggtaataatttcttcatttacactgttgcatattattcctttttatgagtatggcacaatttatgcattccactgttgaagggcatttgcgttgtttccctttgagrctactgggaataaggctgctgcaaacagtctcacagaacacttttgacagatasatgtactcatttctgatgtgtatataactaggagtagattcatgggtcatgagaaatgcatatgatcaattttaatagataatgccagctaatttttagtggcaatatcagcattattgttccacattaagataatggaattataaaaataattgttttacaatacattagattttgaattaaatatagtggtacttttaatctctagaaaagctgtcttcagttccagaagatggtggtggatgctaattattagtgaattgtagatggctaaaggaagctgtaaaaagaataaggacaaagacttttcttccaaggttttactttccttttgtcaaaggtctcttgacaaaagaggctgtgtagatacatgtaaccctgtgttgactagaaacttttaatgagctataaatattatatatcctgaaaatacatacttttcagttgctattaaaactcaggcaaactatgtacttccactgctacaaatttggatatatttggatataaaattggatgtattagcatgatacatacaaagatatatgtatatgcaacattgtttatmatgttaattcttagaattagcctaagatgaccatcatagggaactggttaaattgtgaatacatacattggaatacatttcaagagtttacttaaaaggaaactgcacatttacgtgctgatgttgaaaaagtttcaaaatatagtaagtgaaaaccagtagcagcatagtatttttatataatgtaatcctgtttccttcaaatataagwatataagtatgcatacgtattcatatatatttttgtaaacatatgggatatttgaggaaagatacatacacaaaaatattaacagtggaattttggatcaggcaaaaytttgtatggtggaggaggcattccaagaacttttatattcacttttctcctttatttactgtttaacaagrgcatgaattactttataatatttaagataatttaccaaagagaggaagagagagaggtacaggtagagtgtagggatttatgcaaacactgaaggaaacaaacagggccaaaatgttcccaagtatttcaatgtacatttacttttctgcaagctccaacttgccttgcaaaacccacattgaatgggcagtcatttttacccaagccccaaggcacacacaatattaagtggcttatattaaaggcaacttggaaaaaaaaactattgaaaaagaaaacataatactcattatacaacaccagaatagaaatttgcaataaataatttaaccacatctattgagtacctaatttgtgccaagcactttgctagttgctaaaaggaatacagacacttaaccagaaaacccctacagataagaagttcacaattcatttttcaccattttaacaaatatttattgcaggaggttctaaaatcaggattgggtttcaaagttaaagtgtaaattgaaaattggatgtgggaaaactactccaggaatcccttcttaggaagggaccatatcagagacccacatatgccatctctcagtttatagacccaatgcagtctttctctcctcacactggagcagatcactttcttcaggagagatgtaatgaaacagttggctagagtttaggaaagcagtcttattctaaaaattcaaccaaatagaattgtatgtactcaacactgtgccatgcttacactatgatacacactcatgaactgagacagattgaaaatatagcagatgtatatcttctgtcccttgcttactcaaggatttatgcagaaacagacttgcggtagcttcatagastgtgaacttagccaagatagaactacattttccagaattccctttcctatatgattctaggttagggttagtcaaaagagaatgtgtgtgagatttggaaggcagaagtaaagcagcagccatgtgatctgaagccctaaaggtcatygtagggccaggcactgacctgctggctcaccgtgtaggcatgggccagcagcctggcctgcagctttgcagctcctgccagatctcctcattctgcttctctcaatcttagaccaggtacatgtgcagcagtgttgccaaaggtactacctaatcctataagtccctcacatcactgaggttggacgcaaggaaatacagatgcaggttgcaatttgtcctcacaggatctagtttgcctgtgtgtaaccgcccaatgggttcwtcttgcctactgcccaaatgaagctgatttatcaagatgggggaattgcaatagagaaagagtttaatacaggcagagctggctaaatggaagactggagtcttattattactcagatcagcctccttgaaaattcagaggctagggttttttagtttggtggaaaaggagctagggaatggggaatgccgattggttgggtcaagtgatgaaatcataggaagttgaagctgtcgttttgtgctgagtcagttcctggtggaggccacaagaccagatgagccagtttttctgtctggaatgtgccagctaayccatcagaatgctgggtcagaaaaatcggctcaaacaccaatcttaggttttacaatagtaatgttatctatagaggcarttggggaagttagcaatcttgtggcctctggctgcatgactcctaggccatggtttctgagcttgtggctaatttgttggttttacaaagaacaatcttgtccccatgcaagaagggagtttgtttcagggaggggctgttatcatctttgtttcaaagttaaactataaattcctcccaaagttagttcagcctatgcccgggaacgaacaagggcagcttggaggttagaagcaagatggagttsgttaggacagatttcttttactgccataattttcctatgtcagatttttctcagtgtcataatttttgcaaaggcggtttcacttgtaggttccagattgttctcaccagttccaatctttccttattcttccccatttcatgaccatcttttcttcctattagccttgctgtctttaggccctacaccagacacagaggccaacaccagacagagatgacttaaccagctcttacaactatgtaagggctagtgctcataataaattttatattttctatcactcttacaggttctgcttctctgattgaacctgaatgatacagaactggtagataaaactaaagtatttcaatttaaagtattctctttaagttttacttagacttgaattcacataaattatgtatttgtgcactgcaactgtattgtaaagatttatcttagtctgttttgtgttgttgtaaaggactaccggagagactgagtaatttataaagaaaacatatttatttggttcacagttaagaatggctggaaggttcaagattgggtatctgcatctggtggaggcctcmggctgcttccattcatggcaaaaggccaaggcaaaggggagccagctgtgcasagatcacttggtgacagaggaaacaaaagacgggtaagggagatgccaggctctttttaacagccagctctgaggaattaatagagtgagcactcactccctaccragggaggtcatatatctctattcatgggtttcgcccccatgaccaaaacacctcccattaagcctcatctccaatattgggccaggatcaaatttcagcatgaggtttggaggggacatcaaaccgtagcatatgttaaatgtcatgtttgaggcatgaagacagtgtaatgggaattcaaggggaggaagattatatctctgttaggccattcttgcrtggctataaagaaatacctgagactgggtaatttattttaaaaagaggtttaattggctcatgtttctgcaggctgtacaagcatggtgctggcatctgcccagcttctggggacgcctcagggagcttttactcatagtggaaggcamagcaagagtaggcttatcacatggcgaaagcaggagcaagagagagagtgggtgggggaaggtgccacacacttaaacaaccagatttcgcaagaactcattcactaccgtgaggatggcaccaagctatgacggatccacccccatgatccaaacgctctctgccaggccccaccttcaacacggggattacaattcaatgtgagatttggcagggacagatattcaaactatgtctgcttctaactgggatgattggcctgaatgctaaacaaagaagcttgaattgtatttggaaggtgtggatagttcctgaaggccttgaataagagaatgacctaatcaccactatattcttctgtattacattaaaaagaagtttgaatttcattacatgttataagtaatccatatgtcagataacaactaatcagagaaatttctcagagagataggggaaagctaccaaataactaaaaggataaccacaggaaggctggctacagaatgattaatgtggttgagtgacagccatttagaagcttttgacagatgaaactgcaaagatgcattcattttcttacaatacaaatgaaaaaaagtaaattagctaaggtgataaatgagattaccttgacattaagctgtggaatgatctcccaaagaaaaaatatagaaaactcatcaattcagactatttgaaaatagaccatttcaagtaggagttaacacactattgttattctacctggactctttgcagaataaaagtcatacaatagggctttcttatgtttaatagatgttgtctcaataaataataaatatgataataatacccgtgtatataacattatctatttatgattagaagagaaagttaatatttaagctgtactcatctgacctacacctcttataagcattttgcaccttttttctatttcacttaagctaaagtgaggaatttggcatttggaaatctgagctcaagtctagtattaacataaataggcttgtgtttataactgaataaaatcttaatatttctgagcctgtttgttgttaaaatagtaataatgactgtaaatgttaacagagtatatcccagtaaacttaaagaaataatgataaaagtaaaaataggaaaaaaagctctttggcttccaaaaattctaaacctgcagattcttgccccattttaccataagattataccactttacataggcaaaaccaaatgtatattctataaacaaaagaataccttgactattttttaaaatggagactactgataaataaattttgaaaaattgtaaaataagtgactttaggcaatgtatggtaagttggtcagccaattcacttcacacaatatacaaaaattaacttaaaatagttcatagacctaaatctaaaagtaaaagacataaaagttctagaataaaacataaaagaaaaatcttgtgatcttgaggttaagcaaatatttaagataaaaagcattaatcataaaagttaaaaacttgataagttggactttatcaaaattcaaaacttttgctctttaaaggcatcattaagaaatgaaaagtcacagaatagtagaaaatattcacactacmaatacctgacaactggtatataaaatgtatttttaaaatctcccaaagctcaataataagaagataattcaatttctttaatggacaaaatatttgaacatacattttacaaaagcagatgtataaatggtcagtaaggagatggaaaggtttgcaacatggttagtcattaggaaaacacatattaaaactacaatgagacaacactacattaggatggctacaattaaaaagactgataataccaaatgttagtgaagatgtggaacaattggagcttatactctcaaggtgtgaatgtaaagtagttcaaaaaactggcagtttcttataaagttaaacatacacctaccatatgaccagccatcctagttctaagcattcaacctatagaaataaaaaatatgtgttcacacaaagtgttaaatgcaaatattcatagcagccttattcacagtagccaaaaatgtaaaacagcccatgtgtccatcaaatggaaaatggataaacaagtcgtagtatatctatacaaagtaacactacttagtaataaaaaggartgaactactgacataggtaataacatggatgaacctcagaatcatcatgctggctgataaaaacaagacwcaaagaatacatactgtgtggtttcatttatataaattgwagaaaatgcaaactaatttatagtgagtccagcaaatcagtgattggctggggccaggatcagaaggagaaatgaactgcaaagggggcatgggaaatattttggggtgtaatggatatattctgtatcttgaatgtggtagtgatttcacaggagtctacagctgtcaaaattcatcaaagtgtgcactctaaatgggtgcagcttattgtatgtatcctgatgaggattttttttttaagaagaaacccagaattctaggaaagcaaacttaaaagcttaataaatgcaaacttaaataaaatttagttaattcataagttgactaaaaagtaaagaacttacttgaggattttaacagtagacagaaaacaacatatgtcaagaagaatgaacttaatgaaattatccaaattgaacctcaaaaaggaagaaggtaaaaagaacctcacacagtaagaaatgtgaaatatatgaagttccaggaagagaagacagaataagaagtaatcatttgagaaaaatggctgataattttccaaattgatgaaaagtattaacaaaatcttcaagaagcttagcaagtcccaaataggataaatacaatggaaatgacacataggtacataaaagtcaatttattgacttttattaaccttatttattaaatagggcattgaatctataaattatcttgggcagtatggccattttcatgatattgattcttcatacccatgagcatggaatgttcttccatttgcttgtgtcctcttttatttcrttgagcagtggtttgtagttctccttgaagaggtccttcacatctcttgtaagttggattcctaggtattttattctctttgaagcaattgtgaatgggagttcactcataatttggctctctgtttgtctgttattgatgtataggaatgcttgtgatttttgcacattttctatcctgagattttgctgaagttgcttatcagcttaaggaaattttgggctgagacgatggggttttctaaatatgcagtgtcaactgcaaacagggacaatttgacttcatcttttcctaattgaataccctttatttctttgtcctgcctgattgccctggccagaatttccaacactatgctgagtaggagtggtgagagagggcatccctgtcttgtgccagttttcaaagggaatgcttccagtttttgcccattcagtatgatattggctgtgggtttgtcataaatagctcttactattttgagataacgtcccatcaatatcaagtttattggagtttttaacatgaagggttgttgaattttgtcaaaggccttttctgcatctattgagataatcatgtggtttttgtctttggttctgtttatatgatggattacgtttattgatttgtgtatgttgaaccagccttgcaacccagggatgaagccaacttgatcatggtggataagctttttgatgtgctgctggattcggtttgccagtattttaatgaggatttttgcattgatgttcctcagggatactggtctaaaattctcttttttgttgtgtctctgcctggctttggtatcaggatgatgctggcctcataaaatgagttagggaggattccctctttttctattgcttggaatagtttcagaaggaatggtaccagctcctctttgtacctctagtagaattcggctattaatccatctggtcccggactttttttggttggtaagctattaattattgcctcaatttcagagcctgttattggtcttttcaggggttcaacttcttcctggtttagtcttgggagggtgtatgtggaaaatgactaagtttgtgctgacataaacaaagcaaattacttccatatgtttgtttaaaaaaaataactttcctgcaaagaaatgccaggtttatatggctttaatgctaaattcttacaaataattcaagaacaaataatactggatttacacaaactattccagacaattaaaaaagaagagacatgtctgaactcactttttaagactggcaaaacattgataccaaaatatgacagtacaagtaaggaaatttatagtctagaatctctcttgaacatagatataaaaatcgtaacaaaatatcgataaattggcagggtgtagtggcttatgcttgtaatcccagcactttgggaagtcaaaagtgagaggattacttgagcccatgagtttgagaccagcctgggcaacatagtgagatcctgtctctaaaaaatgtgtttacattggtggcatgcatctgtaggcccagctactcaggaggctgatgtgggaggatcagttgagcccaggagtatgaggttacagtgagctatgatcacaccactgcactcyagcctgggtgacagagcaagaccctgtctcaaaacaaaacaaaacaaaacaaaaatcaataaatgggatccaggaatataaaaaaataataacataccataacaaagaaggatgtactccaggaataaaaggttgatttaacatttaaaaattctgtcattataattcaccacattaacagaataatatgggaagaaggggcagaataaaatcatcttaataggtgaagaaaatatatttgataaaactgaacatgcattgatgattttagaaaaaaatcctcaacaaaggagaaattgaataaaacatccttaatctcaaagggttatctagtaataaaaccccgtagctgtgtcattatcaatggttaacattttctccccagagtcaagaataagatggggatctttactaccacagctgttattcatcattatgctgtaggcccaagagagttctacaagacaagaaagagaaatagaaggtataaagatcaaaaacaaaaagtaaaactgtcttcatttatgtattacatgattgtgaagacagaaaatctgaaactatacaaactattagaattaatttagcaagctctctggatacgaagtcagcacatgaaaaccaagtatatttctatatactatcaagaaatgatcagaaaatgaaatattctaaaatgtaatttatagtaacattaaaaaatcaaatatttaggaacaaatttaagaagagttccacaaggctaatagtgaaaactacaaaatattcctgagagaaattaaaagtgacctaaataaatgaagagctatatcatgtgcatgaatcaaaagactcaaaattgataagatgtcaatttcccccaatttgataagtagattcaatgcaaacccaacctataaaaacccacataaaatatttggtcgacatcaacaggataaatcttaaattatatggaaatgcaaagaacctaaaatagccaagaataatctttcagaagaataaagttgaaaactttactatcagwtttcgagactaactataaagcggcagtaattaagacaaggtggtattggtgcaaggagaggcaaataggccaatgtaacaaaacagagtccagaaataccctctacatatacatcatttagtttataacaaaggtgttactacaattcaatggggaaatgatagtgtttttattaaatggtacttcaacaactgtatatccatatgggaaagaaaataaactctaactcacaacaaatccaaaacttaattcaaggtggatcatattctctaatgtgaaatctgaaacagaaagctttagaagaaaacagaataacttcataactttggggtagacaatgatttcttaaacatgacagaaaaagctctaaccttaagagacaaaattgataaatttgacttcattaaaattgagaacctctattatcaaaatacattagcaggaaattgaataggcaattacaaagtaggagaatatatttgcaatacttatatctgttaaaggattatatacataaataactctacggatcaataagaaagctttttaaatgggcaaaacacttgaacaggcactcttcagaaaagaaagataaacaaacatctaccttatgatgcagcaattctgttcctaattatataccccctaaaataacatatgaagtacatatgtctgtaaaaacttttacaacaatatttaaagcagctttatacttaataaccaaaacttggcaacagcctaaacatccactagcaggtgaatgtataaacaaattgttatttattcatacaatggaatataacacaacaataaaaaaataaactaccactgatatacagaacatagataaatctccaaaatattatggtgagcaaaagaagagagacataagagtacaaactgtatgactgcatttatgtgaagctyaagacccagaaactaacctatttgatagaagtcagaatatttatctctgsaaagtagagtattgactgggagttactacaagagagcttccttggaggctaaaaartgttctgtatcttgatatgattggtggttacaaaagtgtatgcatttgtaaaaatacatacatacttaagatttatttattttactgtgtgtaaattaaactcgaattttaagagtatagagtggcagtttacatactctctctctctctctctctctctcttatatatatatatatatatattttttttttttttctagacagagtctcgctctgtcacccaggctggagtacagtggcacgatctcggctcactgcaagctacgcctcccgggttcacaccattctcctgcctcagcctcccaagtagctgggaccacaggcgcccgctaccacgcccggctaagtttttgtattttttttagtagagatggggtttcaccgagttagcgagcatggtctcactctcctgaccttgtgatccgcccgcctcggcttcccagagtgctgggattacaggcgtgagccaccgcgtctggcgcagtttacatactatttggcacattccatgcacaggctttgtgcagcatgctctttggtatcaggatattcaaaatgtaaaccttcttaatcccatckagggacaaaatatagcatagtggctaagagtttgggtctaagagtcaattattcttaacaaaaatttgttgagctccttattatgtgccaggctctggtctgggtagtgtggtaataagcagcaaacacaaccaagagcttgtcctaacagagatcatagtctaggaggagatacagacaatacaaatataaataatataataatgttacaaagaaaaataaggcaggacaattggatgcacagtgaggtgtctatttcagatggattaatgtagcttctctaagatyacatttgagcagagacctgaatgacgtgaagaagccagccatgagaatctttagtggaaaactaaaccctaggcctttaattttgctattctggaaaccctgagcaggctattcgatttctctgtgtctctgtttcaccatccataaaatgtttattatttccagatggtattaaggatkaagtgagatatatgtaaagtgccaacacagtatctgacatatcataaggatacaatatataattattgtgtaaatcatggaataaaatgcaaacagaatgcatcagtgttatagggtaggagcttttgcttattctttttttttgggttttttttttttttttttttttgagatggagtctcaccgtgttgcccaggctggagtgcagtggcacaaacttggctccctgcaaccttcatctcctgggttcaagccattcccctgcctcagcctcccgagtagctgagattacaggcacctgccatcacagcctgctaatttttgtatttttagtagagactgggtttcaccatgttggccaggttggtctcagactcctgacctcacatgatccacccgcctcggcctcccaaagcgctgagattacaggcatgagcccccgtgcctggacacttttgcttattcttctgtataaatagtgtaagtgttccataagcatctgaggttcagtgtatttaatgtaataccagttttgcaatgcatcagtttcaatacacctctagcacagaaaaggacaagaaaatggggaagctaaagagcaaggactggctaaggaaaactgagtattctgagggatagaatcatagttgttaccctaaacagatggcccgcttttccaaggtcaggtcatatgatgcagaattgagacaatcccaataataagctaaacaattgaataaccatagttaaatccaaatctgtttgtacatttttcacacctttgttcattctatttcctccacctgaaatactgtccattcccagcctacaacctgtgattcctagaaggcaatgtgctttcttaagcctctctacttctggtggttctttcttaaattggaattcccctcccaatctctatcctgtccttgggtgcaagcctcaactgtggttaaggacgccctcccctgcctatctgtatagctaggttaggcgtccctcatctgggcttgcatttccccaatatttcttgaatcactgttaagtaaaagagcttcctaaatatgcaagtgtttgggaatgtcctcaggatccttgtcctccattctatacataaagcaccatctggtggtgaaagaagatgactatacttctaggtcaccaagatgtgttttctgttttctgagctttcagagagcttttaaaatcatgttagaggaaaaaagccacactgacttgcatagagatgtacctattgccaaagaacagtttttcttgagtgaatgttttctgctttcttgctcacttccattttctaccacccttctccctgtttccttccatccttatttctcaatttctttctcctacatttcaactggcccactgaaaacacagttctggccaggcacagtggctcacgcctgtaatcccagcacttcgggaggctgaggcaggtggataacttgaagtcaggagtttgagtccagcctggccagcatggtgaaaccctgtctctactaaaactacaaaaattagcctggcgtggtggcgtgtgcctgtagtcccagctacttgggaggctaaggcaggagaatggcttgaacccaggaggcggaggttgtggtgagccgagatcgtgccattgcactccagcctgggtgacagagctagattccacctcaaaagaaaaaaacagttctggttggcatttgttttgttttggctgccctaagagcctccacatttccttttggaattcacagatctacattgtgtgtaatcttagtggggctgccattcctggtgactacattccattaccaaagccgaaggaaacagatccttgccctccttgactctgcaggaccaggggccaggtatgtgacccaatatcagtcatcagatgctctttctggggctcagactgttgagctgttgacaggcagacagcaggaaaatgtggaagttatttccacagggatggtatgcacttttcactatcttgctttaagaaaattgcctgggttcctaatggccaatcccccagatccctcttgattcctgcccatttccaggtctgattgtcctagctcccatcactctgagcatcccaacagtcttccaatartttccttctgcttcagttagtccaaatcaatatctgtggccttgtctgcttacaagtttataaaaccactaaatatccaactagtgtggtggcataaaaggagactatccacccctccaccccattatcagagaataaacttgaggattaaagagaaacatttaaatcctagctttagttaaccaggttgcttaagtagagccatgtgccgttaatgtgagggtcctttgaaatggaaaccagaaaaaggaaaggacaaatgtcaataggaagattagatgtttctaatgtagattagattgcagagtgatggaacgaaaattaatcctcaattaatcctcataatggcacattgatttgtggtactttagggggaaaccagctgcagctggaaagcactcagtggactccccctgttcttcagtctttacagaatctctctccctgaagagacaaatggagacaaaaaagcagaaagaatacatgtgtacatccagtggctatattaagcaagaaaatctatgaaatgcaaaagaaactaggggctgaaactttattcggagggctaaagggtggtttgtgtaaaagaaacggagaattgctcctgagatagcctgtcatctgatggcttatgaggtgaggttctgccytcctcttgcttagaggtggggagagactagaccaaaagctgaatgcctgatctctgcctatggactccaagtgactcaggaatgttcacttgactctttagtaaagaacagcttgaagctctataaaggtctagtttgtacacagagaaaacaacctatttggatcagggaagcagaaccccactccatatggctgctgactggcctccccctcactgtggctcactatagaggagaagtgtcagtagctggagagatkgtaaggctgattccctttctgactccctgggatatccctttctcagaaatacagagaaactgtcaacgaaagagttgacactagaaaataagtagggcatacccaagggcatactcagtcactgtgtcagaggcgtttgaaccagagtgactccattttgagtgagggctaggaaaataagactgggacttgctgggctgcattctcagaaaatgaggcattcctagcctctaaatgtttacggttaagggaacaaattaataatgtttcytaaacagacccagacttgggagtgtccagatatcctgatatctggagaasaaaggcattcctgattttgctttaaagataatagtatcaattcttgcaaaatatagtaattaagaaaattaatcctttatcacaaacccttgtagcagagcacatctccccrtatatacaagcattgtacctagggtggacgcattcctcttctgactttcaggaacgtcctactcttatcaatggagtagctgttctttcaccactttattttcttaataaacttgcttttactttgcactgtggactcgccctgaattctttcttgcatgatatccaagaaccctctcttggggtctggattgggacccctctcctgtaacaactggtcctcacttcaatgctttattggactgcttttgttatttgaggcttgagggtgttagcaaaaaaaaagtccaactctgtgaaatatttgacgtggtttattctaagccaaatatgagtgtcatggcctgtgacacagcctcaggaggtcctgagaacatgtgcccaaggtggttggattatagcttggttttatacattttagagagacagaagttataggcaaagacataaatcaatacatgtaaggtataaaaggcaggatatcttgaagcagagagtgggggatgtgggtggaggagttcttccaggtcatagatgcattcaaagattttctgattgacgattaaaaggattaagctttgcttgagaaatggaagtcgacataaagaaatgcttaagataaggggggttgtggaagccaaggttctttttattttatttatttatttatttatttattttgagacaaagtctctctctgttgcccaagctggcrtgcagtggtgcaatctcggctcactgtaacctccgcctcccaggttcaagcgattctcctgcctcagcctcccaagtagctggaactacaggcacacaccaccatgcctggctaatttttgtattttttagtagagacagggtttcactatgttggccaggctggtcttgagctcctgacctcgtgatcaacctgctttggcctcccaaagtgctgggattacaagcacgagctacctcaccacctggaagccaaggttcttgttatgtagatgaagcctgtaagtaacaggcttctgggagaatagataataaatgtctgtcagaccttaaaaggtattaaatctctcctggattaggaaaagacttgtaaagagaaggggattctctaaagaatgcaaatttcccccacaggagacagctttgcagggccattccaaaatacgtcaaagaaatatattttgggataaaatactttgatttcctttagggccgctgtcatgtgatgttataccagagtcaggctggagttgggtatcttattactaacaacagtctgttttatcaatcttatgatttctgttttaatgttaatgctggtcagttgtgccttaactccaaagggaggagggcataacaaagcatgtctggcctcaacctccacttcccatcatggccttaacaagttttttatttgggatccccttggccaaaaggagtccattcagtaagctgagtggcttagaattttatttttggtttacaagggtattattacaggaaaggggtctggatccagaccccaagagagggttcttggatctcccacaagaaagaattcaaggcgagcccataaagtgaaagcaagtttatgaggaaagtaaaggaataaaagaatctctgctccacagacagagcagccctgagggctgctggttgcccatttttatggttatttcttgatgatatgctaaacaaggggtggattatccatgcctcccrtttttagaccatatatggtaacttcctgatgttgccatggcatgacattgtcatggtactggtgggattgcagcagtgaggacaaccagaggtgactctcattgccatcttggttttggtgggttttagcaagcttctttagtgcaacctattttatcagcaaggtctttatgacctgtatcttgtgctgacctcctatctcatcctgggactaagaatgccttaaccatctgggaatgcagccccactttgcctagttcctatttaagatggagttgctgtggttcacrtgcctctgacagcatcaaacatttgttgggactgaacctcagtgctcaattaggtatttgatgaagttcttgaaaagaggagattaaagaaaaaacctacagaactaaaactggtaatggattctctgggtcaggctctaacaaaataatcagttgtggccaggcacagtggctcatgcctgtaatcccagcactttgggaggctgaggcaagtggatcacttraggtcaggagtttgagaccagcctggccaacatgttgaaaccctgtctctactaatacwacaaaaattagttgggcgtggtagcacacacctgtaatcccagctacttgggaggctgaggcaggagaatcccttgaacctgggaggcrgaagttgcagtgagctgagattgcatsactgcactccagcctggacaacagagcaagaccccatctcaaaaacaaacaaataatcagttgtgacaaaatagtcagttgtcatttgggcttgtcattattgagaataatcattatcacataagcaaaccattttgttacagtgacgaatccatacaggtctgcagcaacctcagctcttgcctcctcagaagaaagaatttgactgaggggcatgaagtagaaggagaaaccaaggcaagttttagagcaggagtggaagcttattacaaagctttagagcaagaacaaaagaaaggaaagtacacttggcagagggccaaatgggcaacttgaaggaaggaccttttgacttggggttttatatgctggcatacgttcagggtcttgcatcccctctcccctgattcttcccttggggtgggttgcctgcatacacagtggcctgccagcacttgggaggtgagaatgcgcagtgtgcatattggagctgtatgcatgctcacctgaggctttcttccctttactgatggaatgcccccagaaggtcatataccagttaaaccctgccatttcacctctcagtgcacatacttgagcccgtttgcccaactcctgagatcctactgggaagctactgatcaccattttcagtttttttctatctatagggagactgactttccctggtgctggctgtgaccaattattatttcagagagacagttaataaccccttgaccatcagctcgtggttgcctgacatgcttggtcaggcgacgccctctcctgacctgctcatgcctgactagccacctactgtaacaatgtgactgagaaactcacaaaagcacaggcataaaacagtaattaatggcagttaaaaattataaaatgctattttacttttaaatgtacacataattgtacttcacaattcaaatgctaaaaaggtttttgaatttttgtgaaataaatgtaaaagccaataaaaataatcaaaggccttccaagttctctaggaaaaacatcaattaaaaaatagcataattacttcgtaaagtgattttaattttatttgtgtatcttatgtgttgtacatgtgtcagaaattccttcctttttaagactgaatgataatttcattgtatgtatatactacattttgtttattcattcatctgtcaatggatgcaaagctacttttacatgactgaaaaaacctgataaaagcccaatggtccagttgtttcaccacgaaggtccttctttccttttcttttttttttaacagactatttttaagagcagttttaggttcacagcaaaactgagcagaaagaaggyggggatggttaacgagtacaaaaaacaggkaaagaatgaataagatctgtatttgatagcaaaacagggtaactacagtcaacaatttattgtatattttaaaatatctgaaagagtgaaattggaatgttcctaacacaaagaaatgacaaatgcttgaggagatggtaaaaaaattttggaggcttaatataaaatggtagttcagggttgctttttagacaggtttttgctctggcactcaggctggagcacagtgttgcgaatatggctcactgcagcctcaacctcctgggctcaggcaatcctcctatctcagcctcccaggtagctaggaccagaggcacatgccatcatgcctggctaattattttattttttgtagagacagggtctcaccacgttggtctcgaactcctgggctcaaatgatcctcttgcctctgcctcccgaagtgttgggattataggtatgagccactgtgaccagccaggcttgcatttttatttttgaccataaatattctttcatttaaaaataatttttcaggctgggcgcagtggctcatgcttgtaatcccagcactttgggaggccaaggcgggcggatcatgaggtcaggagatcgagactatcctggctaatgcggtgaaaccccgtctctactaaaaatacaaaaaaattagccgggcgtggtggcgggcgcctgtagtcccagctactggggaagctgaggcaggagaatggcgtgaacccgggaggtggagcttgcagtgagccgagatcatgccactgcactccagcctgggcgacagagcgagactctgtctctaaataaataaatagtaatttttcacttttaaagtaaaatttatctactcataatttgactacttttaggtcctagtttttcatagaatgagttaggaaggaaggactccctctcctaacttctgaaagatattgtagagaattggaaaaatttcttccttaaatgtttggtggaattcagcagcaaacctatcttggcctaatgctttctgtttgggaagattagctattgatgccatttctttagtagatatagtcctattcagattgtctattcttccttttcaatttctccctagtgaccctcagcttttgaaggattttcgtctccactgtctttttcattttttcccaaactccaagtacccaagccacaagaaaataaaattccaaagaagatgaggccgaggcagggggatcaggagttcgagaccagcctggccaacatggtgaaaccccgtttctactaaaaatacaaaaattagctgggcgtggtgactcatgcctataatctcagctactcaggaggctgaggcatgagaattgcttgaacccaggaggtggaggtcgcagtgagccaagatcgcgccactgcactccagcctgggcaacagagtgagactccatctcaaaaaataaaataaaattccaaacaagaaacaaatgctttgttatactatgcaaccctattgtttatgcagttctctttaggcttttagaaatataatacatacctagtgtacaaatagttatcagacattttatcattcaaaagcagccccaaaggaatatgacaattttrattgatctttgatgctggtatgtggtgggttacttggccagtgagtgaccctggctgatatcaaatatgatatacttcaacaatttgatttccaatacttattgagcactaagaatgtatcaggcattattctaaaarttttaggtaagtttattccttataacaaacttcaaagatatatactgtggtcaattcattttacagatgaagaaactatgacacagagaggcgaagtaacttgataagatcaaaacagtaagtaaatggtatagccaaattttgaacacaagctacctgactctagaggccataaccttatccactacactataatgcaattttgtggttctctgtgcatcactgaagaaaaaacagatgctcacataattttttcttattttgtttctttggaaaaataaagccaattggctaatgctattgagatctaagaaaacttctgttcttgcttagaaatgttagttcttttatccattaaacacacacaaaaaaagctgaatttagtgatgtctcatattatctcatacatatctgtccaccacaggctctaaatggaaaaggagaaatagcaggtcatgaaactgttttaatgaatgtttaagtcagaaaatgtatataaatgacttttattccatatttaaacttaaatttttatataggttttaagtgttatctcttttccacaaattatttattacaaaaagctcaagttgtgtttaacaaaatggacttataacaaatgtcttttaaaagattctaaatttgttaattcttaagctacaaccataaggacttcctgtgtcagcttcatttgtgatttccagatccttagttaactttaaggatatgaatattcttttgtaagtaaccttggaaaactggacaattttatgacatatgtgctttaataactggtgtagctgttagctaccaggttaaaaaggatgtatagatggctttatgttgatgtgaatacttgttttgaagatattttttaaatgtggataggtaatgggatgtgtatgcaaggtaatgaattttatttatctaagtaaaaaagaattattttaccttaaggagagtctggttatgctagcctagaagagtatttttttattattatactttaagttttagggtacatgtgcacaacgtgcaggtttgttacatatgtatacctgtgccatgttggtgtgctgcacctagtaactcatcatttagcattaggtatatatcctaatgctatccctccccactcccccaaccccacaacaggccccagtgtgtgatgttccccttcctgtgtccatgtgttctcatttttcaattcccacctatgagtgagaatatgcggtgtttggttttttgtccttgtgatagtttgctgagaatgctggtttccagcttcatccacgtccctacaaaggacatgaactcatcattttttatggctgcatagtattccatggtgtatatgtgccacattttcttaatccagtctatcattgttggacatatgggttggttccaagtctttgctattgtgaatagtgctgcaataaacatacgtgtgcatgtgtctttatagcagcatgatttataatccttacaatgaactcaaacaaatttacaagaaaaaaacaaacaaccccatcaaaaagtgggtgaaggatatgaacagacacttctcaaaagaagacatttacgcagccaaaaaacacatgaaaaaatgctcatcatcactggccatcagagaaatgcaaatcaaaaccacaatgagataccatctcacaccagttagaatggagatcatttaaaagtcaggaaacaacaggtgctggagaggatgtggagaaataggaacacttttacactgttggtgggactgtaaactagttcaaccattgtggaagtcagtgtggcgattcctcagggatctagaactagaaataccatttgaagagtattttttaaacttaagagtattcaggccgggcgcggtggctcacatctgtaaccctagcactttgggaggccgaggtgggtggatcgcttgaggtcaggagttcgagaccagcctggccaacatggtgaaaccccatctctaccaaaaatacaaaaattagccaggcatggtggcagacacctgtaatcctagctactcaggaggctgaggccggagaatcacttgaactcaggagggctgagatcactccactgcactccagcctgggagacagagtgagatttcatctcagaaaaaaagtattcagagagtgtagaagttctgaggagtaaactgtatttgacaagttaggggttggaaaggatcaataaatgtgtcaaaatttttgacgaagctggttaaatgtgatggatgtattcacaggaagaaaggcttatgaagccattactacatattgttaaatagaagacaagtaacaagagtaaaactataatctggattttctttctgataaaacagcaaagctatctctggtgagataacaaagatttcttctatcactgtaacattctatcactaagcattttgacatattaagtcattttttaaaaaagctaaaatactaatttggaaaaactaaaatacctaataatcctagtcacatattcttttatcttttatgtttgtgcaccaaaattaacttgatatggttcaaatgtagactaacggttcaacaaatgatgttgggaaaactggatattcacacgcaaaagaatgtgcatattcatttaccattcacaaaaattaactcaagatgaatcaaagacctaaatgaaagagataaaactataaaactcttagaagaaaacacaggagtcagtcttcacaaccttgaattaggcaatcgtttcttagatataacaccaagaacagaaacaagaaaagaaaaacaaagataaactgaattacatcaaaattaaaaacttttgtactgcaaatgatatcaacaagaaagtgaaaagataactcacagaagaaaatatttgcaaatcctatttttaagagacttgtatctataataaactcctagccaggcacagtggctcatgcctataatcccagcacttcagggggctgaggtgtgtggatcccttgagcacaggagttcaagaccagcctggacaacagagtgagactagatctctacaaaaaataccaaaaaaaaaaaaaattagctgggcatggtggtgcgcacttctagtcccagctactcgggaagctgaagtgagagtatcacttgaggctgggaggtcgaggctgtagtgaaccgtgatcgcaccactgcactccagtctaggcaacagagggagatcctgtctcaaaaaattgaaaagaaaaaagataaaaagaaatgaagtacagatacatgctacaacatggaataatcttgaaaacattatgctaagtgaaggaagctagtcacaaaagaccactctctctgattccatttatataaaatatccagaaaaggcaaatccagacacaaaaagattagtggtggcttagggatactagaagctgggagatggggattaactactaatggatatgaggctccttttggaggaataaaaattagattgtgatgacatttgcacaaatctgagactaaactaaaaagcattcattcattcaattgagacaaggtctctgctgttgcccaggctggtcttgaattcctgggctcaaacaattctctcacttcaggctccagagtagctgagattacagctgtgcaccactgcacctggctctttaaatgggttaactgtaaatgggttaactgtgtggaatatgaattatatctcaataaatcttttaaaaattaaattctttaatttaaaaaaaatttttttttttgagactgagtctcattctgttacccagactggagtgcagtagcaccatctcggctcactgcagcctccacctcctgggttcaagtgattctcctgcctcagcttctggagtagctgggattacaagcatgcacaaccatgcccggctaatgtttgtgtttttagtaaagatgggctttcaccatattggccaggctggtcttgaactcctagcctcaagtgatccacccacctcggcctcccaacgtcctgggattacaggcgtgagccaccatgcccagccacctttatatatttttgactaatattcatatcttctctcctctgacaactctttataattttggcctttcccaaattcaggcacagtaagactatgaagatgtcttttatgcctgaactcttcaggtttccttcacattatggaagaaaagacaataggaaaaattaggtttgtttggcactctacaaattttaattaatccccaatcattttaagactttttttttaaaaaaaatcaaacttaaaagaaaaaaagaaaacttaacaaatcaagagattagccttctcctgttaattatgccaggtaaaatttgtgaataaaaatgtttcagtgtttcatttcaggtaaaaagaaacatgctcatgttcatgtaaagactaacacaataactgtctgcaaaaagatatactttacgagattacagaccaagagaattatcactgaatattgtccataatatgttgtactctcataatcattttataaattgtattgttcctcaatagtggattccactcttctctaatctagaaaaacatcattgtctgcaacatcctcaactatcagcaaacttagtcttctggaagagacatcagggaaaaactggcctcactgaaaaattagctcagcagatactgtaacaactagcatggcagtaaactccaagatgatgatcactgggtttatgtttcccaactaaatgacaagtaccttctccagacagctaaacaaccactccatcaggagaccttaaaccaatgattcttaggaatcctccagaagccaacatctttggtggaagactactaatcaagaccttcaaatcaaacaaatgacaatacaaagtagacagcatggcaacaaggaaggctacaaggcaacaaggaagattaattttctgatacctttgctactttccctcttctgcttattacagtttggtactccctagagattgcctaaaggtttctcagtattctctcacatttatcattttatacttaattctttatggtgttttttggccaccttaagaattttgagcagttttctcaaactatagctactccctgaatctttcaaattccaccataaaatatatatatatatatatttcctttaaattcttgaggaggccagttaattcccacaggtcccttttggtatttgaattttcttcatatcattaacctcactcttcattcttgtaaaaactggatctctaccttaattaaacaaatatacttctgctacaatcattacagcactgtcagcagacagaatcaagctcaccaaggcaggggacaaatgttggagctatcctcactgcactagtcagttttctccagatttttcagacttctctgtaggaactatttaactcctctaagaatatgcccacctcaaggaaacaattcttggctcactcctgttgtgataaatatttatatttctactatcttctgtaacccagccggcattatttatgtcaacaccaggtttttacctgcctcctgtacacaaacctaccttgcatatatagaataattgttagatgttcagatatttaaagcccttttctttccagcatatcacgtgtctccgagaataaccagaaacttccaaaataaggcaggtataggctactcaggaaagctcccagaagtgatgactccttatgcatactgtgcaagatactattctagaagtaagaataatactagaaaatgtggcccaaaatttcactcccatcatctgctctggaagcccaagaaactagtttaaattcactacaacccaagattatcatgaataatcatatattcttttgatttcttagcagaccaaggaatagtttgtgtttacttagtatttcctgttgtatcactacaaaaatcactgggaagaggctacctgactgtagaagaggcacaactgaacttcaggatgttttttcagcttgggtttggcaatctaggtcctagatacaagttgtagtacatgaataatcattttgcttctggaaattgtattgcaattagctgatgttttctgtgcagagtattaaagactgttgtgtagccattgccaagtctcatgattcaacaattgctatggtttgaatatttgtcccttccaaaattacgttgaaattttaatcccaatgtggcagtactgagaggtgcggcctttaagaggtgattggatcatgagggctctgcccataggttaagttatcacaggaggggaactggtggctttataagaagaggaagagtgacctcagctggcacaaaagcatgctcagccccctcactgtgtgatacgctgcactgcctaaggactcttcagagtctccccaccagcaagaagcctctcaccagctgcagccccttggccttggaattctcagtctccatcattgtaggaaaaaaaaaaaaatccttttctttatcaattaccaacccagcactttgggaggctgaagtaggattgcttgagcccaggagttcaagcctagtctgggcaacacagtaagactgtgtctctgaaaaaacatcaaaaaaattagctgggtatgggggtgcacgtctgcagtcccagctacatggaaagcttggggcaggatgagcacttgagcccaagaggtcatggctggaataagctgtgatcacgccactgcactaaagccgggacaacaaagcaaaacttcgtcttaaaaaaaaaaaaaacatttaagtcaataaattacccagttttgggtattgttataatcaacaaaaaatgaactactaaccatccattaacaagaagaatcctatattctacacataaatgr

SEQ ID NO: 95376 - DNA, 61305 bp, Homo sapiens
  misc_feature (1)...(61305): n = A,T,C or G
gcccaggccaccattaatgaagaggacatttgagagagacatctttgttgcctgcccaaagaacagcacacaacagaggaccagtaagagaaacaatggcaattataatgaaccattctgtttgttttctggcattaggtaatgtaaaaattttcgcagttctgatcaaggcagggaaaaaagaaaaagcaggtaacaactgacattttccttcccatcaatatctttcaggtctttcgttgaaaatcttccttttgtgcagatttttactacagtgacatttgtactaaagtgtttgcctaaaggaataggctcaagcaataccttaaatacttcatgctgaagaagtatggaaaacatagtaattttacatttataactaagaatctacttaggatcagcaaacatgaggcgaagggcagtaaaacaatttatcagaaaatagagataacactaactttctctggggctgtcatgaggattgtgtgaaatgagataaggaattgtattacttttctagtgtagccataagaaattactacagtcttaactaacacaaatttactatcttacagttctgtagcataatgttttgacaagagtcttcactgggctaaaatcaaggggtcaatatggttgtatttctttttatttatttatttttcttcctgttagatgagcaatgtgccgatgtcataacaaggttcgagggtggcacatctcacacatgtgcacgaatacccaatcatcatgctcatgaactgcaaaaggatcagtatggttgtatttctttctggaagccctgggggagaatctattttctttccagtttctagaggctgcctgaattcttttgcttgtgaccccttcctccatcttcaaggccagcaacagctagtcaaatccttatgtcacatcactatgaccttctgttctaccaccctctttcacttttaaggacccttatgattacatagggctcacccagataattcaggatatcttcctgttttaaagtcagctgcattcatcaggtttcccagagaaacaaaactaataggacagatatagatacacagaaactgagctatatcatgagagattggatcacatgattatggagactgagaagtcccacaatatactttctataagctggagacctaggaaagctggtggtgtagttctaatccaagcctaaaggcttgagaaccaacagtgctgatgtccaagaacaggagatggatgtcatagctcaagaggagagagtaaattagccttccaccttttcattctacttgggcccttaatggattggatgaagcacacttacattgatgaagacgatcttctttagtcagtctatgaattcaaatgctaatcccttccagaaacaccctcacagacctacctagaaataatgttttactggctctctgagcatcccttagcctaattaagttgacatataaaattaattatcacatcggctgattagcaaccttactttgccctggccatgtaatatattcacagtttccagggagtttccatgaacatctcagccaggcacagttgctcacacctgtaatctcagcactttgggaggttgaggtgggaggatcacttgatcccagaagttcaagaccagcctgggcaacatagcaatacctcatctctacagataataataataaaaaaaatagccaggcatggtggtgtacacctgcagtcctagctacttggaaagctgaggtgagaggattgcttgagtctgggaggtcgaggctgtaatgagccatggtcatgcaactgcactccatcctgtgcaacagagtgagagcccacctcaaaaaaaaaaaaaaaaaaaaaagacaaggacatctttggggccattattctgccacaaatgcctgccacttagtctaatacctagcaaatgctaagtgacaaataaacactaattctcttcccctctgactctccatattagtctgtttgtgttgtcataacaaaacgccacagcctgggcagctaaaacaacagaaatgtgtttcttaaagtctggaaactaggaagtccaagatcaaggtgccagctaatccagttcctaatgagagctgtcagcgaagagtcaaactctaaaacatttgaagagatttattctgtgccagatgctaatgtccatggcccatgacacagtcccaggagatactgagaacatgtatccaaggtggtcagggtacagctttgttctatatattttagggagacataaaacatcaatcaatacatgtaagatgcacattgattccatctggaaaggtgggacaactcaaaggaggagggagttttccaggtcacaggtgaattcaaagattttctgattgattgaaagagtttatctaaacacctggaaacaacagaagggactgtctgggttaagataaggagttgtgaagaccaaggttcttattatgctgataagacctccaaggttgcaggcttcagaaagaatagattgtaaatatttcttattcaacttaaaaaggttccagactcttagttaatcctcttctggatcatggagaagaaatggaaagggggaaggaggttctctacagaatgtagattttccccatgagagacagctttgaagggccatttcaaaatatgtcaaataaatatattttggggtaaaatgctttctttcagggcctactactatgttgacatcatattgctacaaagagtctgttctgtcagtcttaaggtctctgcttcaatgttaatactggtcagctgtacctgattccaaaggaaggaaggtataatgaggcatgtccaacctcccattcccatcatggcctgaccaagtcaggtttactttaggatgcttttggcttagaggacgggtccattcagttggttgggagggcttccaattttattttggggcaatgtgcggtggctcacacatgtaatcccagcactttgggaggccgaggcaggaggattgcttacacccaggagttcaaggccagaccagccaaaataggaagaccccatctctaccaatctttttttttaattagctgggtgcggcagtacgcgtctatggtcccagctactttagggggctaaggtgggaggatcacttgaaccagggatgttggggctgcagtgagccatgactgtgccactgcactccatcctgggtaacagagtgagactccatctcaaaaaaaaaaaatgtatttttggtttacagagctactcctggagcatggatggctgctgttttgtcctcacatggcctttcgtctgagagggaggaacaagctctctgatgtctctttttaaagggcactaaacctattatcaggatctcacctttatgacctcattttgctttaattacattttttagaggcctcttctacagccatattgggagttagggcttcatcatgaattttgcatgaacacaaagatttagcccataacactctcaccattttcttcccactttgcccctatcatcttcagtatgcctactcaatctcatctcttagacagttgacatatttttcacatcaggagtgcccaattgggatgcttttatagaaactattcattcctacggccttaatcacatgtgccaaggactcccaaaacatataatttcagtctactctctttgtacttttaacgtttcaacttttcttttttctttttttttttgatggagtctagctctgttgcccaggctggagtgcaatgggacaatcttggctcactgcaacctccatctcctgggttcaagtgattctcctgcctcagcctcctgagtagctgggattacaggcatgcaccaccatgcacagctaatttttgtatttttagtagagacggtttcaccatgttggccaggctggtctcaaactcctggcctcaagttatctgcccaccttggcctcccaaagtactgggatcacaggtgtgagccaccacacctggcctctgtgcttttaactcttacagcctgctttctagatactccatttgtatgtttcataagttcctcaaagtccacatgtaaaaataaaacacattaacttgccctgcccctcacccccaaaatgttccttgtcctgtgtttctcatctcaggatacaatgtgcctccccatgggttaataattcaaatcttaaacttggagtcgtttaacccttccaattctccacattcaatgaatcatcaaatttaagtaattttatcttctaatgtctcctgattccaattctttccacatgtaatgccctgtcatcccattttgcctcccctacatcacattaactagtttccctgtatccactcttgtctccgctatttatttccaattgaagcagtcaaaataaccactgctctgcataaacatatcactgttctttaagtggcacataagttttccataatcagacccctatctacctctttggccttccccatcaggctttaagattcagggtagttgttttaagttctccgatgtctcacatcattatctgtctttacacattgttcctttcacctgccatacttttcttctgcccattagtctggcaaaagtctacttatctcaaaagttgttgcataactcacctaactccaaaattaaattcttttgctgtagtatctcttggctcttagggaggaaatactttttgtctactttcttagattcagtgtttgcaggccccagacttaaagtgacaaaacagattagcaaaagaaaagacagacttaaccacatacataatagagttcacagaaaaaggtgattcagggaggtagagttctgacttatctaccatcttataaagggaaggaaaggggaaaacagcacgtatggaaaaaacaaatgacttttagtaaaaataaatgacaccttaaaacagatgccagatatgatagctttgtgacaatgtctattcaagtgtgttgccagcttctaacctccagtgataagagtcagtcttcctgggtttccctcccagggaggagcttgatttgaattcctccgtgtggttctgcatttagacaggtagatttcagaaactcaaatgtctttgctcaaaataatttttaggccacaatggtgtattgtagaccccttcctggcatacagcatttccctttcttaattcactgcacaaagatagcctttgtctttcccttaagactgtaggcaaataaaagctcatgccatacttgctttgttcagtgagtattcccagcacctttacatcagttaactgtaacatgagctggatatctcctggtgtacatccaagcctgtgtggcccaattacttgattattcaagaacagcttgtacaaaacactcagtgtgctggttaataaacagtatgtggcttcatatgaacacatgaatcttcaaagtagtttatttacattgcctaagagctctgcaccgaatttgggtagacacgctcatcttaacactattggataaacgtactaaatagtgacaacactttcaaggaggtaaggggattttaaattacatatttgaatagttgtcaggctgttttcaagactagaagaactcattttttagagacttttctttagaagacggcgaattgatccaagggttcttttgtttcaatcaacgtttactaccctaggacctaagtgcaagaaaactgcggatttaccaggaataagaaagtaaaaaccaaaagctattggctcacttgctgggcctagggaaagaaaatctacgagcctttggctggctgttgctccagaggtacaaagataaacaactcgggggctcagacagaacctgatccctgccaccctccagaccaccggggtcgtcctcccgtgacgtcaccagaaaccactgcttgtgacgctaaatggcccgccctcttgtgcggtgctmcggaagcaaamcggaagtgggcgcacagtggcttccgggcccggacgccatttccagcggttgctggttctgacgggttgtagtctgccaggacaatgagttatgactaccatcagaactggggccgtgatgggggtccccgcagctccggtgggggctatggaggggggccagcagggggtcatggaggtaaccgaggctccggaggaggcggcggcggcggagggggtggtcgaggcggcaggggccggcatcccgggcacctgaaaggccgcgaaatcggcatgtggtacgcgaaaaaacaggggcagaagaacaaggaagcggagaggcaagaggtaatctcggattcagtagtggagaggatgaggcagcacaggttttcttctctctcccgctgccccctttttcttggttttgtttcttaagtgatgcacgtgttttgtgaaatgtaaatgaggcgcaaatatattatgctggcgctccccgtagcgggtgtactgcgtaacattagccatgctcatctgaccaaaaacaggcaggatttatgcaggctgaatatatactttgcttaaaggacttgagaactgtgacaaagcaaatgttaagttcacgttccaaccgaaattaactttattaggagtgtcgttgtcgtatctctggccgtcctttcccttagaataataattgtcactttaaggtctttgcctggtgaagaagcacatagcgacctttctacatttgagataggtttgcgcggaacaaaagcaggcagacactgttttggatgtggatcattcagaaaaatagtccagcttttattattagtgttaaaattatctgcaaacctaggtttttgttttttatgttggggtggagaaatttctattgatgagcagattctctttgaaaaggaaaatgaaaggaatctccagagatgatttggcttactctcctctcttcaggtgattgtcaggttgatttgtgtcttaaagatctgtagtaagggaaacaaagttctccgagtgactagtaaataaaattctaataaaaaataatttttatcattaagcaggaactttcttagtataggcctttggtgactttttaaaagcaccttataaaatgtattatagagtgtaattagatcatcatttaggcaactttttttttttttaagacagggtctcactctgtcgcccaggctggagtgcagtggcacgatcttagctcactgcaacctccgcctcccaagttcaagcgattctcctgcttcagcctcccgagtagctgggattacaggcgtccgccaccacctccggctaatttttgtatttttagtagagacggggtttcaccatgttggccaggttggtctcgaactcctgacctcaggtgatccacccaactcggcctcccaaagtgctgggattacaggcgtgagccaccacgccaggcctagactactatttttaaaccgttccatttctttttatttcttttaaccatgtcatgttcattcaggtgttttgggggccttatccatttatcttcataatttaaacttttctttaaaaaacaaatccatttcttttacagccccaaattaactttttcgttgggcatactggcttgaaaatcaggatacggacgtctaagtaactttacaacttttatttattaaggctctgtttgaaacaaggttttatgcatattgctccagggacttgaagaaatgtggtattcaaagagcttacagtctagctgagaaaataatacctaaacagatgaaaagttaaataagtcaggaaaaaatgttcattattgtttccacatgaagggtatagccagttgtgcagtggatgttatgaatggaacttttcatttctacttgcgttcccatcctccttttagtggtgacacgaccatttattcacttggcaaggccaaatgagatttatctttgcttcttccccttcatttcagcaaatctctgccttgttaatatatcccaatctaaccacttayctccagaatagttaccatagatcaagccactgtttgttttctgttcttgccttctaactagtcatctagcttccattcttgctctgcattgtctgtgctttacagagccgcctatggtgatcttttaaaaggaaaaattagatcattttattacctaattcacaacttcagattggaagtcatgtcacttctgtctcagtctgatatatttcagttgcatcttgacatgttctctggaaatcttggtaatacggcttcaacgtaacaggtttaccgctgtgcacatttctctgagcccatgtctccagtctgatataattatagtttttttaggcatactttatttttacttttcattacagtgtcatactgttctcctgtccaaaatgtacctttctttcttgtttaaataggagtatttttcaatgggctcgtcccagctcttctttgaccacctttagcttgatatcattgtttcccagtcagaatttcggtagctttcacttttaaagtcatgtcatgtgttttcaaaatgaagactttttttttttttttttgagttggagtctcactctgttgcccagtctggagtgcagtggtgtgatctcggctcactgcaccctctgcttcctgagtagctgagattacgggtgtgcaccaccacacttggctaatttttgtatttttagaagagacagggttttgccatgttggccaggctggtcttgagctcctgacctcaggtgatccaccagccctggcctcccaaagtgctgggattacaggcgtgagccatggcgcctggctgaaaatgaatgcattctaatgatgcattcttgaacaaatgttctttcaacaaatatttattgaggacattatttttgtgasagtatcttaagcactgtattaattaataaaatagatataggctctacagagattgtggtgtgtttggagcgataaatagaatacagtattaaggtattagagaatatgggctatcacctaactcagggcaaggtattttagaagatttttcagggacagtaacccttaagttgaaacttgaaagataacaaagtgaatgtacgtgtgtgtgtttgaagtttggggtttggaaaagattccaggcaaaggcagtagcatgtgccataacatagagatcaaggaagcacattttcagttcgagaaactgtaaaagataagaacatggatgtggagtgtattgagatgaggttagggcagtcaatttcaaacttgttggccactttgcccaaaaaggaatgtatttgaatttacaacccagtacacacatatgtataactagatgaaaagttttgtaaaataatatttaattatctgcacattgctttgaggtttttttgcttttgaacttctctgttctctttttattaatgctggtcatgatcctttaatataatttcagaaacagcaatttgaaaatctctgggctagaaaaatacgcggggccttgagatacattgagtctttctaaggactgtagcaagtcattaaaacattttaaacaaagaatgaaatgactggattttaaatgtttaaattcactctggtagcagtataaggaatggattgaagagaggtaatcctggttcagggggaccagtgaagtagcccttgcagtaactaaggtgagaaatgacagcttgaattagcacgttggcagtggagatggaggggagtggacagattaaagtgatttaggaggtagactcaaaatgattttgtgatgtattttatctgaagggacgagtacagtgttaatgatgactcttttatgcctatctgtaaggatcaggcttgttggaagaaggctcagctrtggacactatgagtttgatattgttatagggcatacaaatgaggatttgcaggagggagagggctgtgtagatctgatgcctagaaaaatctagactggagataagtatttgacagttaatgggctcatgggtagtagttggagtgtgggagtgaacagtcagaaatagagtgggcccagcctgaattctatagaccattgcttctcagacttgaatgtgcataggaatcacctgacatcttgttaaaatgtaggacactggtgggatcagagattcgacttttgttacaggctcccaggtgatgccagtgttgctggtctgtagatcactcaggctgtcaaatacggaaaatgaaaatttaaggacaggctgaggaaaagaaggttacaaaataatctaggaaagatcagctagagaagagaaaaataaggtgtgtgttgttttgaaatctaagagtagtgtttaaaggagagaagagcgtatcaacaagaagtaattgatagtggcaagcatgcacaaatgatgtaagagcagagaatgtctattggatttatcaacaaggtcgttgatgatcttaatgggagtcctttctgtggcattgtggaagtaaaagccagattgcggtagggtggcaagtgaaacagagattcagaagtggaacattttccagtagttttgctgtgaagatgaggaagaaaaatagtgccgtagctgataggggtaggggaattcacgagagggttttttgtttttaaggtgaagagatttgaccatgttcatgccctgagggaagcacccagtgaagaggaaatcaaagtgggcaaatcaaagtgggccaaattatgctgcagtaataaccaacccccaaatcttaatggtttataacaagcaaggtttgattctctaccacattactaaaagaagcaaaccagaatatcggttgactgcctaatgtctactggagaggttagaaatttaggaaagcaaggtaaatttcagtgaaggaggtggccctgaggacatgaaaggaactggactgcagagctcaggttgaggggttagcctttaaaatgcacttcttttataacaagaaagaaaagagaaaaggataaattctgatacaggcgggtttaggtttggtgataaccaactgaggaccttttcttagggcttttgttttgtgaaaaactgcgtgtgaatgctgagggcaaacaaaagggtggtattggcctgttacagagaatggggagacagtgtgaagtagttgcagataattagaaagctgataacataaatttgatggacatcatttagggtttcttgccaggaactgaaaactagaagcagggtatttgagaatgtccaagaaagtgggaaataatcaaaattctatgataaaagaaaatagtcatgaaaaaaatgtgttttgagattctccaggcaaggagtgaaataaagtgaagcgtggtagaactagaagaaggttgttgagggggagagaggcatcctacaaaaaggcaagatccaagtttggaattaaggtatgttctctgctacctgcagcatccagaaactcattgtggggagaacatcattaaaaatacaaatgtttttatttagagtgtaaattacattttcaagggctaatcatacatgctcattgtaaaagattcagctgttcattccttccattgacagacttctytggggcacataccatgtaccagaattatatctggcagagacactgcaaraagtataggatatggagagtgaataacctcttttcaaattaatagtaataaaaacaagatcctactacacaactgacttatttaatactttggtcatctttcctgtttatatacttgcagaaagatctacccactgttaaccactgggtgtactacaattcaactaattccttattgattagcagatgcttacttggtacatatgcattgtgtaaggtatcttaaagtctaccaactgatgttgactttttaatgaaaatgaattttgttgtgatagtttggactggaagattgtgtagatctgtttattttcagtagactgttatgttatccagtaattcaccttttccgggggcgtgaaatctcataaaattagaataatcttttgtgctgttacgggcaggaagtgggcaatgtattgtgaaatgtcaatctaggaaattgtttactaaacaaaatayagagtaatgagttaacatggaaaagtgagaactgtaggaatagcagatataggttatattctaactraacagatacatcaaaaaaccttaagaggacttttagtagagacattttatgtcctgacaactgaaattagccactcattttcacttcaaaaaaggaggtaacatatagttcatttgctttgcttcttcaggtttgttgttttatcactgatttctcatatttattacattaggttatcctcctacccatgtaaacttatttgagctttcacaaagcatgtaatactgattagaattagaatgtcttacaaaaccctgtctcttgtcttaaagatgcttatgtcttgttctcctgggacacatactcctctacccaccctgggttttcaaactttatgttaaactttgttgtgaccagctattttggtgtttgtttaattgggatagaatacagtgaagagaagataagagttgcactgtacagagtaagggaagtattttgtgaaattacttgtatatgtgtgtactgggtcaktagttttactgtggattgctataaaaaawaaacaattgaaatctattgctctagattttacagtattttacacattgctgtctgctttcatcagtctccttaccctagctcctgcttccctcttttttccccaaaaatcaaaaccaaacctcaaaaaccaaaaataccttgaagatcattcccaactgcctagttgttggatacagtagtaattttttcagttctctgccttacttacgtccattttatacttctgagtccttttttaacacctttcttcacttcataggagtggttttctcactgtgtgctcctagtcttttgtttgttctcttgattactcctctgacttattttcttgccttggccccgtgaatgccagacttggtcatccgtctgtcctcatctttggaggtggtattatttgtaaattaagagaattcctgtgtctctgtgatttcaactttgcagaacactccaaaatttctatcataactctaaaaacaaaacctctcagagatcaatttccatatattcatctacctagtcattattacaagtcgggaaatttcatctttgttcttaattgcctaaaatccaaacttagcatcctattgtgacctccatcaccaccacatgtacacaaaaatgtacagtaacacagagcagcttccttttaatgattcatcttactgctgctctctsaggatccacccttgaatttgaaaacagttctttgattctttcttcctttttgtctctccccaacttccaccaaatagtcattaagtcctgtggtttctttctttcgatttttgactgttttctttccatttatacttttaccttcctcctcctttggttctttaacctaacacactctaattttcaccactccgcgtgtgtttccttttgcctgtggatttatatgcacgttagaacctaaggtttgtagtcccataaattttgaagaatctgtttttcaacttttcaacttactatatctaaatataaaagtctccaaagaattgggttttggcattcattctctttttttttttttcaccttggacatttcttagatgcgtaaagtttctgcaaagtttcatagttcaccaaggacctttatatttgtccagtctgttgtgttttattctcattctttgaagcaactgcgtcatttgccacattggatcaccttataagcactgatgaattttatttactccttctgagctcagccttacttaccaatttattcttctgtttagtgtaagaactttcaaatgttcattacaaccaaactatttccagttttcaacttttttcgtaaaccatttgagttttaataactttgaaattttaagataaggagaaattcataataattagtatgtgagggtttggggtaagagaaccagagttgtaggaagagacataaatgagctttctttgccaatcatattagggctaattttataaatgcttgttggaaaaggtctagaaggatatgtacgaaaattttaacaattaattaggtctaggaaggggggtattgggctagaggacacctgtggataactttcttttatatgtatttgttgaacatatrttacttagcctttattttcttcagtatcaaataatttttgcatatgctttcttatgttgacaaggatgcttttttctttgcacaaactagagagctgtagtacacatggatgaacgacgagaagaacaaattgtacagttactgaattctgttcaagcgaagaatgataaagagtcagaagcacagatatcctggtttgctcctgaggatcatgggtacgacaagaaatatttttttaaagaataggcaaagagtaacactttaataataaaaataacatctttattttcttcgataagtgaattttaacctttacgtactttttttccttatgtagattaaacagatttagaaaatgacttttaaaaatttagatggcatgtttccataggaaagctaaatggtatgaataatagtgtatctggatatgagatgtattaagttgttatttattgttctccctacctgtcctctttgtatttatgaaattattctgtctgggagatctgcaagaagtgaaattgctaccgttttagaaagattacaagaactgtatcatttagaggaaaaattagtacaagtatttcaaagactgtgtattgtagcatcctatttgtagctcagaaagggtggcaagaaaaaaagatgttgtgacataaaacaagttcgagaaatccagaaaaagagaaacactgtaagtaaccgcagtgaaggaatgactattctgtggatttttatttttaactatcacaaggaataacttaatctggcaatatctatttaaagggaagaaaaatttgaatttattataagaatctaagtatattttcataattactgtactaagagaaaagaaaagctttggatttggatgactttgaaatatttcaacagcgtattgttttgttttgttttgttccagtgtttgagtggctcatctgacctttcttcctttcttattttgtcaaaacagatacggtactgaagtttctactaagaacacaccatgctcagagaacaaacttgacatccaggaaaagaagttgataaatcaaraaaaaaaaatgtttagaatcaggaacagatcatatattgaccgagattctgagtatctcttgcaagaaaatgaaccagatggaactttagaccaaaaattattggaagatttacaaaagaaaaaaaatgaccttcggtatattgaaatgcaggtagtagaaagatgtcaaaaaatattttgtcatttttttcttacactttataaaaatgtatgtatggttagaggtagctgcatggcatagatcagtgagatcctcaacaagacatcctctgtgggaattaatttcttttcgaatggtagagaaaagcagtgggaatggaagttacacataacctacagtatcctatctcatccacagaagcttatgtggtgagaagaaatgtttgagaaatgctagtgccaatgaaaaaaaaacttactcttcagcttttctaggccagtttagtgaggtgccatgtgcagtaaaggcagttaaaattgtaaagcttgttccagattacttaatacatcttctttttatagatgataaaattaaatatttcaaaaattatgtgatgtgctttgttcactaacattttaaatacaggactatcacaacacctgagatctcctgaattctgatattttctttctatgctaggcaagatattttaaggtccctttcagttaaaacataaaattgtgtgatttgtgggtgttctagagatgtaataaagtggtctcatgtatgtatgtatatgtttaagagaaattactgaggaaactctgagggccatatctttaatatgtaaatacatactgctgtctttgataaaggaaggatatagcacctcctataggaaagaaaggatcccttggctcactgatgaaagctgaatttccttaataggaaagaaaggatccattgactgttactgatgacagttggatttccgtattagaatagataagctgaggttgtccagggccaaattgtgtagctctttgatgcctgttgggtaaaaatgtgatttgaaaatggaggaaatttcaggatgaattaattgagaatcttctggttgagaagagctgctttaacagccttaacaggaggaattagtgtctttctctttgctgtatatgatggacagaactcatatactaaagatgggtgattgatctagttcagagaaagaaaaatgtgtaaaacatttaaaaagttggtggtcttcctatttcccatatgttgtcataaatgcttcatgtgtactatattatttaagcttctcaacaaccttgaataagagactacatgtctgttgtagatgaggaaaaagatttaagtgacctacctgaggttgcatagctcataacagaatcagatctaaaattcagctgtgtttaacaactcagctttttaatcatttttagcatgtgcaatattttttctttatgttctttaataaacattaattttctacttactggatgccagttactgtgctatatatgtgtgcgtgtatgtatatatatatatttaagacagggtctcactctgtcacccaggctagagtacagtggtgccatcatggctcactgcagcctcgacctcctgggctcaagtgatccttccaccttagcctcctgagtagctggcactacaggcatgtgccagtacgcctggttaatttttgtattttttgtagagacagggttttgctttgttgcccaggctggtcttgaactcctgggctcaagcaatcctcctacctccacctccccaaattctgtaattatgggagtgagccacaccagccagttatgcttattactgtttttgaagagtaataagatatttcctgtcctcagagagcttatagttgaattatctcacatcttcgttatggtcaaaagttaacaaagtagaaactttggctgccttgggaaagaatattggactatacctctctttccagtggcatttacatgtataaagcaaatacgattaatgccagtttgaaatgcagtgggatagcttgtgtataattatgtgttaagatggtaacatttgactacctggggtgttaatacttatgtcattaaaaatagtttttagataatttaaaaattattacaagataagtaagttattacaaggtaagataagtgtggtagcttttgttattttaaatgactagaattcatttcagtcttcacattgactgttatttttatggtattggtaagaattacctgaccataacaaacatggcaataatataatactagattaccaaagacagttctttatttattttatatatatatatatatatatatatatatatatatatatatatatattttaattatttccttttttttttttgagatggagtcttgctctgtcacccaggctggagtgccgtggcacgatctcggctcaccacaacctccaccaattctcctgccttaacctcccaagtagctgggactacaggcgtgtgccactatgcccagctaactttttgtatttttagtagagacgggatttcaccttgctggccaggctggtctcaaactcctgacctcatgatctgcctgcctcggcttcccaaagtgctgggattacaggcgtgagccaccatacccagccrattttttccatcttaataaagggtgtttattaaagctgactttatttttatgccactgaagttttttttttacattatatgtacctagttgaatgtaaactacaggactgcttcttaaatgtttttatgtaatacgggtatagagttccataaaagttttcagaattaggaagaaattgtcacataaatataggaaaaatagtcattccttttgtagtattctaattgtaatttaacacatttgaaattcattgagtagcttatatgtttcagaaactggtatttgctttttatataaaggtttttcatttagatcttgtggcaaccgtatgagataaaatctttgaggcattcatactttaagtttgacttaactgagatcacagctctaaaatggcagtaccagattttctgactgcagatattacttgttttaagttttctcttacactcaaaggcaagtatatcctgaaatttttgattctgctccagtacttaatgtattagtaaatagtgcactgttgggtgggaaaaacataatatagaaatcaaatctaagatgaatatataaaacatattgaaaaatagtgaaagtaatttagcaattattagaatactgttagaggacagatccgatttcattttactgccactgacttaaagcattgtctctattttgctggatgtaatggagttctggttttgaatgtttcagacataaaaggaattggtaaattattctttataatgtttttacacaagccatgagataataaaaatactttcggattctagccaatttaccctgtgatgtatcctaaataccatgattataatttgattacatatcttctgtgaaratttaaaactttttttaaatttcagcatttcagagaaaagctgccttcgtatggaatgcaaaaggtaaagtgcttttttccactatttaatttgatttgcaaattaaatacacaattttttttaaagctctatatcaagaaaaaatgtaaattaatgaactttcttttacaggatagtattggaagttaattttattcttttgaattaaggacaaaaagaaaaaaaaggttcataaacaattttcctcatgtttgctcctgtttttgtccataattgaaatctttgaaatttaaaaagtaaaatttcctcctataagttagtttggataaataccttgcagttaagtcaagaccaaatacttcagttaaaaataatatacaaattattgtattaattaaaatcaatgtacaaaaaaagtactactaaaaatacagttaattttaatttattacactatatcttaacatatgattaccctatgtagaataataggatctctcatccttctctgttttctcaaccttattttattttattttactttattttttacttttcatagcacttgttaccacctgacatctgtttgtcttcccctcccaggccagtgtaagttcttgaggataggatttgttttgttcactctgtgtctcttgactcagaacagtgcctggcattctaaagacttccagtaaataaacttctgattggatgaatcacatttcacttctgagtatttaccagctataatttcagtgttcaaacttaaaactttttctgatatatacacatctatgtatgtataatgtgttagaataagtggggaatatatatatatgtatatacatatatatatatatatatatatattttttttttttttttttttttttttttttttgagagggagtcttgctctgttgccaggctggagtgcagtggcgcaatctcggcttactgcaaactcccgactctcgggttcaagcgatcctcctgcctcagcttcccgagtagctggggttacaggcacccaccacgcccagctaatttttgtgtttttagtagagatggggtttcaccatgttggccaggatggtctcaatctcctgacctcatgatccgcctacctcagcctcccaaagtgctgggattataggcatgagccaccatgccmggcctaagtggggaatttttaaaaggtaggttttcaagttaaattgttttatacatgaaaataacccctaacatccctttgaggtagtaagatgacttcgtttatacagtgaatattattattaaaaatattaatgtatacaattttgaggaagaatgaaacccaaatatgaggttttctagatagctttggtttagatattcaatgactttattttaattatttgaaaggaagtaattttaaaatacaatattctcttccttgctcctaaaatggcatacaaaacttgttctgcagacaaagccatatttatgaattatataaatttgtaatgtcctcaatagttgtttaggccaggagtttgcttctgtactcagtagccccacatatcaacattattttaattcttctccatggaacttataagctgtctcttcttgtttatgtcaatatgtttttctttaacagtgctttggctttgttctttataatttggtgcacttatctcttgcaggttggtagatccagatatccaaactgccagtattggatatggcaaaatttagaaagcattaatatgtttgttaaaaatagctatgttcagtttggtcgaattttgattaatatcttttttcagacttagtcaacatgtgatattctttattttcccttttgaaataggaattggtaaatttaattgataaccatcaggtaacagtaataagtggtgaaactggttgtggcaaaaccactcaagttactcagttcattttggataactacattgaaagaggaaaaggatctgcttgcagaatagtttgtactcagccaagaagaattagtgccatttcagtaagtaatctcttaacttattaaaaattgtctttttaaaagtaatcttgctagaacctactgattctgaaggtgtggagtgattcttaattaggcttaggattggtgactatgaaagcaaatagttgcttaacatgtttaataataaagcccaaaaaattgagtaacctctctcttaacagataatagatatttatgaattcaagataaaattgatatccaggcaaatttcagtacatgttcacaagaatgaaatagataaaatatttatagaattgattacaagcttcaaataatctccatcatttgattctttaaattttactacttggtttatttaayttttttttttacttctgtcattttttgagtatgtaaatacactgaatggtggtgaaagtgggaaaccttgtttttttttttaagctgcatttctgtagtcagtgatttatttatttattttttgagacagggtcttattttgtcacttaagctggagcgcagtggtgataacacggctcagtgcagcctcaacctctagggttcaagtgatcctcctgcctccgccccccaagtaggtggtactataggcatgtgctaccatacctggctaatatttgtattttttgtagagatggggttttgccatgttgcccatgctggtctcgaactactgggctcaagcgatctgcccacttcagcctcccggagtgctgggattacaggcataagtctctgtgtccagccatagtcagtcatttttgaatgcagctactcagtaagaggaaatttatgaggaaaaataaggtattgtttctggtttgtcaagtccaaaattttgggaaggcatacttaagtaacagtttataagtaacttttagttcaggttgactatacgaaatccagaatgctcccaaatccagaactgtttgagtagcaaaatggaaatgctcactagagcatttcacattttgrattttcagatttgggatgtttaacaagggcaagtataatgcaaatattccaaaatagaaaccggaaacacttctggtcctgatcattttggctaaggaatactcagcctgtacattgattttgttgtcgtcatcgtttttagttagatgacctagttaaatatgtgagttatatattttttaaaggtgtttggggtttcttgtcatatttcagtgtgcatagtgaatttatttatgctatataattctgtgtataaattataaagatttgtgtttgtctttggttttatggcagtgctgcttatcacatgtctaagtcatttaatatagaatctgtggttaaaaacattaccaattatgacagcacttggcagtaaatacagtatatgttttaagctttggtttctaagaagtactataaagaaagagcagtagacttcacccctttttaaaaagaagtgtgtaaatttatgggatacaagtgcaattttgttacatgcataggttgtgtagtggttaagtgagagcttctaggttgtccatcacccacatcatatacattgtacccattaagtaatttctcatcatctgtcctcctcctgtcttctcttctgagtctccatcgtttgccattccacactctatgtccacatatacctggtttttagcacccacttatgtgaaatatgatattttgtctttttgtgtctatttcgacatgatttcactcttacagctaaatagtattccattgtggtgtatatatacaccacattttccttatccagtcatccattgatgagcacttagattgattccgtatctttactgttatgaatagtactgtgataaacatgcaagacaagtatttttttttttttgacacattgatttcttttcctttgggtagaaacccagcagtgggattgctggatcaaatgatagctctatttttagttctttgagcaatctccatactgttttctatagaggctgtgctaatttgcattcctaccaacagtatgtaagagttctcttttatccatgtcctggccaagatctattattttttgactctttaatagtagccattttgactggggtaagatgatatctcattgtggttttaatttgcatttctctgatgattagtgatgttgtgcatttttcatatacctgttagtcatttgtatatcttcttttgaaaaatgtctgttcttgtcttttgccctccttttaaggggatgatttgtcttttattgttgttgtttgagtttcttgtatatactgggtatttgtccactgctggatgaatagtttgcacatattttcttccgttctggaaattatctgtttactctgttgattatttcttttgttgtgtagaaacttcttagttaattcccatttgtctatttttatttttgtcgcctgtgcttttgaggtcttagtcataaattctttgcctagaccaatgtccaaaggagtttttccctaggttttcttctagtagtttcagtttcaggtagtcttcacccttttatggggactatattccaggaaattgcataaaattacagaatggtgaaaaataaaccacttttgtcataacacacttttgtagctagacttaaatattttcactaatatatagcagttactgtatatgctgatagtaggaagaaatgctaagtaggtaatttttctcttcttttttccaccatctgttggaatttgagtagacaggttaatgtggtctgtcagtrtatactagatatacttattggaaagttttacttgtaaagtattatttcttacaaattatgccattttctatttctaataccttattatcactgttctgtcacagaataactgttggttacttttagttgtacaaatcagtattagattataacatttcatctttccaaatcttatttttggcagtcataactttcaaaacatgaccaagaactagaaattcaacaccagtccctaccacaaacaaaaacacaagggaagagtatcaatatgtaattactttcaaattacacataacttctacaagtttagatcttgatttacaactcttagaaaagaccagaaaagtataaattaatgagaggatgctatagaaaggcactttgaaactagtgatgagagaacttggccttaaaagactttataagaggaaatgaaaaataaacagctcttaagagaggcacacactgttttagatacctcagattttaatatctatttttttaactcatttagaaatctgaagaacaatttttcarcagtcctagattttcatggacattcaggatatttgttctaaaggaaattatattctctttatgttttatttgaattaaaggttgcrgaaagagtagctgcagaaagggcagaatcttgtggcagtggtaatagtactggatatcaaattcgtctccagaggtaagaaatgttcacttcttatatacaggcagattttagtgaaactttgaagctggagattcaaaagaaaggatattttccccatttttatgatggttattactattacaattaccatttaaagtaactgcagcgtagatgacttgctgccacaaatttatcttttaaccccacatcagacttgtattgccttttttaaatgatgcttttatatttggaatgattagaaaaataaacatttttcctggacatagattagtagaccattactctctctgaaaagattgtgtagacctttcagtaccacctccatatacttccgactgactttttattgattttgatatcttaaccccctatccaactccactgtgcagtacatagttggtccttttctggagcttaggactccatttgcctttttatgttttaatttacttaatgttttttagagataggttctcactctgttgctctggctgaagtgcagtggtgcagtcaactcactgcagccgaagactcctgtgctcaagcagtcctcccacctcagcctctcaagtagctgggcctaccggcggacaccaccacaactggctaatttttttacttttcgagcctggatctcgctgtgttgcccaggctggtcttgagctcctgggctcaagcaaccctcccatcttggcctcaaagtgttgggattacaagcctgagccaccatgcctgacacatttgccttttcaaatgagctttccaattacgaaccaaatatttaggccccataagtaattcagttgttgtctgaatgtgaatggtcgtatcttttaaaagaaattaacattatatcaatgacaacaaagataatgtataatgaacttgaagtatttcccattaccccattgtggtaggtgttcttataagtaaaaaattaagtgtgaagattttcattaaaactgaaagcatttctaaaattgaagatataaacctttgtggtagttaattattagaagagaaaaccaaggcttattaattcatgtctttcattcacagtcggttgccaaggaaacagggttctatcttatactgtacaacaggaatcatccttcagtggctccagtcagacccgtgagtatgtttcaattaaggaaatataagtgttatcaaaagatgtaattattaaattggattttactagttgttaaagaaaaatggttttaaaattttgtacttcacacttctgccttaggtatttgtccagtgttagtcatatcgtacttgatgaaatccatgaaagaaatctgcagtcagatgttttaatgactgttgttaaagaccttmtcaattttcgatctgacttgaaagtaatattgatgagtgcaacattgaatgcagaaaagttttcagaatattttggtgagtaaaatgtatagttattacattagaaaaggtactagaaaaacaattaaaaaaattaatatggtactaggtaaagagtagtcaaaatgaatgtttagctgttaattttattttaatattattctaccctccagtttcatggattagacaattgggtctatttttaaatggtggcatcatctctcatagtgaggacaggtagcttcttgttgctaccaccacacaattaagatggcatcattgaagtcaaaccacagatttgcataattttataaacttctttctgttgtttttctgtggcttttatcacaggttagggtggcagtttgctgctaatactgctagtgaccacttatggaacaccttcaatgttccaggtagtatatttgccactttgtcttccttagtctttataacactttatgaggtagttgctattatcattcacatttttacagatgagaaagcagcctcasagcagttaagtaggtttcccaagctgaagctagattggaccagctgcaaaagcacattcttttaaaattaatcctcactgtctttcctgcttatacttgtgaaggaaggagggggaaagggagggaattacaatgtaatatatttatgtttaataaatgttcttgtcatcagctttttaaaagtcctttaaaatacatcccagttaatactgaaaaccatgtaagattagttggggtaggtgttattattgktatttttaaatgagacttctagaactaacattgagtactttgctcaaatgtgtgcacatcatgggtagagcagtgatacctacttaggtattttgacctctgatgtgatgtttgctttttacagtgtgtactgcttgtttcgcttgttatgaaatgtaaagagcatttaaataacagtaccgaagtgatttttttattagtaattttgaaatagtaacaatctatttgtttaggttttgttttgattacctttctccgctaattccrggtgctacaagtagtaatgcttatctagaattcagtaaaactttgatattctggatattctattatggcaccatctgggttaatgatgaagagaaaatagacttctaactaatggattttgagttcaacttaaaactctattctttgatattctgtgttattttgtagaactgtgagatgtgtgtacagtttggtagcagtaaaatggtattgagtgaagactagactgctgttttttattaaagtaggtgtggaaaagtagggtagaattgtaaaagctacaggaccattttctggaattaatagtaagtaatagagtcattgtcctatttacagtatattaatgtttttaacatttgagtacaaatttatgcttatattttgtctgccgtaataggtaactgtccaatgatacatatacctggttttacctttccggttgtggaatatcttttggaagatgtaattgaaaaaataaggtaagtaaacattaggaaataaaaaacattaaaaagtactaatatatcacttttytcatgtcaaactttagtctcagaaacccatcattgactatttccttgtaaaacatttttctgggaattagccacacttggctgcacattaaaattgcctggagctttttaaaatccagatgcctgatttatactccctacctaaattacattacagtgtctgaggtagtagccaggcatccgtggttttttttaattgagacagagtctctctctgtcgcctagcctagagtgcagtggagctatctccgctcacggcaacctccgccttccaggttgaagtgattctcccacctcagcctcccaagtaactrggattacaggtgtgtgccaccatgcccagctaatttttgtatttttagtagaaactagtttcacygtgttggccaggctggtctcaaactcctgacctcaagtgatttgcctgcctcagcatcccaaagtcctggtattacaggtgtgagccaccacgcctggctggtgtcagtgttttttgaagattcctgggcagcaaagtttgggaacctttgtctttagtgtttgaacccttttgctggttctcctgcctgattttcactttcctttgttggcttccattgccgaacctttaaatataatttcccccagtcttctcaatcatttatgttttcactgtgcaaacctgtttatatccctaactgtagttctgtattttcacagctttcagtagtgtagcttcagaactgaagcttctcctgaccttcgaactggctttctgctcaatagtattctagtaccacagatgccttgaacctaacatttctcaagcctaaatcattatcttatattctcccaccaaaaaaataaaacaatgtgtcttgcccagcatactttataatggttaataattatcctccacttagttttctgacctataaatcaaaaagttagtgtgtatcaggcagttatgtaccagggtatggcaactgttttacacagtgagtaaccaagttaatccaagtcattttgtactgccttcaaacacacacaaactctgggaactttcttcttgaacatgcyttctcatttttatttctttgctaaggtccttactatctctcctgtgctaatacaatagttcctcttttggtactatgttcttcactcttagggaagcactctttgtgctatacatgaggctttatcacttttttttttttttttactttatcacatttttaaaaatctcatgccagtactgttacaaacattaatctctcaaataagataactaaaggccagatgtttaatgccttgtctaaggttacacagctagtcagtagcagaggagggatattctgacttgggagtccatgctccagcccctcccccattccatctagatgctgtcctctagttgagctcagagatgccttggggttaaagtgtgggttcatttttgtcttttcccacctcgtgcctctcaggactgacaatgataggtagaattattgtccagatgcgccctctatggttttagcaatcactacaggatggtagtagaatcatagtacagcactcaattgacatatgagagacttgaatactgattctggatctgccattaactacaactgtgtgactgagcagaattaaatagttctctagcgtgggtctgtagatctggatacactatctgaatctcctgcaggcactaattaaaattcttagattaacagacccaaggcatacctaccaaatccaaatcatcagggatgggatttaggagtctgtattttacaagctctctgagggattcaattcttacgtgcagtcaggtttggacttaacattaatattaacttttgttctaaagcaaacttaaaatagaaggtaaaagttacttactttagtctttttctaaatttttgactaaaaatgatctataggtttatatacttcaataaagaagaatgatttttatccaaaatatcaggttttataagttaatgaacacaaactgatattttagctagcattcacttgaaagcataatgaaaatgttctttggaatcctttttgaaaatcctaaatataaaatgtcacagattttagctaaaactagagtttcaaaaaagtgaagatattcaagaatgtttttattttaggtatgttccagaacaaaaagaacacagatsccagtttaagaggggtttcatgcaagggcatgtaaatagacaagaaaaagaagaaaaagaagcaatatataaagaacgttggccagattatgtaagggaactgcgaagaaggtaagtttattttgtctgaaggtgagaaatcagtggctaaataaaacaaaaagccagaggctgggggcatcttcttgaatctgtaygtacttaaaggagagcattgtgagtctcttattcgagctaaatattgtgctgatttgacttttaagcagtaattaccccagtaattctctccgatctgtagattatgttcctccatttgcagattgagttaattttaagcttttgtagcaagttaacagaaaacttgattaagtatttcatgactttgtgtttaactttgataggtattctgcaagtactgtagatgttatagaaatgatggaggatgataaagttgatctgaatttgattgttgccctcatccgatacattgttttggaagaagaggttagttttatttttctttcttcagttaacataattttaattttattaacgtatcaaggccatgaaaaatacagttttcttaaatgcttatgaaatagactggaagaaattacttttgatactagaaatcatctcatagtagcaaaagatttaggcatttgacctgtttgaagaaaagactaaacaaatatatggattataaatctcattttttaaaagtgagcttagctggatgcagtggctcatgcctgtaatcccagcactctgggaggccaaggcaggtggatcacttgaggccaggagttcgagaccagcctggccaatgtggcaaaaccctgtctctactaaaaatacaaaaattygctgggcgtggtgacacaggcctgtaatcccagctacttgggaggccgagcatgagaatcacttgaacccaggaggcagatgctgcagtgatccgagatcatgccattgtactccatcctgggtgacagagcaagactctctcaaaaacaataattaaaaaaaaaaagcttatatacttttaattattaacgaaaattatcctgagctagtataattttaatggagacttcagtgtgcacacaattttactgttactgcattttgttgatgtgatcctttgtaatggttatttccccttcatataggatggtgcgatactggtctttctgccaggctgggacaatatcagcactttacatgatctcttgatgtcacaagtaatgtttaaatcaggtactatgtaaatgtattttactgtaattcaaagagtggtatttgaattatatatgatgtgtatttttttcttttattcaaagaagtgttgcttctactaggtcacagatgaaggtgaagctttttatttagtattatgaagagaatattttctttctttttcacaatttgcctaataaaattggctcttaaagcataggtatgtgaggtttttcattttttcacttactgctgcaaaaaagaaatcccttggcccagtgtttctgaattctgagtatacaacagagtcacccatggagcttctttaagattcagatacctagaccccatcatcaccccaaatctaagaatgcgacctgaacatctgaagttgttaaaaattcctcaagtgattttgatcctgtatgaacagcatattttgaaacatataaactctagagaaatgaatgagaacctttttttctataaaatttagagtattttcagcaatcattaacttcaaatataaaaactacaaagaaaattctatttaatttttacagttctgaatataatttttttattttgagatggagtctcgctctgttgccaggttggagtgcagtgatgccatctcggctcactgcaacctccgcctcctttgttcaagcagttctcctgcctcagtctccagagtagctgggattacaggcatgtgacaccatgcccggctgactttctgcatttttagtagagatggggtttcactatgttgaccaggctggtctcgaactccagacctgaagtgatcctcccatctcagctttccaaagtgctgggattacaggcttgagccaccacgtgtggcctctgaatataatttctaaccctactctgttgaagtgcttttgacaaaattaattatttatttattaatttatttttgaaacagcatctcactctcttgcccaggctggagtgcagtggtgcgatctcggctcactgcaacctcyaccttccaggttcatgagattctcctgccctgcctccygagtagctgggactgcaggcacctgccaccacgcccgcctaattttttgtatttttagtagagacagggttttactgtgtaagccaggatggtcttgatctcctgaccttgtgatctgcctgcctcggcctcccaagtgctgggattacaggcatgagccaccacgcccagccagacaaaatttataggcactagaaaatattttgatctaattgtattgactaaaataataaatgtatatatttattatttgttaaatcctgttatgctctgaaagcattctctgtaattaaaattatttactatctagcttgcaaagtattttgatctaattgacttctctataaagaaatactgctttctgttttctttttgtgtgataactttatagaaaaatttgtcatgattagacagctgaatttttcaaacaactagaatttttttattggctaaatctaactctggcctttccttcccccattattataaacattattgtatagtgtacttataattttaaaaaatgtgtgtgcatatatttaccaatgaagataagatatataccaaaatataacgttatcatttagtgtatgtgatggagagtgggaaaagggtatattatagattattataattgacttcgttaactttctagtttgaattaattattctcaaggaaagagttgctaatgtatacacttccactaccagctcaattccttttaaaggaaatctttccagaacttgagtgttttttctcaaattatgttgaaaaaaatttagccttgataatcagttgtatagttaaccactatcatggggagaaaattggcctaactctgtgctgagaaattgagttttgaaactcagtttattaaatgcttatcaatttcttgtttttttcttttcataagagtatagattttgttctcattaactctcttagttgtatggtgtcaacaatataaattttttttcccaattatatagtcttcaacagaattgtttttacttttattatccctggctaacttttaaactttttataatgaaacattttaaatatacaaaaaaactagagactttttttttttttttgaggtggastctcgctctgtttcccaggctggagtgcagtggcacgatctcagctcactgcaacctccgcctcccaggttcaagcagttccctgcctcagcctcccgagtagctgggattataggcacccatcaccacacctgggtaatttttgtatttttagtagagacagggtttcaccatcttagccaggttggtcttgaactcctgaccttgtaatccacctgccttggcctctcaaagtgctgggattgcgggcgtgagccactgcacccagccaaaactagagaatcttaatgaatccacgacttcagtgccaacaattattttttcagtcctagttttttcttaaagtcaattgcagctgtcacatttcatttctaaatgtataagcaagaatctctaaaggcaattttctatataaccatcatgtctttatcatacctaatccttaataccatctgataatccagtctgtaatcagattttcccatttttctgaaaagtgtctttcacaactagcctgttcaaactatagaaagtgtcaacatcttttgatctagctctagaacattgctcccctccactccctgcttttcctcatggtaatgtaaagtcatggaaaagaccaggccatttgttctctaataagtccaactttctgaatttgtgtgactctttatgctatcatttcatttgattctctcttacctttatttcctgtaactcgaaagttatatctgaaagcttgattcaattcaagtatttttggcttgaatattatagttgtaatatttcatactgtcacagagacaagtaattcagaggattcttttttagcaacatcagttgcttggcagctgttcactactttttatttttaagattcgtaaaatctcttcacagtcagagtccatggggatcatcatatcctttagataacaacagttcttttctggggaagtatagctgacttgaatcatttgggcatttaagtcagattgtatttttgtaagcatagttaaatgtgaaattaactcttgctttcttgatactctccctttcacccatcactgtattacaccagactttctgtgttggctaataattgtgaatgggcttgagctatttcatttggaaacttaaaaagtaggaatttcttatatttttaacaaaatatgtgtaaaatgtgggtcacttttggaatgtattattattattattattattatttttgagacggagtctcgctctgtcrcctaggctggagtgcagtggcgcgatctcggctcactgcaagctccgcctcccaggttcacgccattctcctgcctcagcctcccaggtagctgggactacaggcgcccgccaacacgcccagctaagtttttgtatttttagtatagacggggtttcaccgtgttagccaggatggtcttgatctcctgacctcgtgatccgcccgcctcggcctcccaaagtgctgggattacaggcatgagccaccgcgcctggcctggaatgtattatttttaacaaggactatttcattattttctaactaggacatgggtatttaataagtaatttgctctaaaaatttagatattatcggtttgattaaaatagtgaggattgccaggtgcagggctcatgcctgtaatctgtaatcccagtacttcggaaggctgaggtgggtggattgcttgagcttgggagttcaagaccagcctgggcaacatggcaaatccccatctctacaaaaaatacaaaaattagccaaacatggttgtgcatgcctgtggtctcagctactcgggaggctgaggtgggaggatcacttgagcccagggggcagaggttgcagtgagcagagatcacaccacagcaacgggcaacagaatgagaccctgactgaacaacaaaaaaataggatcacccaaagtgtacaaacgtattcatgttaaacagaattgttgcctattcattcagtttttattggtgtaatttgaaaagatwactcccaacttttgagcattctttaagaatttggggaaaatacttatcaatatgaaataaactaacagaacaaaatgttagcttgaacttggagcgctcagaaaacaagactataaagaaattaagttggtctgtttgtatgtagaaataaaaataaagaatttttggttcacttaaacacatgggcagtttgtcaactcagatggtttagctgttttcattaaataatgttcaatgtcttatcaaaaaaagaattgagtggttcagcttctgaattcattgtctcatatgtgtttgatggagcttttctgcaactctttatcttaaaatttaattctctttaattttcagataaatttttaattatacctttacattcactgatgcctacagttaaccagacacaggtatgttaaatggatacatttgttaaatgtatttcaaactgaggcaagctttaaggactgcttgttacgtgttttcctttattttttttaaggagtattttcaaatagtaattcatgtaaaaaaatacttctttgagaacctttgcaaatgagtcttcaggggatgattgctcaaaaacttgaatatcagcrgataacccacaaatcagattagttttgtctacattaggaaaaagtttaaagaattggtttcaccagtaacttcgttgagtttcctgagtaagagaaaaaggtctgtgagtactactaaaagtaaccaaacctagaaattaatgatctgtgacatactacagtttgatgatgatttgagatttaatttcacaaagctagtatattcacaggtataaaatttctgttttaataatgtattatgaatgtttggctccatcagatacaggygctttcctaattagagtgaacactacattctcagaggcaggataatgttatgatctacagtatttgcaggctcttgcaaaatgaaattgattagaaaacctgctcctccccccatttctagtttatccttttctctttttataagaaaatatcaagatacttttctttgagacccttttaatatttttgttgctggtaccttagtcatgaattagatacagagtacatacctgagagaagagagggggcaagaaagaaaactcttgattccaaagactgaaagagtatccagcatggaagtattcatcttccacaccataacctagtaaattatgtattcctttgctggagagtatgtgaatagcctgggaaacattttctgtattgactaccagttttgtaaatgaagggataagtttttgctttttgtttgtttgcattatcgccagtggtacttgattacctatcttctttctactttagtgacattgtcrggttgtggggcagtatttgtagaattctccatttaaagaggatttttttttttcactccaatctgatctcaagctagtagacagtggttggtacagctgcacagttgacatttgttctgctgggttgggcatctgcctgattattcagtgttcttacccatggagacttgacttcattattcttgtcctaacagaaatatccctccctctactttataacctccagcttttgttaaaaaactgctgtaaatttaaataatgatacctcattggaaatcttgtttgtgataagattgtgacatctgtgggagatttaatgtggtttaccaaaagataattttgtaatattgaaaatgatctgtacttcataaatacatcgataaatattagatgtatatgtcagtgaatgaacatagaatgctaaaaatgaacagtatctgaggtaattcctctaattacaaatataatgtattagaagttagtgtacttttgtgattctgatgtatttatttttacaggtgtttaaaagaacccctcctggtgttcggaaaatagtaattgctaccaacattgcggagactaggtaaaaatagttttaaatatcaaatactgatgattacataagttttaaacaccataacgtgtttatataccttaatcttttttctctaccatataccttgtaatttattaaaaataaaaccttttttatggcagtgagcatagttttattttttgtgggcttttttgagacaaggtctcattctgtcacccatgctgcagtgcagtggcacgatcatggctcactgcagccttgatctcctcagctcaagtgagccttccacctcagcctcccaagtagcttgtactacaggcttgtgccaccacacctgtctgattttttaaatttcttgtagagatggagtctcactatgttgcccaggctgatctctaactcctgggctcaaaatgatcctattacctcaacctcccaaagtgctgggatgacaggcctaagccaccatgcatggccagttttgtgggggttttttaacctatagtaatgctttagctcagaaatagcattttaggtgttggtttttgtttgttttgttttcctaaagaagcrtgggagctgaggtaaattttgtcctttcgcctgtttctggttgggggtagtatttggtaattagttatatccagcctttaaatgttcttgtattctcttggaggtactaagatgtagtttagtcactgaaacagattcttttctggaagctgatattaaaccatgctgttggggctcccatagtgctaggtatgaggcaacctgtgatatttgactgtaggcaagtaagaatttagtatatgatctgaagaactaatactgtgctgtcacttacagtgcctgacactgcctactgttaggtactcgatccctataatattggtaatgtgggtgtgaagagtagtgaaaatcctgaatggctaaaatcatttgatgtaataaaaaaaaaatgctctgaaatacctatttattggtcttttataggttaatagtgctttcgatgtgtgtgtgtgtgtgtgtgtgtgtgtgtgtgtgttttaacattttatatatctgttttccaaacagcattaccatagatgatgtcgtttatgtgatagatggaggaaaaataaaagagacgcattttgatactcagaacaatatcagtacaatgtccgctgagtgggttagtaaagctaatgccaaacagagaaaaggtcgagctggaaggtaaggtgggaactctgtccaaagcttttagaacacacaaaaattttgtgtaacaaaatgtgatgttggcatttaaagatatttattaaaagagttacctttcttattattttgagcttattgcaaaacatttttaaataggaaagttgttctaatcgtagtttgtttggaaaagtatctgccaagttttctattttatgaatcttttgccttcaatttctaagtttgattaataagttatgttacttataatagttggttttcatttttttaaagcatatattgtgtgataataatagcaactaatactttttgagtgtcagatcatctcctgaacacttgatccatattaactttcttaatcctcactacagtactatgaggtaggttattatatccattttacrgataaggaaattaaggtacaaggaaattaaatgacttgtccaaagtcccatagctttctaaattacagagccaggatttgaatccaggcattctgactacacaggctaggctcctaatcactgaattttatagcagtactgatttttcaccagtagttttcaatgaaagcacaaggaaagtacttttcctcataatgtcataataacttaagaagtaaaactatctctgtcttaatgataggaaaaatgatctgtcttgaacttctacaaagaattggactttaatgcatatttcacagtatttctgcacttattcatatgagtgataagagccatatatggattttcagaagagggtttttcttttgcctcttacagatagaatgagagatttccattaatctttcgatacagacttaagaaaaggagagttgaaagaaaactttacaggccatttatcaacccctcgttttaagtttgtacaatatccataaagctctgactgacttgctgtaatctttgcacattatcccagtataatttgatttcaagacagtttattagatagttgatgctattgaaccaaaatcgtggtttagtcaaagaagtataccctcctaataatcagttatcagggaataacttgataagggacccagaaagactgaggttttcccatgtagacccatcacctctaaatattgattcaaaaagtattcaccatagtgaacaggttttggcacacctttatatgtgaataataaacatactaagccttagatttgttccatgaaacaataatagagctaaatactaatccttcgtcctcactcctgtgcggtaggttaactgtggaattgctgttttaatttaaaaggaaaacagtcttttgtaggctccatggataaaaattccttctgcaaaccttattattttggagatcagaaaaagctatagtatgtggctttcaatggaggtactcttttttttttttttttttttttttttttgagacggagtctcgctctgtcgcccaggctggagtgcagtggcgggatctcggctcactgcaagctccgcctcccgggttcacgccattctcctgcctcagcctcccaagtagctgggactacaggcgcccgccactacgcccggctaatttttttgtatttttagtagagacggggtttcaccgttttagycrggatggtctcgatctcctgacctcgtgatccgcccgcctcggcctcccaaagtgctgggattacaggcgtgagccaccgcgcccggcctcaatggaggtactcttattttagtttctactggagagatattgaggtatattatataatagacagtgggtctatgtagactcatggaaaaaataactaagatttttagaattcatttttgttcctatagcagcaagagcctaaagaaatatctcttctacttgagaatacatgaatatggtcacctcttcacatctagtttttttttttttttttttgagatgaagtctcgctgtgtcaccagactggagtacatggcacgatcttggctcactgcaacctctgcctcctgggttcaagtgatcctcctgcctcagcctcccactgggactacaggagcacaccaccacacccagctaattttttgtattattttttagtacagatggggtttcaccatgttggccaggctggtctcaaactcctgactttaggtgatacacccacctcggcgtcccagagtgctgggattactggtgtgagccatcgcgcccggcctacatctagtcttatcattgttcaaaaaatgatatcattcatggctctagttacatacataaaasagaaacttttaatatccctctgaaaactcactaaatatatagtacttaaaatgtttttcagtaatatagacaggttagcataatgccaggattcattacataataagattgatcacaaggcatacttgacgttactattcttaaccttaacctaggtagactgctgttactgagcacagtaatttggaatctgtcagaaatagggaagcaaattattggcatggggaggaattactgtgtatctttcttaaaactgtgatgagggtagagggtataacgtttttctaaacagaagaaatacatgattcataaaaaggaaaaaataattacgtacattagctattatgtggcatgtaagaaattgatattggctacttccctgcctagtattttctstgcagttctaaaaagtcattgatgactgtccctctttgtttcattttgttttgttttttttttaagagttcaacctggtcattgctatcatctgtataatggtcttagagcaagtcttctagatgactatcaactgccagaaattttgagaactcctttggaagaactttgtttacaaataaaggtaaattaggtgggagaatgaagaaactaaatggaagtgatctcattttcaacatcttttgtagaacaaagtactgtattaatctccaagaaacaattattaactcacaatttatttcatgtgtgcattagtaaattgtgtgtttaaacttccttcaaatgtatattcaacacttttaaattatatactgctctagaggaggcaggctgcctgtgtttgaatcctgcttctaccccggaaaagctagttctgttatattgggcaggttgtttaaattaacctcctaaaatccttagaacagtgcctggcacgtggtaagtgtttagtaaacagtagctactgttattacatgttaacatgttatccttcattataaactacttatttcagtatcttgtgtcttttgatatagttagacttgttttgaagatagtgagtaatcagcttgttcactgagattttagccagctacttttgaagatagtgggtaatcaacttgttcattgagattttagccagctacttttcctattaatagagttgatggtagaaagtagtaatatatataggactttaaacatgtttttatagaaatacaaatataattttaattcattttggtaaaataacttgaaagtcatgtataaatttgatgctttgagtcatcagcccaggtaggactaagttgtaatgctaatatattaatattatatgtatttaataatatttgtctcccccacttagattttaaggctargkggaattgcttattttctgagtagattaatggacccaccatcaaatgaggcagtgttactctccataagacacctgatggagctggtaaatttgttttcttgtttttttaattctaacttagaatactacagcatgtaaaccagttaattataatgtttactctcattactgcaaagtagaccaataatgtccaatgccaaatttgattggctatttgactatcaatttagaactatcaggttatgagataggcattagaaagttataaagtgatatcttcgtaataattcttaaaagactaggatctttttgcacatttttttttattgtaggcttgatttaagattacataaaatttgaaatttttaagttactggtctttaattactggcgagtaaaacaaatatgcagctaaatgatttatcacaaaggaaggactatgtagtaattacttacatcaagaagaacattcccagtatgctaaaagcccccttcctaccctctcataatcactccactgtcccttaatcccaatcatgatagataacctctatcatgactttaactataatggcttgatttttttttttgatggtttttacaagtatgcatcttcataaagagttcagttttgcctattttgtgaactttacatgaacccatacagaatgtgtgtggtttttttgttctttgagggagcagagctctggattatttcacttaatattatgagattcaaatgtattgttgctttagctatggttttttttctttttcctcttttttttttttttttttttttgagacagagtctcactttgtcacccaggctggagtatactggcatgatctcagatcactgcaacctccacgtcctgggttataaggtacatgtatgatcaagttgggtagataacgcccaacagttttccatggttgcaaaccacttaaactcctaccagtggtggatgagagttcccattgctttgtagcttcaccaacctttcttattaattggccttttattctaaccatgctggtaggtatgtagtggttttaatttgcatttctatgactgtcattgaagttttcagcagcttttatgtttattatccatttgtgtagtctctcataaattgctagtgtcttctgttaggttgcagatcatacagtccttttgtactcttgatctgcgctttttattggttgtatattgcatatctgttttcaactttcctttttttaataccttgataaattccttattttattttattttattttatttttggagagagtctcactctgtcacgcaggttggatggagtgcagtggcatgatctcggctcactgcagcctgcaacctccacctcccagattcaagcgattctcctgcctcagcctcctgctgggattacaggcacctgccaccatgtctggctaatttttgtatttttcgtagagatggggtttcaccatgttgaccaggctggtctggaactcctgacctcaagtgatccgcacacctcagcctcccaaagtgctgggatcataggcatgagccaccactcccagtctaaattcctaattttaatgcagtaagatgtatcattctcaaaggttattgctttttacactttaataagtcttttcctgaggtcataaagatacatttaaaaaaaatttactgttttgtttataatgcatctgcagttgatgtgtgttggggttgaggtagaaataaaagtttttataaataaatgtagagcattgactgagcaccatttatagaaaagttcatctctttttgtccttgttctgcagtctttgataggtcaatgtctgtggatttgtgtgtctgtttctaggcttatttctcatctgttggcctgtatttctctcctgagctggtatcacattgccttaattactctagctttatgataaatcttgttttctagtggaacaaatcactccctttcattcttcttcaaaaacgtcttgactctagagactgaggtgggaggactgcttgagcccaggagtttgagggacacagtgagctgtgcttgcaccactgcactccaacccagatgacagaacaagaccctatctcttaaaaaaaaaataataatagtaaatttttttaaaacagagtgtcttggtccttcttggtgatttgtttttccaaatacatttgagaatctttggagtttgattttgattgaattccatctataaatcagtttggggagaactgacatctttacagtattgagtcttagcaaaaagatcatcatctattcctctgtttatttgggtattcagtctcagtattttagagttttctttggggttttatatgtctttatttagattttttaaaatttagatttcaaatatttaaaagcagaatccaaaaataccactaatcttctaggttagtggtatttttggattctgcttttaaatatttcatcatctttcgagtctgataatacagaaataaagttgctttttgaatgattgtattcattaatgctgtaaagtccccttattcaaataacttcatgtagatttttttctgcatatattatcacatctttaaataattagagttttatttattcttttttaagtttctgggacccttaatacaatgttgagcagaagtgatatgatagtgtgccttcttgtcttattcttcttaaaggagaagctatcagcaartcattgagagtaaagtgtttgttggtgtttttttttttttktttttttttttttttggtgtgtggaagctcttattacsttaagtttactaagacatttttatcttgtatggataatcagttttatcaaatatcttctgcttctgatgagattatggtatgactattttagttggttcatgtattcagttaaactgatgtttcaaatattaaacaaatttttctttttaragtaaacctaacttgccagcattcaatttgccattattttgttttgkgattttcatatgtaagtttatttagttttcttcagatgtccttgtaagatttagatatcaagctattctaggttcagaaaacaagttgagggttttacatttcttttatttgaaagaggtcttttaaaaaaaaaaaaattaagtgtattttctccaaaactgtttagtaaaaatctgtgtctgatgggatgcttatgggttcttttattattatttcttgtttgcatctatatgcctagttattttaattgtgcactggaaattctgtttacaaaattctttatagataaaaatttgaagcttgggatgagggtagctttttttcagcaaggttttatgttcctttctgccaggaaaagaggccccaacctctgcactcacctcccctagatgtctctcattccctaacctcttgatttacaattctttgttaactccttgtatcttcaggctacttttctagctgtccacagtggggtggttggaccagatgacctagggaatcagagcagaagtcactcccattttctgtggttttagatagttcctttttcttttgcttttctgtctcgcgtcacctaaactactagaatctagagagtgtgcattatgtattccagatgtataatagtgtatcttttgtttttgttgtttgtttctacaacttttatactttattaggtgactttatttaacagaaagtttgtcatttctggtatttctctcaacacagaaaagccaagttgtgtgttaattttggttatgtttaaataagtttgtaacctttgctgacctcacaacttatgttttggtagggaaaactaaagctgaacaatatttgggcatttggacttagaagagagagtagtggcttgttactctttttaaagcaagctaaaatcgttttaaatgtaatgctttacaggatctattttaaacacacactcttcctttacagaacgctttggataaacaagaagaattgacacctcttggagtccacttggcacgattacccgttgagccacatattggaaaaatgattctttttggagcactgttctgctgcttagacccagtactcactattgctgctagtctcagtttcaaagatccatttgtcattccactggtaagaaaaatggaaataaaaccgagttattttagatgtgaacaggagttgcttagatatatttttcattagcgttttattagaatgtcattctccattatagcatcagagcaatttaaattggctatgtctgctatttttaagggaaaagaaaagattgcagatgcaagaagaaaggaattggcaaaggatactagaagtgatcacttaacagttgtgaatgcgtttgaggtaaaaaaaaaaaattttgtcctggattatgatagtttattcaaatgaaatgctaataatagaataaggatcatatttaaccttttgaaatctctgttataaggccgggcgcggtggctcatgcctgtaatcatagcactttgggaggctgaggcaggtgtatcacctgaagtcaggagtttgagaccaggctggccaacatggcgaaaccctgtctctactacaaatacaaaaattagctgtgtgtggtggtgggcatttgtaatcccagctactcaggaggctgaggcaggagaattgcttgaactccggggcgcggtggttgcagtgagctgaaatcatgccactgcacttcagcctgggcgatggagtgagactcaatctcaaaaaaaccaaaaaaccaaaatctatattatcataggtatcaggagtaaattactgagaatgttgaaatttagctgaacatttgaaaaaagttataattcatttttaattttgtaatagttcattacatttaccgttttggggaaataatagtttttggtaagaatgaacaagtgaatagtttattttaaaattttgtatttaataatttctttgtatctttggcttattaacgctaatgacagtctctttctattcattaataaactaccctgtattcagatttaacatgtaatagaggatcataatcatgtacataattcagattaaagagacattttctgctcccaaaagccacgtgtatctgagggtaaacatttatcacctatcttggtaaaatttaaatgtaatttggtttttagaggcagtatcttttttctgtggctctacattctgtttcatgtgacatattatgggaaagttcatgtttttttgtctttgagcttattcagcttgtctttcctttttccccatttccctcctcttaaaaaaaaaagcaaactataaagaaaatctgtgaatttgaaaatatataatagcatttaagtcagtttaatagtgtgttctttttgattagtgtattatgtacagtttggatgccattttgtgtaaaatacataattaatatattactatatacttaattgtataaaggtctggaacttcagtggtggttgtctcttaaggactaggatcatggggagtgtatgtgtttttagttttatcagttataaaattctttgaattttttacaaagaaaattaaatattagtagaatattaagcttttactaaagtaaagagggaaaccagtagtaatctttgtttgcgggagaaatatagatttcttcatttctttgccccatagggctgggaagaggctaggcgacgtggtttcagatacgaaaaggactattgctgggaatattttctgtcttcaaacacactgcaggtaatggtgaatgttttgcagtaattatcatatatgctagattagagaatatatacatccattttgtacaattagatctatagcaaaaaagtcaaatatatggaaattgagtatatttgtatatatacacaaagtaatgggggatctttctgaaatcaactgcaacaaaacaaggaaaagaaacatggttccagaggataagagcaaggcacagtagggttngatttctgttcctgtccccacattctagttgctattttgatgattcaaactgagaatttttgctaacactactaaaatctgttgaaaagtatcaaataggatagatatctgtaagttttctggtttagtatagtgaaacaccrcaggcaagcatttgtaaaacagaagaaaacagtaaagagggcatatgccatcacatttcagactacactgaactgggtattcgaagccagtgagaatagaaatatcctcatcttctcccagtacacatacactccagctatgtgacatgaggcctgatactggacatttaacagatctacaaattagtaaacaaaaaaatctaacataccaaatcagaagtgcccagtcattagcaaaatggaaaaaaaggatcaccacaattcggaaggaaaggaaaagaaaaaaaaaagagtggaatgccatgtttcagtagaaaacacctttaaactgtttcataatatggaatagctaataagaatatgaattcagcaaaacataggttagaaaataaacagtagagtgaatgaaaagacacctgagctaagaaaacaaattgaagatcaaaagaaatcacaaggaacagaatggacaccccttaaaaacaagttattgccataggaaaaaagcttgaagtaatcacagtttatggaggtacctgaaaaagacaaaaattaaagcaataagtaaaatcttaaagacaggaagacaggactcatccattatgagaacagtagacattagtgtctgcatacaaatcctgtgtaattgaacgtttattttgagatgtatgtaagaacacgttttgaaatggaaataatgaaatgaacagagaagtgaacagaagcatgaaaacataactgaatccaagtgtttgagaatgtcatgtccagtcaggatatgaattcaggtgtaaagaaaaacaacaggcattcaagaaatactgtacccctgagctcttcttgaaaagcccattgacggtgaaatgctgttagttaaaaggggaatcacagtggagatttcaggaatggagagtgcatgcttaatcagctggtgtagtatacattagaagtatttaaatatagagctaataacaaaatggtgttaggaattacacatgcaaaatagaatgtaaagattattatcctgaacagtataaaataatggcagtaaaaaccaggaggtgtctaagaaagtcaggtgtcagaaaaattaggtggggaaagtcacacctttcataaaagggatatatacttaaatataaccaactttatgtttcataatctctaaaaggaattccttaggaaatatttctgttatgaaaatacaagattcatctggtcattcactttcctttctatttaacttttctttaaattgtactaaagttaattgttttataaagaatttctatactatgattctgttattaggatgcatttcttctatcagtatatatacttaatgggtgtctgcaatcttatttatttagaagactgagtattgaggcaagggaagtacttttctatgttacttgaatgctttgtaataagccatgtatcattatttaaaaaaaaaacaaaaccttaagcttacctgccatttttaaccatatttaattctcagtaatagaaatatggatgtggattattttctttatgcttttctatattttttaaaaaatgggggtggaaagtaattttaaaaattctattagtctttcacaaaatagagtaatccttaaacatcagtggctattccttacaacatgcaaactttttctgtgaaaagtcgggtaatattttaggcttacaggccataagatctcagttacaagcattgacctctgccattgtagtgcaaaaacaaccaaatgtagatgaatgggtgtggctgtgttccaataaaatgttattgacaaaaacagcttttgtagtttgccaacccttgctttaaaacatgtttgctaaagtgttttcataaagcagggatagcttacaactcaatttatctattagtgtatggtttatagcctcaatgtgtgaaaggtattctagttctatttgttaccattgctccctagatgctgcataacatgaaaggacagtttgctgagcatcttcttggagctggatttgtaagcagtagaaatcctaaagatccagaatctaatataaattcaggtacagcaggaaacacagtgtaaataagtatcttttgtctattgtatcagtattttacttttcttttcccctctaccttctcaccccccatagataatgagaagataattaaagctgtcatctgtgctggtttatatcccaaagttgctaaaattcgactaaatttgggtaaaaaaagaaaaatgtaagcattgaagattattattaattactcgtaattctcttcttaaacttttgaaatctgctcatgtaacaaggcttatattataaatttgttcttattcatatgtgggttatattcttgttcttttaatcatttcagagaaggtgaactgtttagccattggtatcactttccctcacaacacatcctggaatcacctctttgataacccattattcacaaagaatgctaccacatgataccagtgtaaatattagaagagccagcctgctagtaaataccagtggctggataaaaattgcttagagtagattttatttcagaaacttttttcctcttgccttataaatggataacttagctctttgaataacattgtgatttcactattttgagaaataaagtgtaataatatatttacaggtagcctcagtagtaattggagacaacagtgaagcatgagctagaatgagctcattctagctaaaggatacagagaaactaagagtcacaaatggccagtagtgtggttgctgctattttggaagacactctgtattagaattatgattgaatcattaaaatagtcagtgacccagtgcatgagtttttaatttgatagatgtgtcttaaggaagtaatttcaaatgttttctaacagctatattgtaaataatatagatttctagtagccatgggaaaattgtggttttataatactgtaatgcatctccataggtgggcattaaaacagtcattgtgtagtaacatgtaaagtatttaaactgatgttaaatgaaagttggatattctagaattataaacatgaaaaaataaagactttaaagataggccaaagtgcagacattgttcttgggcagtggttctcaactggcatgattttgcccccaaaggggacattggaaagtgtctggagatacttgtggttgtcataacagtgtgtcagtagtactaaagtcaagaaaccctattccaaggtataaagtaatgggtagctgatgaattttaatcattgtggttggattattcacattttaagtgacctaagtactttttcaaaataatacttggccagaaatttttttgtatgtgtgtacctaactttacaggtagcttaacagtgagtcactttgaaattcattttattttcctctctgccatcctgggagggctttctgaaaaaatgtagttttctttggactggtgcattgttttggtccagactaggggtcagcaaattttgacctataggccaaaaacttgtttttgtcctttttttgttggaacacaaacatgttgttttcatgttgtctattctgctttccttctacactagcagagttggacagaaattatagagccccaaatatagaccctaaaatatttactctctggtcctgtatagaaatttgctgggccaggcacagtggctcacacctgtaatcctagcactttggttggctgaggctgttagattacttgagcccaggaggtggaggttgcagtgagtcaagatcacaccactgcacgttgagagatcatgctactgcagtccagcctgggtgacagaacgagaccctgtctcaaaaaaaagaaaaaagaaatttgtgaagttctactgctctagttatgcagggtggcaggatggcattggtaaattgacttgaagtgagaaaaaataatttctggttttattctaagtatttaaaactgtaaattcataaccatgattcatgattttgattacaagtcttatgaattcttagaacttcagaagtggccgggtgtggtggctcacacctgtaatcctggcactttgggaggccaaggtaggcggaccacctgaggtcagaagtttgagaccagcctggccatcgtggtgaaaccccatctctactaagaatacaaaaactaattgggtatggtggtggcacatgcctgtaatcccagctacccaggaggctgaggcaggagaatcgccggaacccgggaggcggaggctgcagtgagctgagattgggccactgcactccagtctgggtgacagagcaagactccgtctcaaaaaaaaaaaaaaaaacttcgaaagagacactcgtaaaaacaaataggaaagattagtggattattagcttttatgctgttagttaatacaggtaattaacattaactatttaaaaataaattattaaacatctccctgttgaataatactaaagacttttacaaattgagataaaatgtgtatgactatcaaaaaaaaaatgacctaggaattgagagattgaattagaactgtcaacatgaatttaaacagaattcttaacttttcattttttattcatctgggtcatactctgtaaaatttttaagttgataattttacagttattttgtaaatcaagggctgtttatcagtattatgattgtcatagtaaaatgtataaactcttggtatgaatcacttaattattttaggtacttttttgttmtttattcttcagtggtatagtgtgcattaacattaaggaaaagaatattctgccatttttctaaaatgttgagtaattatacctgcaagaagaagattagttacatgatttaaattattcatactgatagcattttttcatatatttttaaggaaattatgctctgtcctcaaatataaatatatttttttgcaaaaataaactgaattattctctggaatttttttagattccgggatttgtttggtttttaccaagctcttctatcagtttttcaagtagtgtaaaaaaagaaaatcctctagaagacttctttttaacaaactgcattttaactttttttaaagggtaaaagtttacacaaaaaccgatggcctggttgctgttcatcctaaatctgttaatgtggagcaaacagactttcactacaactggcttatctatcacctaaagatgagaacaagcagtgtaagtgaacatttaaaataattaaggatctgattatcagtctcattgtatttttatgattgtgtagttttaacaattatatacaaaattttttttttgttgtgtcttattcctgtgacgtgagtaactttttccctctaacaaataacctattcttttaattttcaggtctgtaatgatggatctttgtattttaattagttaggacagttatttgattgcataattttctttcagaacttgctttcaagaaatattggcatattttatggtgtacaggagtttacattgtatagaaagttttgttagcatgtcagtataccttataagtattgttcagcatgttgagattctgtttatttatatttttctctttagaacagtaatttgagatgatttataaaaaactggataaaaataacttcggcaacattagtgttttgcttttgtcactcagaaaatattttgttcagagtagtgcttagtttaaactaaaaaatattaaaatacctatgttctctgaataatgaagatggctcatttaaaatggtatttcttacaaatctctgtaattacaatagaaggttaatattttagaaggaagatactcattaattaatactggtaatattgttgaatttatatagtaatcttttcagactcctgaatgtattaattcactttaattttcattacagatatacttgtatgactgcacagaggtttccccatactgtctcttgttttttggaggtgacatttccatccagaaggataacgatcaggaaactattgctgtagatgagtggattgtatttcagtctccagcaagaattgcccatcttgttaaggtgactgactttatgtgattatcttaaatctacrtgtaagtcagcatgtggtcatgtggttttgttctaactgttaaatagattaacatttcttgctctatttcagcagagcaaataattttgaaaaaatgattcctggtttttctgaattgtgttttgaggtggtaacagaccagccattctaaatggctcagtgtgattgcagtgtgaattttaactgcactttagttattcactcataaccacactttagttgattgctcactaaatgttttagcttttgagccatcgcttgtgaaactccttgtatcaggtaaattagtttcatttattatgttatttggtaatatatctgcctttgttgaacatgtataatttttccaaccttaggaattaagaaaggaactagatattcttctgcaagagaagattgaaagtcctcatcctgtagactggaatgacactaaatccagagactgtgcagtactgtcagctattatagacttgatcaaaacacaggaaaaggcaactcccaggaactttccgccacgattccaggatggatattacagctgacagcttttcaggggtggtctgaaaagccagtttgacagccattcttcatcattgtttaaattttggctggatgccaaaccctgggacatgaacaattttcatgtgtaaggtagaagccttcagtaggtagtaaagacttaatgtgcatgacttgatgttatatgtagagatatatatatatatatatatataccataaaagcaatatgttctctgatcatatactctgctgtggtcatgcccactctttgggagtatattccctttatatatattgagtattgtaccacttgagaaattcctttgttctgttatacaaaattaatctttctgctcataatgattgatgataccaccagtaaaaataggatgtttaccccaaaacaagtgtcaattaagaatttgaacacaaccacattttttaaaatgaaacttctatcggaagtaaattaatttgttgtaataaagtccagtatttaataaaatgtacaatgttaaatctcagccaacctcttggattggtttctacattttcacctatggcttggttcatttgatatttttactatttttaaaacacgtgccctttttatatcaccctgtgcctcataatacagcaattgagagcacggtctggagcctgattacctcagttccagtctcagctctgtcagttagtcagtgtcttggcttctctctctttttccttatcttgtaagatacagttggcccttcatatccatgcattccacatctgtggattcaaacaactgtggatagaagatatttggggaaaaaaaggatggttgtgtctatactgaacatgtgcagacttttttccttgtcattccctaaacaatacagtttaacagctatttatatagtatttacattgtattaggtattataaataatctagagatgacttaaagaatatgggaggttgtgcctaggtaacatgcaaatactacgccattttattataaaagacttgagcatccatggattttggtatttgaggggttggggttggaaaccagtcccccacagatactgagggacaactgtacatgtaacagttgtgaggatgaagtacattaatacatgtaaagcacataggctagtgcctgtactctctgaatcttagttgttatttgtccctgaaatattttcgtaaatgtctaacaatctattatattacactttttattttattgctacttatcttcttcgccaaggaatagtgtaacaacacatgctgtacattttcagccctatcagattgtgataaatactgttggttgccggccagcaactattttgtccctcccttcttgcttgcttattctggtgttcccttctgtgcagctctgtgcccaggtatgttggaccctttccctaagggtgaatcctgctgttctaaatgaatcacatgtggtcttatcccccttataagtaattgataaggcatgagtacataaacatgtcctagtgaatggcagctgagaagtgatcttcaagggggtgtctgaaaaatgttttactcactaataggcttagaggaggaaatcctgctctctctggacattgtcttttctgactctgatagttggaactgctgcagccaactaatgatcacaaggagacacggactcagactgaggttagctcagtggaaagatagaactcaccagagcctttgataatgccggtaagcttcagaattaacccattctagagctgctttacatgtggacttatgttgatataataaaaacccttcaattgtttaagccacttttaataggatattgttagttttttgttggttttttgttttgttttgttttgttttttgttttttggagacagtgtcttgccctgtcacccaggctggagtgcagtggtgtgatcttggttcactgcagcctcgacttcctgggttcaagtgatccttctgcctcagcctcccaaatagctgggactacaggcatgcatcaccacacccagctaatttctgtattttttgtagagacaccgtttcaccatgttgcccaggctggtctcaaaactcctgtgctcaagcggtctgcccgccttggcttcccaaagtgctgacattacaggtatgagccactgcacccggtccctagtagggtatttttaacttggcaaaaagggtattaatcagaaacatacactatccatcactgagtattatactcttgattttgcaatgtaagagttttaacctatttgtctgacagaaggtgtaaaagtgctggacatgctgcagaaagaaacaggaaaagcatcttgctgcactccaaagaatgcaaattttaatgtgccttccaataaatgcaaggaaaccgaaagagttaatagtatcatacaatgactgggatgtattgataatgctacagtgatccattaacagcacttgttcaggtactgctcccaatcctgggaatgtgtgttacctgttatgtctcaaatcctttatcttggctgttcttctaaaagtgatctgtctgtcattgaatgctggcattagagtcatgtcacaatattagagcatactggttttgcctctaacgtcgaggtgaccatctggtctttcttgctctgtaagagtttctgtttgtgcttttttttcccttacttttattatccagtttaaatccagtcagttggccaaaatggtcttggaagaaaggatttagagattctgtaaaaaagattattagttggttctgtgtttgcaaaccagtatgtaattcccatatgaatggggaaaatgttcctgaggaattatttaattgatgaggcattcacagagattaaagcagttattgttacctccaatttatgtcttctgcacagctgattaggttggacattttaatccaaggtgctacttacattctgtttcttttgtttacaaaatagggcattactgagtagaaaatacattccaggtctaagaactgtttgttctttagtggattttaaagaataagacattaaattaagaaggaaaatctgtttgattcatcattttgagtaatgcagagaataactcttaaaaaaaaaacctgaaacagaaactttcaggaaaaaaacaaaagaaattaaactactgaataatctttcaaaagcatcgttgaacagtgagcacatgtgatgccttcccaattaattaatttgggtaaaagctctagataaacttacaccaattgttgcaaggcattctctattactgcatttttaaaacaaagtcctcccctaaaagttatgaattatacaaaagctttaggaggaattttagtactcctttacccaaaataaatagtggtaaatttccttctgttcttagctctgagtttgtatttatttataagtcattgtgatcatgtatacttatatatttttaatatgctaattgcttttaaatgggatttttgttctgattttaaaataatacatcctccctggacaatatttggaaatgtagcaaagtaaatcatgttaccattgttccattttgatatatataaactttaggtattattttatatataataaattttaagatattatatacaataaaattaaccaatttaagtatatgattcagtgaattttgtcaaacatatagtagtgtaattaccaccaccacaatcttgatacagaacttttttttcccccgagatggagtttcgcactgtcacccaggctggaatgcaatggcgcaatctcggctcactgcaaccttcgtctgcccgggttcaagcaattctctggcctcagcctcctgagtagctgggattacaggcacgcgccgccatgcccggctaacttttgtatttttagtagagatggggtttcaccatgttggccaggctggtctcgaactcctgacctcatgatccacctgcctcggcctcccaaagtgctgggattacaggcgtgaaccaccacacccagctgatatagaacatttgtatcacctaaaaatttcccttttacccctttgtagtcaatccctcacccccacttctatcccctcgaaacccattgatctgcgttttgtcacttttcgttttgccttttctagaatttcaaataaccagtcttttgtgtccagcttctttcacttaatgtaatacttttgagatactgatattgttacatgtattagtaggtagttcctgttttatcttctattcagtagtatttgcattgtatagttataccacagtttgttaattcatttaccagttgatggacatttgagttgttttcagtttttttgctgttatgaataaagctgctatgaacatatgtatataagtctttgtgtggttatatgttttcatttgtcttgggtaaatacctaagattaaggttgttgtattatagtaagtgtgtttgtataagaaactgctaaactgttttcagaatttgctgaaattttacattcccaacagcaatgtgtgttgggggggtcagagtattccacatccttgccagtacttggtatttttagctgtcgttttaattttagcctttagtggatgaggagtcctgtcccattatggtttaatttttgtttctaaaatgattaatgatgagcatcttttcatgttgtttgctttttccttagttatcttatgtatttctgtttgggttttgatttttcatctcatgtcaaatgattggagttttaaggatatatctgactacggagaaggaagattactaattaattttagagatacaaaaagttgttatttacattccttgagatttataatggccagatgtgttactcttgacttggttggtaaagtgtaaagagttaagccagtgttattaagtgccaggagagactagcaccagttttatatagttatgaaggcaagaggtgtattcatcatgaggtgaagaatgggacataagaaaaaatatttattagtattgggaaagtcattggagataaggaaaacagctgatatggaagcactgtagaggcgatctactgtggatgatagagaacttttaaattgtgactacctttttttttctggttcttaaatttgattcatatcttaatggtctggtataaatttttgagttgtatttttctatttctgagtccttatgtagtatattatgttacctttacacagtgaacatcatggttgggaataaaattaactttagcaaagctttaatttaatgaaaaagtgattccttggtgacttttatcttttaggcccttttaaatatttcaatacttaatctttcccatagcttccattcacctcacttttctcttaatggctgtttctcctgttaaatgagagagtttgattatttttacttgttctggaagccaatttttttcttgtttattcaagcaaaggcaaaacagacctatctctaacgtttttgtggtgtctgaagtaagaatataaatggaagccaacatactagatctctaaatattttaaaattttaaattagtttaacaaacttaaataaaacgtccttttagccaggtgtggtggctcattcctgtaatcccagccgtttggaaggccaaggtgggtggatcatttgagcccatgaattcaagaccagcctgggcaacatggtgaaaccctgtctttacaaaaattacaaaaatgagccaggcatggtggcatgtgcctgtagtctcagctactcaggaggctgagatggaaggattgcttaagcctgggaggtcagggctgcagtgagccactgcactccagtctgggcagcagagcaagaccctgtctcaaaaaactccttttgacagatacacattaataatgacaaaataaaaaatggcataaaacaatattgaagatgacttttagccatagtttcttattttttcgaaatattcttttttgcatcaattggcacagtaaccatatgtttttttctttagcttgttaatattgtagattgctgtcttagtcattttctgttgctgtaacagaatatcaaagactgggtaatttataaagaaaacacatttttttcttacagttcttaagtccaagaccaaggtatcagcatctggtgaaggccttcttgctgtgtcacaaatggggacatcacatggctagagggcaagagtgtgtgtcatctcaagtctcttataaagccaccagtcccatcatggaggcttcaccctgattaacttagctaagcttaaaattacctcacagagggcccacctccaatcaacatatgaatttggggattaagtttccaatgcatgaaatttatgggacacattcaaaccatagcagtcacatcaattgatttttaaatattgagtaatccttgcatttctttaataaaccccgcttggtctcagtgtgtaattttttaaatatattgctggataggattcggcagtgtcttgctgaagatttttgtctctctattcaggaaagatacaaatctatagtagcttttgttttaataatgtaatgctggcctcataaaatatgttggaagctgttgtcttcctcttacgttttctggaagacattatgcataattgccattaattctttaaatggttgtagaattttccaacgaaaccatttgcacttggagattttttttcagaaattattttaaattgtgagtttatttagtaattatgagattactcaatgtcttggtagtttgtggtttttattggttcattttctctaagttgttgaatttatgtatgtaaagattttttgtattgatcagaagcctgggaagcagtaaaaaatttttgagttttttgtaacgcccctttattatttttttaatgtctgtaatgtgggatctttaatgatatattcatttttcattgatttttctcacgtattctgttttcaattttattgatttctacacttaaccttatttagttcttactgctcttttgagtttattttgtctc

SEQ ID NO: 95377 - DNA, 30407 bp, Homo sapiens
  misc_feature (1)...(30407): n = A,T,C or G
ggaaaggaaacagggcgcctgctcctctctctgggattcaaggaacactccaggaaggcgtcttgctgggtccggggtgaggatgcagaggctgcagtgggggcrtgctcagcactgctaacctgctgctgggtgctgggtctggggtgaggatgcagagagaccatccccagttctgctaacctgctgctgggttcggggtcaggggtgaggatccagaggctgttagaggggcgtgctcagcactgctaacctgctgctgctacggggcctgtctgggagactgcagaatgcccgcaccggacagagctgctgacacccagagacggccgtgtttcagcccctccctgcatatcggaggtggcattgggaaggcatagagttctggggaagaggccagctcatgctggggagcccgagtgggcaccggggaccagctgatgggagcggggtgggcgcctcgagagcctgcatccgcatacaccaggccatgtccactgggcctgcactgggagggcccagctggtgctgtccggtgcttaccacctcaacggttgccagccaggggccctgcactcacacttcccaggttggccccacagccccgctgacccgctgtgtgacctcggagtatgtgggccttgccagacctgcagggcctcgtctgctggggggtggaggggcagagttaaatgtgacagcaaccacagccgtgggtggggaggtggccttggggacagctgacagcatggcttggagccacgctggaccattcctgactggggcatacggtctgacctcccagagccttggtttactgacctgtgaaatgggtgcccacctctcagagtcacccagagggttccctggagagtgctgaagtcatccctgtagggaaaggctagccaaaaatggcagacatgcmtgggctgctcatttggaagtaactggaagtttctggagagaggcggcagagtggcctcttctcagtccttttccactacattggctactcctgatgtccatccctccctcagcttcctagcccggcccctgaccactccttgctgccctgggcaccccctgagtcccctgccaggaccccatgcccacccctcacctcctgtctgctccaagccacactcaagttctccagccccaggccctgcgccccacacgacgccatcactgatgggtccttgtcctcacccctgccagccccaccccaaagatcttccgtgtccccagccagccctgagagtcactgtgtctcctgcatcaccccctggaccatgtcagctgccaaacactgcctgcccggcttttctttctcttaattgtgctgctttccccgaaggcggaacgaacaccacacagatggccccagcctcgctcctccctcagcagaggcccccaccctcctctctcccaggctccccagcctgcctctcggcccttacagcctcagccctgcccttggcacacggctgctgaactgtgccagtctcctgcctggggacagacccactgcacggggagccccagaaccactcaggcccccatctctctgccacacctgccttaaaggagcagtgtgcagtgtgggctggctgggcctggcatctcccaggcctcgcctctccagccctcccattcctctttgggagcctccctggatggagtgtgtggaaggtgcctggcaggtcctcccagcctgactcttccctgtccgcyaagtagccgggctgcaggggcccagcatggtcctgtgattctcctaggccaccgaygagtgcaccaaaaccgtcctggaactggaagaaacacaaagaaatgtgagcagctccctcctagagaagcaggaaaagctgtcggtgattcaggcagacttcgacacactcgaggccgacctcacccggcttggggccctcaaacgacaggtaaacgtgtcccaggaggtccctggggatgacggccatggaacatgccactcacacagaggtcctgcgtcccctctgtgcgagtcacggcctctcctgatcaggtcacggcctctcctgatcccaggccagtaatagcaccaccggctgctcacatgtttgtggctttgtgatttgttccactgacaaatgttgatggagtatctgttatgggctgggctcatgttcagcgtgcgagggttacaaaatagaacacaaaaaacaaacattcctgtgctcttagaggttacctcctggggcaggaggacagatgatgagcaaaataattttaaaagatacagtgtgttgtagctaggcatggtggtacacacctgtggtgccagctactcaggaggctgaggtgggaggatcgcttgagcctgggaggtcgagactgcagtgagccaaggttgtaccactgcactccagcctgggtgacagagggagatcctgtctcaaaaagaaaagaaaagaaaagaaaagaaaagaaaaagggaaatggtgtgttaggtggtggtaaatgctttgaaggaagataaaccagagaaagaagcgtcagggtcattggggtgaactgagggattgacattttgagttagggtgatgcgggaaggccctgcggagcagacattggagtccagacctgaaggaggggacagcccacaaaaccaccccaggtggacaggacagcccggcaaggcagaagcctgagactgcgcaagggctactagaggccagtggggcaggctggggaggttagggtatgtaagacccaggcagagaggggcggcccagactgtgtgcggccttagggagagcacaatcatgactttggacttttctcttggggaggtgggcacacagaggagggcgttgggtctgagaggtgacttgggctttagcgggctcccgcgcgctctaagattgcatgtggatgaagcatggatgcggggggcacctggggctatttgcagtgcttcagggcggcccctgtggggctggcgagaagccatcaggctctgcatatgcgttatgccaacatcgcccgatgggattcctgctgggttggctgtggtgtgagcagagacggaggtggagaatggctccaaggttctggcctggccaactgagatgatgaggggaacgtgcctggcactgggcctgacacacggcaggtgtcaagaaggttgcctaagccgggcacggtggctcatgcctgtaatcccagcactttgggaggccgcagcaggtggatcacttgaggtcaggagttcgagaccagcctggccaacatggcgaaaccccatctcaactaaaaatacaaatattagccaggcatggtggcgggcgcctgtaatctcagctacccgggcgtggtggtgggggtgggtgcctgtaattccagctagttgggaggctgaggcaggtgaatcgcttgaagccgggagccagaggttgcagtgtgccaagattgtgccattgcactccagcctaggtaacagagcgagacagcctcaaaaaaaaaaaaaaaaaatgccggcgggtcacagtggctcacacctgtaatcccagcactttgggaagccgaggcaggcggatcacgaggtcaggagatcgagaccatcctggctaacacggtgaaaccctgtctctactaaaaaaaaaaaaaatacaaaaaattagccgggcctggtgacgggcatctgtagtcccagctactcaggaggctgagacaggataatggcgtgaacccgggaggcggagcttgcagtgagccgagatcgcaccgctgcactccagcctgggcgacagagcaagactccatctcaaaaaaaaaaaagaatgcctcctagatggtgatgatgggtgacccataaagcaccgacccagtgcctctcagcctcttccctgagatccaggggcgcaacaccttcacgccgtcccttttcaggcgtaggtctcgcctcctcttcggcatttcctggaatctgagtttgtggggggccagcaggtgtctttcttctggtttgcatagccctatatggagtctcttttcctacccagaacctttcagagatcgtggccctgcagacrcgccttaagcacctgcaggctgtgaaggaggggcgctacgtgttcctgttccgctccaagcagtccctagtgctggagcgccagcgcctggacaagcgactggctctcatcgccaccatcctggaccgcrtgcgggacgagtacccccagttccaggaggccctgcacaaggtcagccagatgatcgccaacaagctcgagtcaccrgggccctcctagggagcagcctggactccgccttgcaaggcctccaggaagagatccggaattgtgtttgtcatgagggacttggaatcttttgtgttcctaaaaaccacatgtaccctcagaagggcatcgtttaagagaaataagccagccccacccataggaatctttttagccactcagcaatttaataaaccaggtaaaatcctagcgtttcccatggcatcccatcgcaaagacagagcctgtgactgcagacccacacacccacactcccacactgggcttactcgtccaggtaacactttggtttgcagcactcccaaatctgcacgtgcctctcacaacacaacgctgccacaggtccacaagctggtgggctgagcagaggtgggaaagttaaggcagctccagccagcctggcccgggaggctggtccccccagcacttccctctactaggtgcatctgaaaacccacaaaccaccttctttaccagttttcccatccccaccccttagaactctcaggtcccttttcctgcccccatgtccccatttgagttaaattcagatccacagcttgcaggagaaagtcagtggccccagacacacgtaacagggtgagcactgaaataagagcacgctggggcgtccacaccaagggactacgccccagtctgcccacctatcttttctccatcattaacccagcgctctttctccctggacttccaagtaccaatgaccttggggcttctttgcagtttaaagggaaaatgctctacaaaataatttcactttcaaacatttcagcagaagaataaaatcttttttctgaatatctagtaagcctttctgagtcagccttacttattttaaaacattgtagaaatacagaaaccacaacagaggtggaagggaggcttttgtttttttttttttgagacggagtctcgctctgtcgcccaggctggagtgcagtggcgcggtctcggctcgctgcaagctggaaagggggcttttaatgcccctatgcccctacccaggaacaacacctctgtgttttggtgtggctccttttgtatttttctgcacatacattttattaggcaagttaaggttatactgtgtgttttttgtatctcacatgtaaaaatgtgctcctcttaatgtaagcattttctcattttatgaaaaaattccccctgtgtcagtttaatgttttctcaattgtcagttttatgggttatcacaatgttttgattattcctttctggaataactgtgagttatggagcacacttaaggactttccaaatgttggctgtttctaacttggcgctgagcgcctttggccgcctttccgatgatgccctcgggacgcgttggcaggaggaatccctgggcgcaaggcgcggctgggccagccccttacaaagccctacgagctgcggggacccaggccggggcagcgggggccacgccccatctccgaccccacggggaccgggccgggactgcgccagcgggggcctcgccccgtctctgaccccagaggaaccggcagcgggcagcacgcgtgggcctctccccgcgggacgccggacgcgcagccagacgcgctccccaggccccctccgagagcgaggacgcgcccaggcccgctctgccggagccgccactggggggcgtagcgcggacgcgcacccttgcctcgggcgcctgcgcgggaggccgcgtcacgtgacccaccgcggccccgccccgcgacgagctcccgccggtcacgtgacccgcctctgcgcgcccccgggcacgaccccggagtctccgcgggcggccagggcgcgcgtgcgcggaggtgagccgggccggggctgcggggcttccctgagcgcsggccgggtcggtggggcggtcggctgcccgcgcggcctctcagttgggaaagctgaggttgtcgccggggccgcgggtggaggtcggggatgaggcagcaggtaggacagtgacctcggtgacgcgaaggaccccggccacctctaggttctcctcgtccgcccgttgttcagcgagsgaggctctgcgcgtgccgcagctgacggggaaactgaggcacggagcgggtgagacacctgacgtctgccccgcgctgccggcggtaacatcccagaagcgggtttgaacgtgcctagccgtgcccccagcctcttcccctgagcggagcttgagccccagacctctagtcctcccggtctttatctgagttcagcttagagatgaacggggagccgccctcctgtgctgggcttggggctggaggctgcatcttcccgtttctaggstttcctttccccttttgatcgacgcagtgctcagtcctggccgggacccgagccacctctcctgctcctgcaggacgcacatggctgggtctgaatmyctggggtgaggagcaccgtggcctgagagggggcccctgggccagctctgaaatctgaatgtctcaatcacaaagacccccttaggccaggccaggggtgactgtctctggtctttgtccctggttgctggcacatagcacccgaaacccttggaaaccgagtgatgagagagccttttgctcatgaggtgactgatgaccggggacaccaggtggcttcaggatggaagcagatggccagaaagaccaaggcctgatgacgggttgggatggaaaaggggtgaggggctggagattgagtgaatcaccagtggcttagtcaaccatgcctgcacaatggaaccccgtaagaaaccacagggatcagagggcttcccgccgggttgtggaacacaccaaggcactggagggtggtgcgagcagagagcacagcatcactgcccccacctcacaccaggccctacgcatctcttccatacggctgtctgagttttatcctttgtaataaaccagcaactgtaagaaacgcactttcctgagttctgtgaccctgaagagggagtcctgggaacctctgaatttatacctagttgatcgaaagtacaagtgacaacctgggatttgccattggcctctgaagtgaaggcagtgttgtgggactgagcccttaacctgtggagtctgtgctgactccaggtagtgtcaagattgaattgaattgtaggacacccagccgtgtccagaaagttgcagaattgatgggtgtgagaaaaaccctacacatttratgtcagaagtgtgggtaaaatgtttcaccctccagcccagagagccctaatttaccagtggcccacrgtggaacaccacgtccgkccgggggcagagcgttcccagccaagccttctgtaacatgacatgacaggtcagactccctcgggccctgagttcacttcttcctggtatgtgaccagctcccagtaccagagaaggtygcacagtcctctgctccaaggagcttcactggccaggggctgctttctgaaatccttscctgcctctgctccaaggcccgttcctcagagacgcagacccctctgatggctgactttggtttgaggacctctctgcatccctcccccatggccttgctcctaggacaccttcttcctcctttccctggggtcagacttgcctaggtgcggtggctctcccagccttccccacgccctccccatggtgtattacacacaccaaagggactcccctattgaaatccatgcatattgaatcgcatgtgggttccggctgctcctgggaggagccaggctaatagaatgtttgccataaaatattaatgtacagagaagcgaaacaaaggtcgttggtacttgttaaccttaccagcagaataatgaaagcgaacccccatatctcatctgcacgcgacatccttgttgtgtctgtacccgaggctccaggtgcagccactgttacagagactgtgtttcttccccatgtacctcgggggccgggaggggttctgatctgcaaagtcgccagaggttaagtcctttctctcttgtggctttgccacccctggagtgtcaccctcagctgcggtgcccaggattccccactgtggtatgtccgtgcaccagtcaataggaaagggagcaaggaaaggtactgggtccccctaaggacatacgagttgccagaatcacttccgctgacacccagtggaccaagccgcacctttatgcagaagtggggctcccagccaggcgtggtcactcctgaaatcccagcacttcggaaggccaaggkgggtggatcacttgagctcaggagttsgagaccagcctgggtaacatggcaaaatcccrtctctacaaaaatacagaaaattagctgggtgcggtggtgtgtgcctacagtcccagctactcaggaggctgaagtgggaggattgcttgagtctgggaggtggaggttgcagtgagccaggatctcaccacagcactctggcccaggcgacagctgtttggcctgtttcaagtgtctacctgccttgctggtcttcctggggacattctaagcgtgtttgatttgtaacattttagcagactgtgcaagtgctctgcactcccctgctggagcttttctcgcccttccttctggccctctccccagtctagacagcagggcaacacccaccctggccaccttaccccacctgcctgggtgctgcagtgccagccgcggttgatgtctcagagctgctttgagagccccgtgagtgccgcccctcccgcctccctgctgagcccgctttcttctcccgcaggcctgtaggagctgtccaggccatctccaaccatgggagtgaggcacccgccctgctcccaccggctcctggccgtctgcgccctcgtgtccttggcarccgctgcactcctggggcacatcctactccatgatttcctgctggttcccygagagctgagtggctcctccccagtcctggaggagactcacccagctcaccagyagggagccagcagaccagggccccgggatgcccaggcacaccccggccgtcccagagcagtgcccacacagtgcgacgtcccccscaacagccgcttcrattgcgcccctgacaaggccatcacccaggaacagtgcgaggcccgcggctgytgctacatccctgcaaagcaggggctgcagggagcccagatggggcagccctggtgcttcttcccacccagctaccccagctacaagctggagaacctgagctcctctgaaatgggctacacrgccaccctgacccgtaccacccccaccttcttccccaaggacatcctgaccctgcggctggacgtgatgatggagactgagaaccgcctccacttcacggtgggcagggcaggggcgggggcggcggccagggcagagggtgcgcgtggacatcgacacccacgcacctcacaagggtggggtgcatgttgcaccactgtgtgctgggcccttgctgggagcggaggtgtgagcagacaatggcagcgcccctcggggagcagtggggacaccacggtgacaggtactccagaaggcagggctcggggctcattcatctttatgaaaaggtgggtcaggtagagtagggctgccagaggttgcgaatgaaaacaggatgcccagtaaacccraattgcagataccccaggcatgactttgtttttttgtgtaaggatgcaaaatttgggatgtatttatactagaaaagctgsttgtygtttatctgaaattcagagttatcaggtgttctgtattttacctccatcctgggggaggcgtcctcctcctggctctgcagatgagggagccgaggctcagagaggctgaatgtgctgcccatggtcccacatccatgtgtggctgcaccaggacctgacctgtccttggsgtgcgggttgttctctggagagtaaggkggctgtggggaacatcaataaacccccatctcttstagatcaaagatccagctaacaggcgctacgaggtgcccttggagaccccgcrtgtccacagccgggcaccgtccccactctacagcgtggagttctcygaggagcccttcggggtgatcgtgcrccggcagctggacggccgcgtgctgtgagttctgggctctgtgccagcatgatggggagggygacgcgcatttctcacacggcagggagggccacacgcgtttgtttctcacacgatgggcagggcgacacatgtttgtttctcacacggcggggagggcgacgggcrtttctcacagggcgctccctgggtcttttactcacataggtctaaatcccatgtaaacacgtgttcaggactcaccaagcccctgcttgtcatttaactcaggaaaactctcaggaacgacagcacttggatttgccttaatcttaagagaagttgccttcggaaatgcgtttttctttttttgctcattcatttactcagtgtccacgcactgaccctccgtgccgggtggtttggatcctgctcccggggacagacacacagtgaggggaagccataagcaagtccatgcagacacagcgtcagggagtggtcatgcagagagcacgctagaagccagctgtgcagacacggggcagggaggtcccctctagaagccagctgtgcagacgcaggggacagggatggcctctctggaagccagctgtgcagatgttgggggcaggggtggcctctctggaagccagctgtgcaggagtggggggtggggaggccactctggaaaccagctgtgcagatgcaggggacasgggtggcctctctgagctgacctctgagtagagagacccaagagaagtttctcaaagcatcttatcaagctaggtayggtggttcatgtctgcaattccagcactttgggaggccaaggcgagagggtcacttgagcccaggagttcaagaccatcctgggcaacatagcaagaccccatctcttaaaaaataaaaataaaaaattagctgggaattgtggcacatgcctgtggtcccagctactcaggaggctgaggcaagaggatcccttgagcccaggggttcgaggttgcagtgaaccatgattttgccactgcacttcagccttgctgaagaccccgtctcaaaaaacaaacaacaaacaggcatcttatcagatctcggtcttgaaagcactcagcgyagtcttgcccaggggagggtgggtgyggtgtgagcccgtcctgcgaaattagctgtgctgtgttaacagaggacgcgtcttcctgtggaccggatttatctgcggctttcatttctcggaggtgctgtttgccttgcacttgatccccagaaaacctcaggggtccttctggggcatggctgggctgggatctgggaggactttggccacaagctcctaggcctggaaaggttctgttcagcccctgcccagccttgcttggggtcatgggacaggcatgtgtgccagttccggtaccagccagttcctggaggtcagccccttgggggcccctcaggggtggtgtgggcccagccaggcggtgcgccccttctgatatgccctgagagttgatcacgctggtgccagggtgccaagggctgcagggctcggcacggccgcctgtcccagggtcagtgtgctgcagggctggccaggccactccgccctcccagggcaccagggccygggggtgctctctgggtgctctcaggctygtgtggccccttgggtgtgagcaagcctggctggcctctgtcccgcaggctgaacacgacrgtggcgcccctgttctttgcggaccagttccttcagctgtccacctcgctgccctcgcagtatatcacaggcctcgccragcacctcagtcccctgatgctcagcaccagctggaccaggatcaccctgtggaaccgggaccttgcgcccacggtacagcagcgggcggcgggcggcgggcgggggcacygagctggggagcgcaggtgctgaagcgccgtctcctgcatgtcccagcccggtgcgaacctctacgggtctcaccctttctacctggcgctggaggacggcgggtcggcwcacggggtgttcctgctaaacagcaatgccaygggtaagctgcccrccgcccagcgcccgggccggggtctcctccgtgctgcctgccctggagactggaggtccgcatgaggggccctgggcacggtgctgggccttgtgttttctgggaaatgagtcctatgggctgatgcctctcccaactctggccttctgtgctcctaaggagggttctggggccctgcctggaggtgggctggcaccacatatctttccgtcccatgccaggttcctcctgagtcaggcttagcacggcttccccaggccactctgagctcctcrtggggagagagcctcaactctcygcctgtgattggcccatctgtggggtgcagagccctccaagtgaagaatctgtcccccaaccccagagctgcttcccttccagatgtggtcctgcagccgagccctgcccttagctggaggtcgacaggtgggatcctggatgtctacatcttcctgggcccagagcccaagagcgtggtgcagcagtacctggacgttgtgggtagggcctgctccctggccgcggcccccgccccaaggctccctcctccctccctcatgaagtcggcgttggcctgcaggatacccgttcatgccgccatactggggcctgggcttccacctgtgccgctggggctactcctccaccgctatcacccgccaggtggtggagaacatgaccagggcccacttccccctggtgagttggggtggtggcaggggaggcaaggggctggccgggacgcgtctcctcaggccccagcagacggtcccgtgttgtggctgcaggacgtccaryggaacgacctggactacatggactcccggagggacttcacgttcaacaaggatggcttccgggacttcccggccatggtgcaggagctgcaccagggcggccggcgctacatgatgatcgtggtgtgtgcccccacactgtgggtctttgggaagggggccgcccggtgcccagtggctccttctctgtgcagcgtcatcctcgtgcctgtgtggtcgccgaggatgttttctgagggtctttgtgatatcgarggaatatcaaraagtttgcaggcttggccccagctgtccagggaggtcgggtttgagggtccccagaaatggccgggtgctactcagggttctgtcagatgtaggttacttgaactgccttaaagcaaaaggccaggggcatgataaactgatgtcacctggtcctggaaagtggagggcccggtgggcctgggcatgggtatcgctggaactgtggaggctccgtgtgccttctggccgtgcctctccttctggccggctctgaatccctggaaaggacggcgtgagtgagggcagcttccagccctcatgctggcaccacagagcggagacttcttcccatcagctcccatagaaaagtcccaaagcaggactcttgagtcacccagcacaaagaggcccttccctgagccagtcccacagccagaaggatgcagtttgggggctggtccagcccgagtctggtgtccggcacgatggccagaggaggaggtgggaggcagggcgagctgaaaagatccaacagttcctgcccggaagatccacttcagcagaggaagcacagatgagatgtggggctgtgctgatgctgcctgtttccatccctgccttctgcaggcagcaaacagtagtagcccttaagagcaggagtggaaacacagacttttttctttctcacatttttttaattataaaagaaaagtgattactgtagracacttgggaaactctagaggtttaaagaaaaggtaaaggtaaagcttccattccggcgcgcccctcatcagccagctggtcctgactcrcccggccctggctcctctccaggcaggcgtgtgcaggcatgtgcaggtacacaggcaggcrtgctgtacacacgcatgatgtcatccccagcctcatcctctcactgtctcagttttccccgtggctggcgccagggctctgggccaccctcaccttgacrggtttccctcttcccaggatcctgccatcagcagctcgggccctgccgggagctacaggccctaygacgagggtctgcggaggggggttttcatcaccaacgagaccggccagccgctgattrggaaggtagggcgagggtccaggggacgggggttagaaagcagaggcctccagccagggggagccggcagctgctcaggaagacggtgggatttgaggagccatcacgcccagtgggacagctgagaggaatgggccacagtggcccgtgacgatggtggctcctacaaggaatggccccgtgagttcttccatcagcaggcctttgacttcatgggcagctgggcctggcccaggcacaagccctgcagaccctcagtgaggccttagggtcctccttgtcctcccagccccccaggggcctccaggcagggcccccgctgagggagcagctagggagggtctggtgcggatgtgaggctgcctggcagggcttgcacggggccgtctccgctgcccttctccctgacgctctctggttctgcagcccagcccctgggtggacgtgttgggggtgrcccctcgttttcccagggttgaggccccttggccccgcatcagtgccttgtggagaaagagctgctcattgacctccagggtgcaggtctctcagatttgcaaatgtgggcrtccactaagagtgaggctgcccctctgctcaggctgaggctcagtggggcttccatgcaggccctgggtggggccgggtctccccactscagcctctcgttgtccaggtayggcccgggtccactgccttccccgacttcaccaaccccacagccctggcctggtgrgaggacatggtggctgagttccatgaccaggtgcccttcgacggcatgtggattgtaagtgtggccccctcctgagcatccccaaggcctctgggractaccmcaccctcctcactctgggcagagtcacctaccagcagcgcttctcttgcaggacrygaacragccttccaacttcatcagrggctctgaggacggctgccccaacaatgagctggagaacccaccctacgtgcytggtcagctcgccccccacctaccctggggacttaatcaaatcakagactcccttgtctggcctgggagacttagcaccctcatctctgagaagcagatgggccagcggggaaaggggygggggggggatccccaggagaaaggctcaggctgggagactcagccaagcagtgcagacagggtgggtgcagaggcacaggccctgccggaggagacgccgctcacaggtgcttgccagagcacagtgaggccgactcgactcagagccgtctcgataggcgcagggaccatgcagcggagacctacccacccgtggggagaggtcaggcccaactcgaatgcagcacgggcaagtggatttctagccagggagcagggtgggctcagaggyrggaattaccaagargaagcatgggggtcagggggattctggctgaactgacccagcaggattcttgctgaaggcaggccagggtgaccagacatcgcctgaggggtggtggaggttggggcttctcgccaaactgtcttagcaggaatggcagaaactgggttttacaaggaagtacaaggatgggcctgggagaaggtttgggggcctgaggctatagtttggcccagcaaagaatcagtgagaggatggggttttgggcttaggtaaacaggcaggggagtgcttgaaatgggccaagagacggtggatgtgaagtctgggggtctgcagagcccaggctccagcacccgcccagccctgtcttagaagcagtggagatggttacccaggttcccgggtaacgccagccccacagaggcgtggggagcggctgcaggtgcacctccagggccagcctgaagaggcagcgacctgcacaggggctcctgggaggkggrgggcagggagggcaccttggagcctgccgggaggaagctccctggaaaccagcccccgcctcttccaggggtggttggggggaccctccaggcggccaccatctgtgcctccagccacyagtttctcyccacacactacaacctgcacaacctctacrgcctgaccgaagccatcgcctcccacaggtgagggccacrtcccgccccactgggctctgccctcacagcctgtcctacaaggttggggcctctgcagggcctcagggaggaggaaaagcggaggcccagascacccggggcccgctggcggcccgagtgctctccccaccygctgcctgcaccccagcctgaagctggagcgctccttcccacttcatgcctggggcttggagaggaaggaccctggatgctgacaggagtctgcatcagcggggacctcatgactcctgtgaggctgggaaagatcctggcacacaaacaggcatcaggtggcccagacagaggcttctgtgcccgcagacatgggcagtagcctcgccgtcctcctccccagcctctgcctcatcccagaaagctccttgctcccagctctgccctgctggtgacagggttcccgagtgaccccgctccacacagccctcacggtgtcccccaccaccccagggcgctggtgaaggctcgggggacacgcccatttgtgatctccyrctcgacctttgctggccacggccgatacgcyggccactggacgggggacgtgtggagctcctgggagcagctcgcctcctccgtgccaggtgagctcctaccaggagggrctgctcagcagagtagagccgggggcctctatgggaggcttgccggggccccccacccacttagcaggtggggctctgggtcacttggcctgagctggctctgctgcagcagcctgaggaccagcctgactctgccctcccagaaatcctgcagtttaacctgctgggggtrcctctggtcrgggccvamgtctgsrgcttcctgggcaacacctcagaggagctgtgtgtgcgctggacccagctgggggccttctaccccttcatgcggaaccacaacagcctgctcagtctggtagggtgggggtggcggcrtggcaggtgggcgatcccacccacccaagactctcccctgggaatyccrcccctgctggagaagcaccccatgctgggtggctgagaagtgcagctctcccgaggcrgggactccaggggaccgcggccccagcacccaagtgcttcctttgcccccgcctgccctgcagccccaggagccgtacagcttcagcragccggcccagcaggccatgaggaaggccctcaccctgcgctacgcactcctcccccacctctacacrctgttccaccaggcccacgtygcgggggagaccgtggccyggcccctcttcctggagtgagtgacctaggcaggggcggtggcccatgtgtgccctgggggaggggcacgtaactcccaggcagccctgycctgctgtgggctgtgttccycaggacccagcaggttgccgctgagtgagacaacatttgggcctggcttaagggggaagggcagcaagaaaacccagtaatatcccccagacaggccgtagtacacacgaggagttcctaacaacagccctgcacatcagtgtgttgagggaggattcccagagagtgaggtgattagttaactatttgcagaagtcaatttatttttcttgcataccatagaaacataagttccagataaattaaatagttaatgtcaaaaatcaagctgtggaggccaggcacggtggctaacgcctgtaatcccagaactttgggaggctgaggcgagtggatcacctgaggtcaagagttcgaggccagcctggccaacatggtgaaacccatctctactaaaaatacaaaaattagccgtgcatggtggtgggcgcctgtagtccctgctactcaggaggctgaggccagagaatcccttgaacctgggaggaggagattgcagtgagccgagatcgcgccactgtactccagcctgtgtgactccatctcaaaaaaaaaaaaccaagctgtgaaagactccacaggaaaagataagtgaatgtgtatctctggggaaaggtttcatttagagaaaaaaaaaaaaaaaaggtgaactttatttgaccatagcagaaaaaaaaatgtaaatctctgaatataaacacaaaaagattaaaactgctctgaacatggactgtaacagcagagaaggcattgtcaataaaacagcaaatagctactcttcctaataggtagagaactcatacgttggtaagaccaagactaagaaccaaattggaggaacactgtttgcaaaacaggagatacgaatggtatccacacattcttcacccggaaatccaagaaacgcaatttgtgttttaattactattttaatgaccttgttgtttctgtcactacacttttttttttttttttttagtggttgccctagggattacaattaacatcttaattttagcctcgttggaactgatgccaacttgctttcaatagcataaaaaagctttgcttctatgtggtttccattgcctctcgttcctctgtgctgttacacgtctgtatccatgatgagcccatccacgcagatttataatgaccgccttattcaattatcttttaagtcaaataggagggaaaaatgggttacaaacaaaaagtacatacacactgtctgccttttatatttactgatgtagttacctttacccatggttttatttcttcatgtggctttgacttcttgtctaacatctttcatttacagcagaaggactccctttagtatttattgtagggcagttctgctagtgatgaattctctcagtttttgttgacttcagagtctcttaatttctccttcattttttgaaagttctgctcaacgtagggttcttgactggcggtcgtttctctgaacactttgaacttgtcagcccatggcctccgtggtttctgctgagtagcttctgtcttgcctcttcccagattctctgtctttggcctttgaagtcccgatggtgtgtctaggtgtagatctctgagtttatcttactgggagtttgttgagcttcttggacgtatgcattgatgtttttcatcaaacttgggcggtttttcagccattacttcataaaatattttttctgcccctttctgtcttctactctgggacttccgttccacacattggtatgcttgacggtgcccaggggtctttgcagctctgttgactccttcctcgttgtgttttctttctgttcttcagactgcttagtctgactgccctgtcttcaaggtcactgattcttttttccaccagttctcatctgctgttgagcccctctagtgaacttctcattttagttgctctcttttcaactccagaatttctgtttcattcctttacgtttctctcgttaaggatattccctatctggtgagtcatgttctcacactttcctttagttcttcagacacggtttcgctgagctctttgaacacatttaaagtagctgacgtaaactctttgtctagtaagtccaatgtctgggcttctctagggacaatttttattaactactgtccccccatctgtgggccatactttcttgtttctttgcgtgtctcatacatttttgtttcagactggacattttaaacgcagctgctgtggtcatcagattccccatccccctcaggtctcgttgctattgctgattgttttgtgactttcttgagctaattccataaggtctgtgttcttcattgtgtgtggccaccaaagtctctgcttgactagcttagtggacagccaataattggtcagatatccttcacagatggcatccgtgagtctcccagcctttgctggggcgaggtggggagcaccgtcaacacttagctaggccaaggattcttgctgttcttacaaagattcagccrttttgttaaatacatgctccccagatggctgcaaacccttggttagtttcaagagtcctaaaaatgtcaactctgaccatttttgccgatgttcctgttttcacagaggagaggatcttgagaggggcttactccaccatcttcactgacatcactccaagaaatgtattttgcaagaaatattttgaagcagaaagacaccatttattttgcccatgaattagaatacattagagaaaataagactatcccttgctggcaagaacacagtgacacagtagggtggaatataaattggcacatttgtggaaagcaacaatacatatcagtcaatgtttttgagattcacattgatgcgttaattttacaaatagaaatagggcctaaagaagtcacctcaaaaggcatgaacgctccatgaatgtatccatgcagggatcatagctgagcactggatgccccctgcacgtccgggggcaggaaacaggacagggcagagctgcgtcacagggcaggacagtctccgttagacggagaatcctccgtagagctgcttgcacrtgtacattcatctttttgtcagatgttaattcaagttgcctttggttgtgggactgggaggatcttttctctttgttgatactttttcgtactttccaaatacttgactgatgagcacatgctgccttggttaccggaggataagtgagcgagcaaagtgaggccagtgctgtgtccatcctggtgcctcaagcacaagcccctattcctgccctgagcccagctgccggcatgtccggggagaaggcttctcccagctccggcattgacttctatctgctggaatcatccctgcccgtctgacctgagtcctccaagtcctccggcaccttgagctccagagagcagaattcagcctcttcctgtgcctccccagggtgggcatatgagccagccccatcccattcatcacccgtatgcctgtgtgcccatcccccttgcaggttccccaaggactctagcacctggactgtggaccaccagctcctgtrsggggaggccctgctcatcaccccagtgctccaggccgggaaggccgaagtgactggctacttccccttgggcacatggtacgacctgcagacggtgagtctggggaccctaarcccyggggagacgggagaccagagcagccctcccacctgccccctccacccagttggtgtgaccaggtggcggaaagaggaacgtatgtgttgagtcccggccatgtgccaggcccccacccggctgctccgcacccatcagcctctccgctcctcacaccatccccatttcccagatgagcagactgaggcctgcttgcagaacctggccaagtcccacggccatcacaggctgtgcctgtgctgagctggcatacccaggcctctcaggcwctgtccccactcagtagccaggagggtccctacctacagtgagccctgagtctgcgcctgaagtcacagttcagcccgtctgtgccaggcctcctaggcctccacgtggagccccgggagatggagagcgtggttcctgaggacagcatgggggcctcggcacggcccagaatcctcaaagcaacatctccctccaggtgccartagaggcccttggcagcctcccacccccacctgcagctccccgtgagccagccatccacagcgaggggcagtgggtgacgctgccggcccccctggacaccatcaacrtccacctcygggctgggtacatcatccccctgcaggtacctgggccaggcggctatggtgggggtgtggacagcacactgcagagctgggggaggcacagggagatggtgggggagaggcccaggtggggcttctgaggggccgccccccgcagtgtaggttatcaaggagccagccaggccagtgaggtggggagggcacagccccacaaaggcgtggagcatggccggcaggagctcagtggtctgcatggtggaggttctgccgggcccggcctcgggcagccgtgggatagcacttgaggtggggaaggtcttgggtcatcaccacggggttccagcccctgcggccgcaggtgttcctgcagatcctagttactggcagcctggtgctgtaccagcctagcattcccgggccctggaggcctccacctccaccagggtggggatgatgacatcacgtgtccttccctttccagggccctggcctcacaaccacagagtcccgccagcagcccatggccctggctgtggccctgaccaagggtggrgaggccygaggggagctgttctgggaygatggagagagcctggaagtgctggagcgaggggcctacacacaggtcatcttcctggccaggaatgtgagtcctggggctgctcaggctggtgggcaggggccggctcggggttgagaaggggtgaggggacctgggcttgggggtcccacgatggctacctgccactaggacactctagcaggtggcctggggtcctagagtgagcagtggggccgtgcactctgccctttcgtgtacacagagggaggtcacctccctgatgccatcatgagtccctgttctcatggstgttcctgccccagctgtctgctgacacctccacattctctgccttttcatctctctctgctcggcccagaacacgatcgtgaatgagctggtacgtgtgaccagtgagggagctggcctgcagctgcagaaggtgactgtcctgggcgtggccacggcgccccagcaggtcctctccaacggtgtccctgtctccaacttcayctacagccccgacaccaaggcaagagggcccagagtggcacagggatcgcgtcccccagccgtggtgcagggggcagaaggtgctgggcgtcctggtgaccgatgccaggaacagaggatgctgggacctcccaagggggtctttggggaggagtgggaagggtcaggccacacaggctgtgcctttcctcctcctgtgtctacacgtgggtgatggggccacaatgacgacctctgagccgtgttgaagcagcaccgcgtttctggcgtgcgttaaggtgacccgcactgagagccggggtccccctgcgcctgccggggaggaaccgggtgcgaagcatcccagggccagacggagctgccccctgagcgccgggcctcgctgctgctgggatctcggggccagatggagccgccttctgagcgctggggtctcactgctgctgggatctcgggctgctccatttgtgctctctcttttccaggtcctggacatctgtgtctcgctgttgatgggagagcagtttctcgwcagctggtgttagccrggcggagtgtgttagtctctccagagggaggctggttccccagggaagcagagcctgtgtgcgggcagcagctgtgtgcgggcctggrggttgcatgtgtcacctggagctgggcactaaccattccaagccgccgcatcgcttgtttccacctcctgggccggggctctggcccccaacgtgtctaggagagctttctccctagatcgcactgtgggcyggggccctggagggctgctctgtgttaataagattgtaaggtttgccctcctcacctgttgccggcatgcgggtagtattagccmcccccctccatctgttcccagcaccggagaagggggtgctcaggtggaggtgtggggtaygcacctgagctcctgcttcgcgcctgctgctctgccccaacgcgaccgctkcccggctgcccagagggctggatgcctgccggtccccgagcaagcctgggaacycaggaaaattcmcaggacttgggagattytaaatcttaagtgcaattatttttaataaaaggggcatttggaatcagcttctgcgggtctctctgggattcagggcagggaggatgtatccaggggccctggaacagaggcagctcctttgtcctcagcaggcccccagacattcccacagtgggtgtgcgccgtcctctgtctcaagccggcatccatcacgtcatgttcccatgtcacgaggcctgacatcacctcatgtcctgtccccatctcacctcacatcccgtcacctcatgtccccgcatcacctaaagccccatgtcacctttgtgtcccatacccccatctcacatgcctacctcatgtccccatgtcaccttcacgtcccatctcacctcacctcccctccccaccccacctcacctcccctcccctcctcccctcccctcctcatctcacctcccttcccctccttacctctcttcccatcctcaccttacctcctttccgttcctcccctaccctctcttgctcagataagcgccccctcccatggtgacccacctactctaccctcctaggcctggcttctctcatggacccccctacccccctccgccaccgcctacaccctgcccccccaagcatccctttcaaacgttcgcaccctcacgcagtccctgtccatcccccccaaaccgcacttaccgcctcttactggctctgccccccgacccccccttgccctacccactcaacccttccgtccccaccttccccatcgcccccctcccccacggtcccattatcttcgccgcccaaaatccaccccccccttcccctctcccccgtccccctgccccacacgcccccaatacctttctcacccactcattccatcttcccctcctcttctnnnnnnnnnnnnnnnnnnnnnnnnnnnnnnnnnnnnnnnnnnnnnnnnnnnnnnnnnnnnnnnnnnnnnnnnnnnnnnnnnnnnnnnnnnnnnnnnnnnnnnnnnnnnnnnnnnnnnnnnnnnnnnnnnnnnnnnnnnnnnnnnnnnnnnnnnnnnnnnnnnnnnnnnnnnnnnnnnnnnnnnnnnnnnnnnnnnnnnnnnnnnnnnnnnnnnnnnnnnnnnnnnnnnnnnnnnnnnnnnnnnnnnnnnnnnnnnnnnnnnnnnnnnnnnnnnnnnnnnnnnnnnnnnnnnnnnnnnnnnnnnnnnnnnnnnnnnnnnnnnnnnnnnnnnnnnnnnnnnnnnnnnnnnnnnnnnnnnnnnnnnnnnnnnnnnnnnnnnnnnnnnnnnnnnnnnnnnnnnnnnnnnnnnnnnnnnnnnnnnnnnnnnnnnnnnnnnnnnnnnnnnnnnnnnnnnnnnnnnnnnnnnnnnnnnnnnnnnnnnnnnnnnnnnnnnnnnnnnnnnnnnnnnnnnnnnnnnnnnnnnnnnnnnnnnnnnnnnnnnnnnnnnnnnnnnnnnnnnnnnnnnnnnnnnnnnnnnnnnnnnnnnnnnnnnnnnnnnnnnnnnnnnnnnnnnnnnnnnnnnnnnnnnnnnnnnnnnnnnnnnnnnnnnnnnnnnnnnnnnnnnnnnnnnnnnnnnnnnnnnnnnnnnnnnnnnnnnnnnnnnnnnnnnnnnnnnnnnnnnnnnnnnnnnnnnnnnnnnnnnnnnnnnnnnnnnnnnnnnnnnnnnnnnnnnnnnnnnnnnnnnnnnnnnnnnnnnnnnnnnnnnnnnnnnnnnnnnnnnnnnnnnnnnnnnnnnnnnnnnnnnnnnnnnnnnnnnnnnnnnnnnnnnnnnnnnnnnnnnnnnnnnnnnnnnnnnnnnnnnnnnnnnnnnnnnnnnnnnnnnnnnnnnnnnnnnnnnnnnnnnnnnnnnnnnnnnnnnnnnnnnnnnnnnnnnnnnnnnnnnnnnnnnnnnnnnnnnnnnnnnnnnnnnnnnnnnnnnnnnnnnnnnnnnnnnnnnnnnnnnnnnnnnnnnnnnnnnnnnnnnnnnnnnnnnnnnnnnnnnnnnnnnnnnnnnnnnnnnnnnnnnnnnnnnnnnnnnnnnnnnnnnnnnnnnnnnnnnnnnnnnnnnnnnnnnnnnnnnnnnnnnnnnnnnnnnnnnnnnnnnnnnnnnnnnnnnnnnnnnnnnnnnnnnnnnnnnnnnnnnnnnnnnnnnnnnnnnnnnnnnnnnnnnnnnnnnnnnnnnnnnnnnnnnnnnnnnnnnnnnnnnnnnnnnnnnnnnnnnnnnnnnnnnnnnnnnnnnnnnnnnnnnnnnnnnnnnnnnnnnnnnnnnnnnnnnnnnnnnnnnnnnnnnnnnnnnnnnnnnnnnnnnnnnnnnnnnnnnnnnnnnnnnnnnnnnnnnnnnnnnccttcctgaaaaccaggagcagaaagtacagtgacttccccgtggagcagcatgacatccctggggggcagtgtgtctacctgggtgaccagcactattgtcttctgggtcagcttttgtagaagcggacactgctcttctgccatgtcacaggccagggcctgacccccgtgtgccacttttaccatccagattgacatcactaagtcatctcgcgccctaaagttcctctgtaaggtggacgtagtagtgacaataacatatgttacttcctcccctcatcctagtcccatgtggggttaagaagcaggaatgtttgtcttgaggccagcagcgtgcctggtctcggtgctgagggcgacctgccctaacgctctgccaggctcgccaggtctgcagttgacacccaagacgttcagggagggttgatggagcgtggtagcctcggccagcctggaccgaccatcagcgtcctcaccttctgtgccaccgcccagcctggcagggccactgtagccttagccccttgtaggatctgacccttccttggctgctgtaacgaaatacccaagactgggtaatttataaacaacagaaatggatttctcacagggctggaggctgggaagtccaagatcgaggcaggttctgtgtctggtgagggctgctgtctgtatcataaatggcgcactctccatcatcgtggtagaaggcgaagacaagctcccttgagcgctaaatgccactgatgaggatggagggccctcaggactcatcacctcccaacagccccaccactttttttttttttttttttttgagaccgagtttcactcttgtcacccaggctgtagtgcaatggtgcaatcttggcttattgcaacctctgcctcccaggttcaagtgattctcctgcctcagcctcccgaggagctaggattacaggcatccgccaccatgcctggctaattggatctttagttgtatttgtattttagtttatttgtattttaattgagatgggatttcaccatgctggccaggctggtcttgaactcctgacctcaggttatctgcctgcctcagcctctcaaagtgctgggattacaagcatgaggcactatgtccggccagccccacctcttaaaaccatgtcattggggattaggtttcaacaggaatttggggcgggggcaaaccttcagaccataggacagggctatcaggagtcctgagtgaggaggttggcatggggtgggacagtgctccctgtgtgggaagggacagggtcggaggggggagaggagttgtttccatcctctgagaggccaggggtctcctcagggtggtccaaacggtacagcccattacatgggacgctggcctgtgggcacctcaaggcagcttcatctgtttctcaccagtgcctgatacaggccctgcctcagtgggaccctattgaacttaggtgaattttaaagcaataggccaggtgtggtggctcacgcctgtaatcccagtactttgggaggcctaggtgggcggatcacctgaggttgggagtttgagaccagcctgaccaacatggagaaaccctgtctctactaaaaatacaaaattagccaggtgtggtggtgcatgcctgtaatcccagctactcaggaggctgagacaggagaatcatttgaacccgggaggcggaggttgtggtgagccgagatcacgccactgcactccagcctaggcaacaagagcgaaagtccatctcaaataaaaataaagcaatgtggatgtggaccccaggcagccttgtagcggagacgtcttagtgccggggagcgttcaagctggcaccctccgccctgggagaagacatcctgggggtctcgtggctcagccctctcatatctctcccagctcagcctctaaaacaaggcctgctgttggtgacaaaacgctcttggctcatgttctgggcaatgagtcactgcgtgtggctgggccagcttcacaggtgtgacccatgcaggcccacaggccccgagctcagcaggctgcagctgggtttaatgctccacggtcaccatcttgaaattgtgaataacttttgaacaaggggccccacagcctttcattttgtgacgggccctcggcaaattctgcggctggtcctgcaaggggtggtgcgttctctcccgtttacgttggtatagatgaatataaacgcttcctttctttccttgcctggtggggaatggatcagaaagccagggctgatgatagaaaccagcagagaatctccaagtgtaagacattagtcaaaggcccggcgtggagcccacaggtccttagcgttcggaagacgattgccttcccagcccactccaaggaagaatcagtgctgtctggcagcagcctccaggtgtgtctccacaaaggcccagctttcctttttgcaaatcaatgacatcaataatccgttacatggcctgcagagaagccctctggcggccactgtggggccctgtgggccttatgcctgctcttcctgatctggtggaggctcagagaggagctaggacaagggatggtgcccctataccaccccacccccacatacktgcctgcagaaggccacatgaccaggattatggtgggtgagggccagagggaaggcccaggtgagagggtggaatgtgaacaggctggttatttgcrtgccagggacaagagagaaaaaagctcagtattagcagagaagacggacttctgcggtggcacctacagctgttcccttggcctcccaaacaacccaggtgtgacgtcgggaaccgggaatgcaggcaacagagtgattccagctgcctcacaaggaagagggtgtgtgggaagagcagagcatccgggctggaagcacagtcagaaccatgcgtgcagccggacactcattgttcttccccacgtgtgctgggcacccgctctgcgtcaggctctgttccaggagttgggtgaaacggtgactgaaatagacagaactcctgtcggtgatgcccacgtgagagaatataatcaatggacaatgcaccgcacatatttaaaatgtgcaaattgatccgttttgacatgtgaatgtctgtgaaccagctctacagttaagatggtgaccatctccatcaccctcaaagtctccagctacccactgactggaaaccactggtatgttttttgtcaaaatatatttctttgtattttatagaattttgtataaaggggaatttttttgtcacacactactcaacataatttctttgagatttatccatcaataactcatcctttttagttgctaaatagttttccactgtatgcaaatgccaccatttctttatctgtcctttatggatatcagaattgtttttgatttttttgtttgtttgtttaaagacagggtcttggctgcgygtggtggctcacgcctgtaatcccagcactttgggaggctgaggcaggcagatcacctgaggtcaggagttcacggctagcctggccaacatggggaaaccccatctctactaaaaatacaaaaattagccgggcgtggtggtgggcgcctgtaatcccagctacttgggaggctgaggcaggagaattgcttgaatccaggaggcggagtttgctgtgagccgagatcgtgccattgcactccagcgtgggcaacagagcgagactccatctcar

SEQ ID NO: 95378 - DNA, 190381 bp, Homo sapiens
  misc_feature (1)...(190381): n = A,T,C or G
aaaagatagagcatgatttatgtatatttactcataacacatgtattcattattaatatattatgtgcattataaaacatacacaaaataaaaattgtaaaagaataagatgaatagaaaattttcaattatcttgctaagcatgctatcatacaatcaatagtatctcaaggaaacatacatgcttagaacagaattaatcatttatgaaagttaatataaatccaaatttcaaatagtcctggaaaattatgaatgtttttgacctatttcttttttttctcttctttttttttggggggagatggagatttactcttgttgcccaggctggagtgcaatggcgtgatcttggctcaccgcatcctctgcctctcaggctcaagcgattctcctgcctcagcctcccgagtagctggaattacagacgtgtgtcaccacgcccggctgattttgtatttttggtagagacagggtttcaccgtattgcccaggctgatctcgaactccttacctcaggtaatccgcccgcctcggcctcccaaagtgctgggattacaggcgtgagccacagcgcccggcctgacctatttcttgttagatctcattaggctgtcattgttttagtcctcaatttggctggaaaagagttctcagaggttaaactggcaaatttgatcctgattttcacctgtgcttatattattggtattatctcaattttctatttcctcacagaaattgttttttaagccacgtgctccccaaataagagagttgattgatataggccgggcacggtggctcacgcctgtaatcccagcactttgagaggctgaggtgggcggatcacgaggtcaggagatcgagaccaacctggctaacacggtgaaaccccgtctctactaaaaatacaaaaaattagccgggcgtggtggcgggcgcctgtagtcccaggtactcgggaggctgaggcgggagaatggcgtgaacccgggaggcggagcttgcagtgagcagagatcaagccactgcactccagcctgggcaacagagcgagatctgtctcaaaaaacaaaaacaaaaacaaagacaaacaaaaaaaaaaactagatgatataatcttaagaatttatttaacgtggaacctgtaaaattaaggcaatatcaatgcttaaaaagatgtcaatgacaatgaaagaaccagaaggtgccagtatcacccctctgcctgtggcgctttttgtttttcagtactcttcagctacactacatgacacatgaccagtttacttagggaccatgtaaaacactctagggtcaagggtcaatgagtataataaatatacataaagctcttttttgtccttgcatcattacttttttcaattattaaagaaaaaagaaacagattttcttctgttcttcctatttcacagtaaattgtcttggtcactccgctttggagatccctgccttaggcaaattacttcctgattctcagtttcctcacctgtaaaatggagatgaagtcatagatctcgtagggttaaatggattaaacaacatatgtacaagtctctgtacaacttcaggcatgtaatttaaaagagaaataaaaaggagctgcaattataattgtgactactgtattaaacaattgccatgtatgcattcatgttactcctagcctaatttaaaaacaaacaaaacctcttgtcggtgctctttctatgactacaagagctgtagcttctcctcatcttcccacatcccccctccccaaaacaaaacaaaacaaaaccaaacaaaaaccaaacacattttccaagcgttttcaagccttggcagatactgtaaagattcggaacacttactgatgttgttcattaacatgataattactaatagtgaagaccggctaaattttctatgtcaggtaattttattatctatctctcatcctttccttcaacaaagtttttttttcttttctttttttaaatacaatgtgctaggtatcagggtaattgctgaggtttcaaagatgaatcgaaacaccctccaggcactaaccatctagaggacaacaccaaacaaataattgcatcaaagtgataagtgctataatggaggcgcacaccggttgctatgggagcagagtaggacaagcagcttcctctgcctggggagaacagggaagaccactagaaggattctgggtcatagttgagttttgaggatgtgggttgaggatctgcacttcagtcagaggggagaatgtccaatgtggtcacttaggaaccaaacggtagacaggttttccctgagcccaggcatttttggcggcagggtcaacaacgctggtagagacctgtctatgcacagcctaggataacatgccaagaagtttgaaacttaccgtaaaatggattgggaatagacaaaggattttaagctaaagaacgatataatcataaagagaattgggggtggtattttgggggaatgattgtgaaaaacataatttattgaacatgcccattagaaaaaaaagagagagcggggtgtggtgactcacccctgtaatcctagcactttgggaggcagaggcgggtggatcacttgagttcaggagttccagatcagcctggccaacatggtgaaaccctgtctctacaaaaaatacaaaaattagctggatatggtggcgggcacctgtaatcccagctaatcgagaagctgaggttcgagaatcccttgaacctgggaggcggcggttgcagtgagccaagatcccgccactgcactccagcctgggcaatagagcgagactctgactcaaaaaggaaaaaaagaaaaaaggagagagaggagtgtttatttctgtaataaatttacttgttaattctaaactattctttaaattaaatgtcagctgattcaatttgtcaaatcttggtttccattactgaagatgaaatactcactgcctaaacggtcttacctgctcgtgtttgaagctaggcaacatttcaggcagcattaacagtttgtctgttgggactagaagcttcctaacgttgtgcatggaatttttctttatgagggtgttgtatccagataccaagttttaaacccagtatctactctatacagaatgtaaccaaagcagacttacataacaagtgaatgtggccatacagacatgaaaaagtgacttctatcttttgataccaaactagaaagagaaaagcaagttcagagaacacattatgactcatcaaagtccaaaaagaaaagctgcgtgtgaacgtagcaccctgtgcagcctcctggagtccttttaccctccaaccacatttgcttttgtatgattttctgcaaaacaaaacaaaaaaaacccatcattttcctccttaacttcaattgttaaatttcgttttacctcagaggtgaaactcatgctatatgttctacaatcttctttttgtaccaagtgaatgacgctgccttttcatttctcctgtgttgaggccttattttataaaattcgtaactgctagggtacaaactacaaacaagacgaatttttagaggaacaacttgaagggtgatgggggaaggtggtgctttcttagaccaatgcgaagggagagggagatgcaatatctatatttaatctctgttcccaacgatgtattttaattcccatagctgtgtgtatacaatgcgtggataccaacgcctccaaggacaacatcaaaattttatatgagctgaagaatatacacatataacaaagggaatgttttcttctttactttccctgtgacaaaatgccagaaggaatggacagtttctttctccagggacttactaattgatttgtttttgtttttgtttttttgaggatttgcatggcaagtggaagtagaatcttaaggggataaagggcatttattcacaagggaataaaagtgaagttatcaatttctgaaaattggcatgtgaggccggcatgccagagaaacaaattagaccccaaaaaaattaaaacctaatactctcaatgtaataagcattgctattaggttaaatctctttattagagacaggtaggttatctggctatattattagttgcgacttattaggcagttagaagttagtatttatgttacacttttactatactactagtcttgtttaaaatttctccctatatatttctcagttaatagttataccggcatatcctcaggcagaaaaacaagttcttacaatggatccttcagggcacactatattctatttctcttagctgtgttatctttcgttgtcttgaggttcacttcaagayagacagaaaatgatgaagctaaagttaacaagcaagtagcaagaccttagaaagctatagggtgggtgatcaccaacactcccagccatcatgaaaatgctgccctagtgggctctgcttcagccagcagtggaccagtgatataaagaattcttgcttcttaatgactacatggcagtatttggcgttctttccattacttcttgtcttcaacttatccagcctgaagttttaagcatcctagaactgcatttcagacccagttgctcaaatggagtcaattttgcaacagtaaaatggtcttaaaataggattttactctagggggaagaatcctcaaccagatagtcacagtgcactttgaatgactaatttaagccagtacattacgaaataagggataaatcatacttttcataacactactgcataggaacagttttaattttaagagtcaagcatctacattaatctgagtctaaaataataggcccctgatttaaagtctcctaacattctttcacacttcataaaactaaaaataaaattgtctcaccaaacaccgacctattggtccggccaaagtactgtatttcaaggaaaattggagcaaagaggtctcaaaaccgcgacttgccagcaaattacaatttgcagccttaattggtctcaaatgcggggtgagagggaagagactacggtctgtagaaaataagagatttattcccctttttaaatcaaaaccagattccatgcttcagccgccccctaacccgccagccccgcccccagggtttgtttttccatatttttgtatatattttagcgaagatggcaggtgagggaaggttatagtgctgtacctagtccacgaagtaaacagagaggttagggtgggtttacttatttataaggcgttcagcctctcagctgtttctccctcgttggcatttggaagcttgcagtccttcagggaagagacagatttggcaggaacgttctttgtgcccgcctcccttttctattttttatttttttacctggaatagggggcagatttataatgacagccttagggaagggggagaaaaagtttcagccggcacgacaatgcccgttttttccacagtccacactgtgccacaaacagctttggtgccactcggagcccgtcccccgtcccctccctctctctctgcaggctcgcactggcaggcggaggcacagttaaattccagcaccttctccacatacccccgaactactacgcgctattactacggctgccctccgttttcgcttcgcctcctccccttccgcagtctccctggaggagccccgcggcgcccgaggaagaggactgccagggaagggacagcgggcgcccagctccagcagggcttggggctttctgcatcccgcgcagtttctctgctccaggcacaaacgcggcccgagagccggcgccttgcagtcacacacggatccacgcatacagtagagctgtctagatccacattcttgcacaccgccccctcctccccccgcgctcccggagtcgctgagctgagcgagtgacaggcgcgtcccgccaacccgcgcccggacgggcagggaggagcggcgcgcggggccaactgcggcgcgtcttccggcgcccgcggaggaggcgagggtgggacgctgggcggagcccgagtttaggaagaggaggggacggctgtcatcaatgaagtcatattcataatctagtcctctctccctctgtttctgtactctgggtgactcagagagggaagagattcagccagcacactcctcgcgagcaaggtaaatataacttacaactcttttctcctctttcccctcccttcggccgccccgctgcagccgccgctcagacccctccggcaccacgccgccttcgcccgggattatccattattatcctaattattatttattgtgcatgcaaggagaccaaaacaaacaggcgggccaaccgccgcgacaaaaaaaagcccgcctcctccccgcgggcctcaggtggaatgctctaacgacagctcccaggcggcggtggaagaaacgagaaagtttcaaccgaaccttgctgttctaataataacagtaataattactacttcaagggggcaaaggaggaaaaaaatcccaacaagccacagccttgatcctgagtgggcagtcagaggcgctgccaactcaaggttgcaacacacacattgggccaggttgcaatccccccatccccttaaaagtgaggcggcggggaggggggtggccgcaggagggggaaggcctgggggacaggggaggaggatggaaacgctactgttcatcccgggcaaccctccccggaagagttggaaggggaacgggaaaggagggcggggagcccaggctggcggcggggcgccaacggacgctgttgccacccgcttcccagggacttgttcaaagggctccggctgcggagacgtgagcggatcgcagcgggagaagcctgagctgacgcgcgaaggaggtagcggccactgccgcggggccggtgcgtgcctgatcggaggtgtcacctccactttccgcgtttcctccggcgtggatggggaggctgattggtaggcaggcctttaggcaaaggggctgccagggggctgcgccccgggcgctgcggacgtccctgcctctggtacctggcggcagcgcaggctcgggtgttaaagttcgggatgtccggcccgggccgcactgctggagggaagggaggaggcccccaaggaggtcggaggtgcccgccagcctccgttaccctgccctccctctccccgggtccgtgttcttttgcttcgcgtcttccccttgcttgcgccgcgggagctgcgggcgtggggcgcctgcgatcgtccgggtgctaggggcgcgccgggacccaggagagccacggcggcggctgcgggcccgggaggccatgatccggataatcctgtctgcctgactgtcacaaacaggacccgcgcaccaccgggcagcggcggtgtggttcgcccgggaaggggaagggctgcggtggggagggaataggggggtggcgagggcgggaggcggggagaccgggtaggagcctcctcccaacgatgacacgcactccttccttctcgctccctgctcaggagtttgctttattcccatcccaacctggtttaccccttcctttgctctccccctccacccggccgtcttcccttcctcccgtttgcgttgcaaaacacggccatgccatctgcaaaggtgtcgcgatgcacttccctaaataaccggtccggcgcgccagcccctcggcgccctccggccgcagggcgcacacggagcacagtgctcccggtgccccgcaccaggcctcgcagcctgggtgcagttacacggcggagggcggggcgcggcagtgcgggctccggcggacacccgcgccttggccggggcacttgggccggtttccggtacacgcggggaaatcgcctcctgccagtgtctgatcgctcgcctccgcctccgcctctgccgcctggattgcattattatttttatccgggttgccgtttgctgcggatggtggtgagcgcggggctggctgggctgcttggggggtggggtggagggaagttggacgtggatcaggcaggaaaaaaaaagtttggcagggcggctaagtagggtggaggggtgggagggggctgcgagctcccgcggctccagcctccgcgccctcccggccggcgcgagtgtgtctgcgcgtgagtgtgagtgtgagtgtgtgttgtgcgcgcaggagccagtgcgtcgggagcagcggctcgggcagctgctcctgcccgcaccctcccctggagcccggggaggacaaggcgaggtttggtggcgagggctggtgggggtggcgtgtgcgtgtggttgtgagtgtgtgtgtgtgcgcgcgcgagcggcggagaatcaggaagtcacagcagcgaagcgcacacagcacacagacatgtttgattgccgtgacatgacgcgcgcgagggaggaagcggcagcggcgggggccgggccgcgggctgtggcgcgggcctagagccgcggctcggagaccggttcccgtccgccggccgcgccgccaccccaagctccgcgaaccccgcgcccctttttgttccgcgtcctccaggtaaggagcctgcgcagccctgccgccggctgtgtgcggagctttccagttctttccctgccagccccctccggtctcccggctcgcctttcctgcaaagtcaggcaggcgggggaaatgggctccttgtcctccgatcgattgcgtggaaaactttccagcgggaggcaccatgagggggaagaaggccttgctggccgctgttgcttgtcagttctttctcctccgggtccggagagtgtgagtcgctgcgcccggggctgttgcacattcaaacttcgggcctaaacgtacctccaactctcgcaggttttactccagcaataaaataaatattcaaagtcgtccactagctcttgctaggcgtttggattttttaagggaatgaggaaggcttgggaatcgagggagtgggggtgttgtgcagaatccattccttattcaatgtctgcaccgggtgttatgtaattttagtggcacatgggtgcaaagcctagactgggcttctcccctcctttgtttatataacttttgggtgagttttgcaaggttgtctcttttttttcctcctccctaacctgatggaggttggtgctttggaaaaagcaaagcgacctgggctagtaatcttttggagaggtgtcatcattgtctcctttctggtcattatgtaggcatgtatgactttgtatgtgtactgttagagctcaaggaagacattaaggatacacagtttgttgactgcactgagcggttatttttaacatttctgcgttaccaatatcgaatttcaaacttccatttcaaaggacttaaaatttacacctggttgtgtgccttgcttgtctgaacagaatgyttgcataaataatgagattgttgcttgggcgttgagtagcagaaaatttctatccaaccaccaaagactcagaaaccattgagaaccctaataataatttaaaaagccatacccaatgttatgtgtgtgtatacttacatattcacattcaaatattttcagtagtmttttccatctgttatcaggggggccacaaccagaagcttgttggccagcattggagttttaggcttccaggctacctctagcacactggtgaagtgttaagaggcgtggcagatttgaatcctagttgctgcattgttatgcaaaatgagacacactttttctttgaggaatctaattgctcttttattctcttggactttctttctttttttcctcaaatgcttctttacaatgcaaatgtttgctattgtaaagaggggatttagagacacctgttaggtccaaaagatacttattgcggtagactgaggggaaaaaaaaaaacaacccagtagatcagaggtccgtctaccttgggggcatcagagagatgccatttttgtaaagaacatttcaaatgaatgaggaatgtggggtatcagaacccttgaagagggtgaggggagggagggcttccttcaatgcagcctttctcttatgacttatatcagtaacagcccagcatcaggactaggtgcactgtggtgtttcacagaaaatattcaccacaagagcatgttcaaagcagccttagatcttttcttttgttcgtttgtaaagtggtttttgagcatttctcgtcaagtttcttgaaaagtgctttgaccaacacctgaggcttagaattgacaaaaaaaaaaaaaaaaaagtgcctcggcttgtattatattgttaatgcttgaattctatttaaagtattcctgacatggtataactagaaagtgacacttgtgcagataagtatttaaaatttttttcttttattaagtttaagataaatcattctacaggccagtataaaagcatatcacatccttttctaaaaggtaattgtgatgctccttatattgttgtaatattttgacatttattattatgtattacagcaagagcataaaaagaagagttttataaattataaaagtggtgctgtcctccagtgttttcttgttttttttttttctcctttagaaatcttcctttgtaaacaaggcctttgtcaaactcttctaggtcagcagctttttgataccccagagaaataataaatcactatttatgacatcttgacatggtgccatgaggacaactgaattatcacatatgtaatactaaggactgtttcccagcatttgcaagtggaaggagtgttggtaggacctgatttaaccactttaagatttgattctgtttctggtcaagatgatttaagggacgatagggacaaattctttggttaacttgagttaccttagaaaactatatgagttacatttcttttctgctgtatttcttgtgaacagatgagaaaatttccctagtatgaaagccacatttaggggctatttctgatttctcctttttaatgtaaaagaattatcttctaaattgtttttttttcccccttaaatattgtgttttggagatgtctttggccaatagaggatgtgaattttctgtcatttttggaagcgttcttattaggggactctaacctttagccggttaataaagccatgggtcattcgctaagtagtgaatagaaaatacacatggtggtaatttatttgatagcatatttaggaaggcctggagtgattattttttctatatagaaacttatgactttatacttactagggactataggagtctaaaactatgttctgccagagtcattatgaaagagagcatatttatttacgtaagatatttatcattaagttaaatgggatcttgcaacctgggctggcaaaactgcagctttcttactgtttattatgagtttattattacccatgttaatatagcacttttccttgaaagtgtaggatatgttaaagagagcttttaagtagtaaaagttataaatatatcgtcaaagatgcttgaataattgtacctcagaaaaacatacaatagagccaatgaaattcaggaacaaaatagctggtcttttgaatgtttgatataaacacctcattaatttacacatttggagtgatggtttagatatggaatacaagattttggcctgaaactctgacataatgtccttctggacttctgggtttgtaatacattattatataattgaagcctagtatgaattaggatattttattagatagctacgacttccagaatatttgaacaattgtaatctggccgtatacctgtaagatttacaacagtttttaaaaccacaatattctatagtatttttaggtggattagtatcaatttaagcatcaatcttatgccagtatgtcatctacatctatgcaagcastaatattttagaaactttttagaaactggcctaatttaaatatgggctggcccttttgtaagttgatgaatgggacccacagaagttgaaataatatttaaagtttgaaaaccattaaatataattgaaactccctcctttaaaaaaaacaaaaacaactaaactcagaatttggaattcaaaattacttaaaaatgataaaaatctctaaccaaaaaggaacgtcatatgttggcttacaggttatccaagggaaattctgtatcagtttgcacttaaactgtatttttctggttcaggatgattatatatttctttacctacttgatgtggtatatttcagtttttaccatcccactgggagatgctttatcacacatggatattggatgtccagaaggaaagccctctcccatcttcccccctgtgctttgttgaactggacatgtaataaatggctttgcaaatagtcacaattattttgtggcttgctgttktgctatactaaaagaccattaagcagagtccaaaattctgtaaaaaatagatgatctgtaattgataatttatgtgtcttaaagaatgtacctgaacatttaatattgtatttataatagcatattgaatacaagtaacaaatggtaaactgcatgggycatgtgatacagagagagagatcagggtgagctttcttgagctgatggggtagataaggtctttgagatgggataaggttgctgtagggggagggcagaggtgggggtggtggcatctgagcatcccagatcagaagaaagccccgagatcacagagacccggcgagatcacagagacccggcctgaaggaacgtggaaagaccaatgtacctgttttgaccggttgcctggagcaagaagttccagttggggagaattttcagaagataaagtcggagattgtggaaagacttgacttgcaggttaaagcatgaatattttatccaatctgtattggaggcttgtctcagaagttttgaacaagggaatacatgaacaaagcaatattttagattaatctggcaaattgtggattcaagtccagagtgggaattgaagctgttagaaggatcctggcaataatgcgagcatatagtagctcacaaggtgtcttcatatctcatattttatttgattcgtatcaaaattgaagttgtagtcagctactgttatgcctattttgtaggtaaggagcttgaaactcagagaggttaaatgaactcatttgttgattttttaaaaggcatagtaacatcattaatggctattatccattttaactgcaatgaacttggagttcattgttgaattgttgttgctactgtgaaagtcagggccagttgacattaatgagtgcctatgatagaactttagttcattcagcatatgatggttgagttttactcttcagtaaaaatgtgccattttaaccacaggtttttaaagtatgtatttcagactcttctttttatatgtttaaagtataaataaacttatcttggcagtcagaaaaggaagtggctgttgttgattcttatcaacatccagaatgaggttgctttgcaaaagggcctaacctaggagagacaggcatatgtgtaaatatacgtgacatattacctttcagggtgtcatgatttgaaactaacttttttttgttcagtttgttagcttttgttttgaccagtttgcccagccctttgggttccactgaattttaaaagtgattttcatctgtgattacctttataactactaatggacatgagtctcagagtagaggatgctttgctctaaagggtttctaacacttaggttttctcgtaaattccctttttaaaacaatttttcctttgtgggatcactgtcagtcctcatggaagaggccatgaaattgcatcgctggtagactcttttgagatggcaactcatggtatctataagggtggtaatgttaagagccaggatcctattaaggcagtgtctgaggttcatgggggactaattagctgctgccgagtttgttgttatcttttgttgtgcacagagctgcctcacagcctttgccaggtctgactctgggcaaggaccattcccaaggcagtttatttaaagtgagggcagcagctcacccacatcctaatttgttgccctgattgaaagatgaaggagagttcacagaagcccaaggaacagagcaaagttttaatctaacaacttttaaaaaacatatttgactttgaaacgaatgggaaagtgttgtgaataaccccaagaatgctgaagaaatgttctcagtgattttctagggtcttgatggagcaacttataaggttaactttagaacccggtgtgatttgtatctgacagatcacattatgcattgtttaaagttgcacagctcagaccaagaagcagtgtgggccttggtaatgtttcaccgcttatcccgacaaccttggcctgtaaaaaggaaacttcgggtagatttatttcctttatctgcattgctgttctccttacccaccccgcactgcttccccattaagaataacagtgcttgaggcccagttctgaagatgttgctacttcttgtgggtgaattatcaattcatttacagagaaagccacatacaaaacaagaggcagcccttcaggtcaggggagatgttctgaatcagcaaacagacataaaaagaactcttatcttaactatctcctgaaccttgcagttctcctgtaacagccagaacactttaataagactgggatattcttggagatgtggactgggcctaacttttatttctgatattccacctttaacctggacctccaagtttttctgtaaagtgagctgtgaaaaaagacaggctggagatccaagatttccttgtgctttcttatgaagtttggtgaagagcaatttaagagatattgtcaaggttggtgtgctgccccaaactctgcgactagaaaccaaaagtttctagggaactttttttcttttttttaaacttgaaggccttgctgaaatgctaccttctccattacactttacctaattcctttctctcctgtaacctctgagctaaaggtaatgtctcccattctatgactgtgttggatagtttggctgtacccctccgtgtcctgcaggatctttcaatatttttatcttgttgctacttacgcacaagtctgatttccgtatcagacttccagagttgtggggtaagccttctattcatttttgtaccgcctgcatgccttgtacctagtagatactcggtatggtaactaaaacatcatcgaccttttcagttgatgacatggtcttcttttcacattccagggcttctctttacttctctagcctgtggtaagttaatatattatcacaaccaaagcctagtccttgcaagatatcccttccactgtttcygacctttttttctttggcttctactttctacccctgcacattgctctggcctggtgaaaactctggtggaaacatggcttgctagatccgtgtcatagctcagtgttgggctgggagtcaagggataaaagattctgcctgcggtttctctcctgttgcagatgttactttgggcaagccatgttttccccttctgccttattgccctcatcttttcaatggcgttgtggcaaaatgtctcttcaaatcaccagaattattaggaaacacatgtaggtgtgttcaaatattactccacatgtgggggtctttggtgtttctgttggttacaattagactgtaagacacaagttttgtcatggttggagtggtgacccttaaaattccatgaagttgaactccttttaatatgcagatggctgtgctgagcctttcagctaagggcagaggagatttgggctgagggaggatgactgtggtgtttggagctctggcaagctcctctggggcctcttctttttaaaaacacacactctctagttgtgaatgtaggaaagtgggaagtaaggacgaaatcaagacagagtatactgctgagaaattcttgcctaagaacatagtggtttggccctcggggagtcctggtctgggggagggtggggaccagcaatgcatgtgtatggggaggttgctgtgcccccctctccccagatacatttttgtcattatgtttttagccacagacacatagttgtggaacaggtcgttcttttctgtgacaacgggaaactccctccttctcctaacacaaaataaaaatagattttgtgtgttattatgtgagcagacctaccactgccctgtgaagtccatctgggccctctcctccagcccaccctactatgcttactgctgtcgtcaccaccctatctctattgtctcattagtgctttggagaagaaaggggtagagagtccaggggatactggcagggctggtgagggagaagtggagttggccaatactggactttaaaccttaaccatactaacttagtaatgatgtgctgcttgagactagcacctctttctaatttatttccccaggtttcttcatactgtgggaaagtttaattacatacttgaactgtaaaataaaattgccacccgaaatgtagaggaagaataagaggccaggattataggcctcatcttagagagtcctccccttgggtttacttgggtgatggtagccacagcagatcctagggcagccctgattttgccttggaagtccattaatggactttccaacacacaggtttggatgaagtcttcaagatgctctggaggcagcaggcatcaagtcacggatggacagctggaagggacctttgagatactcctatcctgagcctagaggaagtcaggaccccagacgaaaggcacttttcccagggccctagagttggtggtgaccctgagaccagaacccaggtctctcagctcccagtgagacatcagtgaatatcacgtcacgttctatgagagtccagatctctgccattcattagttatatggcacagggtacatttcttcatttgttaaactgtactgttagtctgagccacacacatgcattgaagtccaggcatctgaggttctcttcttattaaatagtttcctatataacacgttcctatattaacattccaattatatgcccgtaattttccacttcccttccaacatgttttccctctaagacgtttttaatagtttcctttagcaaaaaaaacgaggagcatttttatgggactatgtatgagtaattacaacattctctgagattcccaggtggaaatgataatgcatgtggaaagtagcattatgggctaatgtatattagaatttcatgtttaatatacatcaattatattaaacgtaggaatatcagcctaacttcagtgtttgtatcttcattgttcaaactcgtggtatattactttartacctattgaagctgatttcagtgtaaaccataacaggaagtaagcaatttccttttattcactaaaaaataaaagggtgtattagtgtgctcatatacatgaaagagcattgtatcttgtagtagccctgaatckacgtcagcttcctaaatttaaaatgctgactgaacctgtgygaggtggtggaaagcaaaaagaaaaaaaagttccgtctgctttgttcatcacaaagaataaataataacattgggctctctagtgaattcaaggctgtaattcactgttgaggctcccctgttgtttagaagccacttgtactgggttcccttagtcctgttttgatcccctgcttatgatcactctgaagtagcctttgactgcttcctgtttcagctctaatttacttgtcaaaatggcctaaattcttgcctacactttaaggatttctttatgggaacacaactcaaacactgatgactctgtggtttttatttataaaattaactgaagctggctacagtggctcacacctgtaatcccagcggtttgggaggctgaggtgggacgatcacttgaggccaggagttcaagaccagcctgggcaatatagtgagactctgtctttacaaaagataaaaaaaattagcttggcacggtggcgccgcctgtagtcctagctacttgggaggctggttggggaggatcacttgagcctaggagtttgaggcttcagtgagccatgatctctactgtcctccagcctgggcaatagagagaggccctgtctctaaaaatatgaaaaattaaaataaagttaaaattaaaaagttgattttattaatagttggcccttgaaatttactctgcagttgattcatcagataatttttgagctatgactatatgctggttgaggtgctgggaacgtggaagggaaactgagcatggcctgccttcatggccctcatactctagagattcagtgcaagtgatgggtcgctaggagtggaaagaatgtgttttgtgtactgcccctccagcccgccattccactgtgggtaaagagccctgctatggtgactaggccaccacggtctcattccatctctgccactaaacaatgggtaagcaaatcacttagggtatgtcattctgtattttgtgaggctgacagcaaaaagtttctccatgtacagatgtgtgcctccaaggtaacatcataatatagaacaattactgttgctagtggaattcagctatcttgccggcatcattgatctctatcagaatgtggaaaacagcttatttgctcattctggctcatagccaagatgcagttgtacccactctatgaggcatttccaatggggatgccaagaagccttggagtgtgggtggtggaatatagttctgctgaaattgtagaaccagaatttccacacctcatctgtggtgagctctgatccagtagtcatggatgacttctctcaaggattcttgaccagagccaggtctgggacaaatccctggttttaactgtctgagggggtctctgcttcaattaattagctggcaagaggatcacgtcttaaactgtccctcctgatcacttctggtagggtggagttggtggggaaagtaatgctaaataagggtggccgtttgttgtgctgagactacagctgtgtttttcacacatgtcattgcattgaaatctcaaaagaagaaacattaaataacgtagctagtaattacatatatgagtatttgaacccatatttgtctgattcctatagcctttgcttttttcatgattgggacttctctttcattctcaaattagaagattgtatttttcccggtttaactatcttgaagttttgaatgcccactsacttatgaaaatgagtcttggttggatactttttaaagggttctgtattttaatggctttgtgggggttaatgtcttgtaaggtgtccaaggtagtaagtaatggagagcatctgttgacttcagtaataaatttcaaacttgtttagaattctgcttatgtgttaaatttgagtttctccagtgagtccttttgtatcttagatgatttatatttttctggggaatcatttagtgtgtgtgttttttttaaacaagtggtcttcataaagactagggcagacggatgtatatcacactcactcaaacatctggactagacagggcagctctgtttgatgtttgttacagaaatggcaccatcaaatgctaacaattgttttattctggtcttaacrtcatgtttaaaacatgccttccttttttctgcttttcaacttagcattactctactgactggcagagacaggagargtagatgtccacgcccacagaccctggtgcgatgccccacccagggccttcgccggggcctgggccttcccctgggccaattcttgggcctagtccaggaccaggaccatccccaggttccgtccacagcatgatggggccaagtcctggacctccaagtgtctcccatcctatgccracratggggtccacagacttcccacaggaaggcatgcatcaaatgcataaggtaagagtttgttctcccattcaaactcaacttctgataagtggatggctaatatttctgataaccccatccccctttctactgttgttaacaagaaaatcatgcaagatctttgtcttgtatatctcatatattattaaaaacrcatattgtgaggtacttttattgctacagatgttgcatcagttatgaagatcagatgttggmtttttaaaatactgacatagactatgcagttctgataagtagatcctgtgatttgtgggttgaaggtatttttgtcttggtgaattagtacattagtctataagtcttattttttcctatctgtgttaagtaacttatccactaatgaacatactgaaaattattctttcctaaaaaggctgacatttattaacaaaaattagatcccaaagagtagaaggaaaaagtccttatctaaaggattttttggaaagggctttattgaaattaaatagtttctagggaatccttaaaatgcacattgctgtctctctgtgaagcacttttattctggttttggaagaaggttctgatttttgcagagctcacgtccagctgtttatttctggactaaggttgtaattatcctttatttatgaggcttggattgttgctgtggggatgatcatatctgtacaacttggcattatgccttcacaggagatgcaaagaagagagacagccttttgagaaagtaaacaagatcctctgtgacagtttgctttgaaagtaagcaatagccaagaaaaatctatgaggacattacatactacctgaaggttttgcctaatgagacacgtagaggttttacactccttgggatgatatcacaggtggatagggtggcagggctgcttcttgacattaagtaggtgtattcattaggattctccagagaaacggaaccaataggagatagagatatatgtaaaaagagacttattatgaggaattggctcacacagttatggaagctgagagttctattatctgcagtcaccaatctggatacccagcagaacctgyggtatagttccggtctgagtctacaggctcagacctgagcctgagaaccaggagttccaggagaactgatgatgtgagttccagtgatgtgagaaccaggagaaccaggagaactgatgatgtgagttccagtctgagtccaaagagccagaagagtcagtggagtaagttcaagtctgagggcaggagaagacccagcttaagcagtcaggcagagagaaagcttctcctttcctctagctttttttttttttttttttcttattcaggccctccatggattttgggtgaggcccaccgacattgctggaggcaatctgatttattcagtctaacaattcaaatgataatctcatccaggaataccctgacagacatacccagaaataatgtttaatcaaatatctaggcacctgaggcccagtcaagttgacacataaaatgaaccattacagtagacaagccgtggaagatcctggcttaaaacaaaaagattaccacagaaaagagcaagtctttcctccagttacgtaggactttaggtcagttttagggtagggcatcagagcccaaaagggaagatccttttgttaaaagtgttgtaatttgatgatttttcaaattaggaaagtaatatatggttattttgaaaaggaaaacaatactgagataaacagataatcttaccttcaccccaagtaacagcttgttgtacatgctttttctatcttgcttttctgtatgttcattacaaatactgtgtaagcacagatatgtatatattggtgtttttttttggttacttttcttttgctattatagaatcatgttgtctctgttaattactctgtaactttcttttttcatttaacaatgtattatggatatccctatgacattctctagttttctgtctcctctttttaacagatacatttgttagcttgtcagagatctagagaaataaagctgctcgttttccatgtcatatttttcaggggacctattgaacatattgacatccaagtcctgaaattgttttctgtttagattaaatgaatttgggagctatattctggatctgatcaatgacttgtaaaccttcctctaagtggcttacataatttcagaataatttgaaggtgtctcaccttcaaaatgaaagataaaatgtgagggaaatacttagctaaactttattgttctttagcagttaaaaattcaatgtgtgagtgttgggtcagtgttatgtttttctcctggattgtttttattaattgttatctcttctgatcccttcattttatgtcctagcatttttattacactttctcatattctctctaccctcttaaatactccctctttttgttttgctttgctcgcattctgtgagttttgcattttttgccatcctgcttctccttggccccagcccctcagatagttccctgcgtgaggacacgggtgagggtttagagctcacacctgctgaccagatgccttcacttttttctatgctttttataggcagttttatttcttctcttattcttccttcttcctctgaggcttcagctttttgcttttcaacattactggaaataaataaacaagtggcctaaatacatctgctgtgttgctttgatttcctctctattattactatttaacagactcagtgacactctttataccagattcttcccatttttcttccaaacatcctctttatgatacattttttcctcttttcaagtgcatacttttgactctgcagaaattaactttcttttctccaaaactgcaaacactcatactttcttgcttgaagtcatttggtttctataaactcctggaaatatttctttcaggctgttttgaaaattgctattacagtttggggaggaatagacttttcctttttcaaacacatgcttcattgcccaattctggattggattaatgtcgattcaatagctgtttattgcatgtctgtcacgtattatgcctcaagttttgggtccagcccctgtgttcgtttatttccaaactgtgcctttaaccttttccgttcctcctccctctgtagtacagctttatctattgcacacactttccttttcagtattcaccccccattcacggctctgtcctgtctgttcctctctttccaactgccatggaaccctgtggtttcaactttcaaactttccatggttccttcccttccaatgaagaaaaattaccaaaaactggatcatcacagatgtgtcaaacagccttccttcagacttcagactaacttcaacatataacaggtttcaagattacttaccagggtatggaaaaatagcctatatttgtctaccttgtgaccaggacttcattttcattgcctgttctgatattacaaaaaacaaacaaacaaacaaacaaacaaaaaaacaaccctccactgtttaaagacttaacatttgacttacagatagtttgctgatccttttggtctagtctctttttttaactctagaatgggtagtaratgatagtgccacacttttaaagaacttaggaaggggtctgaaaactccaaatakaaatattttaccttatagaggtgtctaactaatgtcctttaaatgtttcagcccatcgatggtatacatgacaaggggattgtagaagacatccattgtggatccatgaagggcactggtatgcgaccacctcacccaggcatgggccctccccagagtccaatggatcaacacagccaaggtttgtgtccgctgcacacctgatactggttccccagcatagtctttcmgtctttcctgttggatattttaattatgaattccaaagaatgtgtctaaggmaggttgaacctagtaggtttcttttccttatggaaatctacctccgtcctcaccaatacaacctgatgatttatatgggaaattttatttccgaagtcctagtaattttactagccaccatgtgtccaagcagtctgcaaagagctctatgtactttatctagaatctttatcgtgatcttttagggtaaattaggttatcccagttttatagatagagaagataaagctggacaatttactttgttttgctaagtttacatgtccaatcggtgacagggccagaaagagaatctaggcctgcttcccagcaacagtgtagatgtgaaggtaaggtgaaccacctgtgtcccttgaattgcatgcttatccattgtctataaggcagctttatctggcagtgaaattatgtgtcatttctggtgggtggctgggcctgccatagcaaattaccacaaacagaaatgtattctcttatataattctggaggcaaagtctgaaatcaaagcatcagcagggccatgctctctctgaaggctttagagaagtatccttccttgctkcttcctagtttctggtggttgccagcaatccttggcattcctggacttgcagatgcatcactgcaatctctgccttagtatccacatgaaatttttcctgtgtgtctgtctgtgtccagattgtcttctttttatgggggccattcattggattagggtcttccctaatgcagtatggcctcatcttaatgtgattacatctacaaaaatactgtttcaggccgggcctggtggctgaagcctgtaatcccagcgctttgggaggctgagacgggcggatcacgagatcaagagatcgagaccatcctggtcaacatggtgaaaccccgtctctagtaaacatacaaaaatcagctgggcgtggtggcacatgcctgtagtctcagctacttgggaggctgaggcatgagaatcgcttgaacccgggggcagaggttgcagtgagccgagatcgcaccattgctctctagcctggcgacagagcaagactgcgtctcaaaaaaaaaaaaaaaaaaaaaaaactatttcaaagtaaggcacattcccaggtactgggggttaggacttcaacatatttggaggagggggaacacaattcaactcacaacaatggctaaatcagtatatggcatatttcttttcttcttcatacgtaacaagtcctctttcttttcttcactggtgaaaactattcacgtacctcaaagccttttaatacaatgtagcctgatttcagagtcattatgtggtcatttcaacatatgacggacatgagttaatctagcactaattaaaattaatatgtagttattccaattcaaggtttatggtttatgcgttgctatatataatcctgtgtaattaatgtgtgtgtttcctctatccatgatcagctatccatccactcgagggaagacttttggctgtgaggatttagagaagtctatgcacagttgttttctttttgaaatataaataggcaagtcatggaggcataggagtgcctccccactagtatttgaacaggcttttgaacatcccagactcttatctgaattttggtggcaggcaggcataattgttgcagataactcatagaatcttgaccatgtcagaagagcagcctaaaagcactgggaatttttgcagtacaagaagaacagatttgactcattcacggttatgaatgaagtaagacaatatttccaggcttatcatttacatttgaaggggccaagtatgttcatggagctaatataagcctttatttatttatttatttatttatttatttatttatttatttatatttttgaggcacagtctccctctgttgcccaggctggagtgcagtggcatgatctcagctcactgcaacctctacctcccgggttcaagcgattctcctgcctcagcctcctgagtagctgggactacaggcgtgtgccaccacacccagctaatttttgtatttttaatagagacagggtttcaccatgttgcccaggctggtctttgaactcctgacctcaggtgatccaccctcctcagcctcccacagtgctgggattacaggcatgagccaccatgcctggccttaaacctttatttttaatacctgggaggtatagatgagtaacgtttagtgattcttgaagccaggtgcttactttttctgctcctgttgttgcagtagctctaatagtggagtcctaggaaaacctgaaaactaaaaccactttaaatgcacaaatcataattgagagcatttttacttttatttctgtgatcacttggctcccctcttcaacttaagaatgatgtcttatttatcttggaatccacaacacttaggatgatatctagctagcacatggctagatagatattagtaaattttgttcaattaggtgtggaagtttgtgtattaaagagtcaacagtttaaaatgatctcaacttttatataatttcaatgaagtataataactttaaatgcaaaggtctgcattaaagggaatcagaattaacatgtaatattctctaaaatagtgaagtgcattgtaggctgaggaatgagttatttaagggtatatttttgaataaagcaatattagtataatgcagtcctattttatataatgatctaaaaagaatttagacttggtaatagcacgtgtctttaaaaaactcactgtgaaaagccatttattaatataaaaacacaggaacagagagatgtggtattgattggaaggctgcgagcttttaactacctagcaacctattaggttattttagggtattggtcaagaaggaaagccatttccttcaataaatactgaattgtgtaccttatggtcccaatgataacattgtttatttttagtccattggatagaaacccttcaaargcaggtatatatttaaatagtgtgtgtgtgtgtgtgtgtgtgtgtttgtatgtgtgcgtgtagagaaaattcatgtagaattggcacttagaarttcaagattattaataggagagaggttattgcatctctctgaggcaaggtgaaactggggagataatagcccttgaagactagggaaagaaaactgccactttttgactactttcgaatgagcaaatcaaagaagattccaaaaagagcagaatctgcatcaacactgtcatcctacagaccaatgtatattcactctcaggcaatttcttcactctgttttctcaactaaagataattaccaaaatatgtgatgttgtatcacttagattctgtttttcctcaagttttatgggatgctattcatgtagaaataaaaatctctatttttaataccatacggtgacagaatgattctattcacatcccctacaaattctgggaaatgattcttctcactttcattttcttctgatcaaatttgaggtaaaattttgttgtattgactaactcagaaatgatttttatttccctctcaattttctgatcaaatttgaggtaggaatttttttgtattgattttccagtgaccaggttctttttttcagtttgaattcttatgtttaatgtaactgtctcaccttcataatgttgccttgttcatagtttaaaagagtgatttaagaaatagtgttatacagttgaatttagactaggttgcctaatattttggttcattgtattaggcatcttatgatttgccatgagtgagattgtaattgatgaccttaggaaataggaaagaccggaaatcaggaaacatatgactaattttaagccctggtcgtatctcttctactgtgaaaatgttagtagctttggtggaaagatttttcctcttatggtagactcagtgctggccagaaagacgtcataatgaacagactgccattttgtactagcgttacaactagggggttaatgtaagccttcttaaagaagaatgtatgctgaagttaagtgtctgttattgatattctctaagtgtttattgttataataacaacatgtcrggatttaaatttctgctagtcttgcaagctttcaagggaattttcttggctaatttatataaccaactaaaactgtaatcactgcatggtgtttgtgcttcctcacggagtagggatttgtggaatgaaatttagcaattcttctatttacctttagggcaggattctcctgaatagagttctacttctcatcagttggtggagcaaaacccattcttggtttaggggatcacgctaaatctgcctccctctccaaatgacaattggagataaaagtaactgaatcttttattttctgtggtcttgtgaattatgatggtgaatccccagttggtggcggtcatatattctccggcctctgtgattctgcagatgcacagagctctttcagttcaaatttttcttaggttcgggcatgcagcaggaatttaataaacacttatgtgatgacctttgtgagaactgtgacacgattacatttattaaagggcagagacttttcatctatgtatgtaatgccatattctgggacacctttgacttgattaattggcactttgtttcagctcaaggacaccttttggattgctttaggccactttgttctttccttcatcttggagctccctccaacaatgttcagtcatatgtctttctaggaattctatggccaagctatgcaggtcatctcctgaaataagtcccttgaggttttttgtgcattttgatttttcttccccagaaaagtgttcttcaatttcccatttagatctcttataaaccaaacagtttactctcatttttatgttatatcacaagtggttctagaaggtttttgaaactttcaagtccctaacttattttcatataaccaaatttgtattagatcatggaaagggcatatgcattagaatcagacagacctttgtttaaatattaaagctcccaaaagttaattgtgtgactttgggtaactggtttactctctgagcctcattttcctcattttaaaaaatgtggtaacagtatatatcttttaggttgttgtaaggattgaagaaataatgtatgttctacccatatcttcttgattccccttaccatttctatacccccaccagcctgatttcctgtgcccagaaccactgtcttggttcacttccgtctactgacacctacctttcccacataatggcaaagtccctggagaataataatctttagggcattagtcataaccagtggcttaaccagtgactgctgattgcaggagtataagtaccccagcttctttacccctttcctgaaataatttggaggcaagttatttactatatattctagagtttctgcactgaattaatcttcaggtacccactgcagcagctggcttgaaaataccccccctttactggctgccttcccttccttatattaccttttcatacccctattagtgtccycttaccttcccagtaaattactagtactcaatccttaawtaagactctgctactagggagaacccaactgtgacagttgagtgcaagtcaactccttgcatagtacctacaacatgtaggcactcaataattgcaagttattcataacatgcataataataaaccaagtgttcgctcttcacctaagaaattctttattccccattgagatatatcaggttatgttctcgcagttggagctacttttaccattcagtactgtcccttggttagtggtgaacaacaaccactaacggtttaccttctaggacacatgtagctattgatcacttgaagtgtggttagttcgaattgagatgtcctttaagtgtaaaatatttagtggatttcaaagacttaatatgaaaaaaagaatgtagaatgtctcatcaacagtttttacattttaaaatgatgttttgggtatgttggtttaagtaaaatacatttaaattaactttacctgctttttttttttttaacactttaaagtggctaccagaaaattttaaattttacatatatataaagcacatattgatatgtaaagatcttaaactccatataattaataaatgatatgtcattcaaatttctgtcagacagtgttgctgtggacaattattagagtattcagggatatctctctttcagggttgtcaggggcagcctgtgatttccttttgtgttttattttaggttatatgtcaccacacccatctccattaggagccccagagcacgtctccagccctatgtctggaggaggcccaactccacctcagatgccaccaagccagccgggrgccctcatcccaggtgatccgcaggccatgagccagcccaacagaggtccctcacctttcagtcctgtccagctgcatcagcttcgagctcagattttagcttataaaatgctggcccgaggccagcccctccccgaaacgctgcagcttgcagtccaggggaaaaggacgttgcctggcttgcagcaacaacagcagcagcarcarcagcagcagcagcmgcagcagcagcagcarcagcagcaacagcagccgcagcagcagccgccgcaaccacagacgcagcarcaacagcagccggcccttgttaactacaacagaccatctggtaggttaatacgcaaccaaatgaataatgccatggtccaactcggataacaaagactgctcaccaaaacacygggttgttamaagcccggggctgacgtagccttttgttatacctcactggctctctatccttgctccacttagatggccaagattcttggtcttcccctgctgttgagacctagggcagtgtttcttaaccttaaaaggtggttgtgcaagctggagacccagggaaaaagcacctgtgattttgcgttctctttgaagcggttcaaggtttcttggaagcccatccacacacacaaggttaagaacctctggacttagtgcatttcatccccagaactcactgctcagatcagccccactagagccattttataatttgttgatttgtttatttctatccctttttgttatgaagaacatctggagaggcttacaagaagcatgcctgttgtaaaataattatgagtagcaaaatcagcaacaagggaaaatagaaaaaaaagtaagaaattgaggcaagaaagtagggctgcaaaagttctcatagttgctgtatttgcttcaaagatgacttgagtttcttgacaatsagagccaaaaggagacaaagtcctgtatctaagtctcgccctttggaaggaagttccttaccagtttctcagaaaaagccatttctagcatgagagtatagagttgatttcccaggtgagwttattttttaaattattatcatcatcattattgtaagaggcactgcatgacagaaacatcaatagcatttgttcataatagactaacagattcaacatggcctatttcttatacaccttgggatgaagtctgaagctatgacattatacaatgggtagaaatgatacaatcctttgcatggcctcttggtcttctgtcttgatcccattgatagacttcagaggtgcaggggactgtgaagtgatcttccatgaaggttgttttctctaggaagcgttttgttaaagaactggaaaagcagagattgtatgggtctactctaatgaaaactttggattctagggaatraggtacttccttgacgttgataccatttcctctgagtggtttccattcatttaggcaagttctgacatgcaggttgttgcaaacagctagtttgggatattggtactgttcctgggttttgggccttataccatgggagagagttcagattagtattttttcattaatattctgcctattgagtttgtatacgtttattttctggtagaggcagctccaagagtaggcctacctaagagatatcctcatcttattaattgttatagccttaagaatggatgtcttagtaagtctgagctgctgtaatgaaaggtcattgactgggtggcttaaaaacagcaaawttatttcttacagctctgaatgctgggaattccaacctcaaaacaccagcagattcagtgtctggtgagggcctgcttcctgattcatagatggcttccttctcactgtgtcctcacatggcagaagagacaaggcagctctctggagcctcttttacaagggcatgaatcccaattatgaggactctactctcatgaaatagtcacctcccaaagaccccaccttctaataccatctccctgggaattaggattttaacatatgaattttgaggggaccataaactttcagaccatggcagtgggttttaaaagggcaagaaagtatcatttcatctccagaatttctgtgtggctaccatggaggcatttggtaggtggaggatcatagagaactgagatttgggaacaggaaaggttatacaagaaactatgcagaaaatggcagtttgaatcctaaaagtatttagaggttttaaaactgcaaaactccagctcttgagaatgcagccagatagaagaaaaaagcacgtatgtatatgtgtgtgtggcttatcctccctgagtgcctgctggcctactcatgtgccattctcagtgataagtcctttgcatgtgtcacacaactaatgatggagagtcgggattcagaccccaggaatttgacttaagatctcatgttcttaaccactttcccatactggctccttcatggcaaaaaggctcatgacaaggaaaaaaacctatcacaaagtctgtgtaccaagatgcaagcattgtacttctgtgtgtaaagagacagtatctgcacaccttacttagatccttttccctcttactctgagacacaatatcaacaaaattggtaatctttatatcccatgtctcagtatgtgaagagtattaactaggagaatttcaagtagaggccagctggtaactaccagctacatgaaaggctgatggagaggagggatcagaacttgaactcccaaaaggtagtagtctgggatgatgtgttctgggtatgatctgctatacctcacagttggtcctgggatatcatcttgtcacagacatcaccaagcattggtatttttaagaacgagctagactcagtaataaaagattcgaagatatcagttaagaatgtaggaagcagaatgatttgtttgagaaacctttttcatccaaggttaaaataatgtaactgaacacagtagtaaaatttaaaggatgaagttccatttatctggatacctgtacacaataaatgcttcatgtcctaatcaacccaatcctgagtgccttttctggatcattttcaggagagggctctattttttttttttttttaacctggctccggtacctacatctttcgtcatcaggtgcctgtcattaaagggaattcactttattactcactgctcatgtctttttaaattttcaatagtcggagcttcattagaaatgacaatatttgggcaggtagggttttatggaagagtggaaaggagacgtgaatgaaggaggaaagaagatatctccttcaaatagaatgagcccatttctgtcactgagagggcactgccatttgacagcattgctgaacttgtccccacatctcaggtttcattagagaaacagataactttacttgccaaaaataattttttttttagattggcttttagaaaagataaaataaggcatgattttcttgttaaagttcatattagtctatttattgtttatctcctttttataaaataaattacttttaaacacccctgctaatatttcaggatattattcacttacgtagaggtagttgtgttcccattttgcttctgttccatttcctggtgttattcatgtgtgaagagaatctttttggctgggttggcctgcctcaaagctgctccaaacttataattcaccaaaagtgacatcatcccagccaccaccaaagaattatgattggagtcgaggcattgcccatggaacacataactctgcagtggtttcccctacaaaatgtcagccactcttacgatggaatgtgcccttgcctgctgtgrgcacygctcaaatctaacccatcatttttcttttcattttgattcacttttcctttcagagattcaaacaaaaagaaaaatgggaactgaaaaaatttggggtttttgaggggtgagggagagaccttatggtagaaaataaagtgttttttttgatatctgaaattttatatgctcaatttaaatgttttattgcgtttgttttttccaacctgtggaaaccccttaaattcttactgaatgcatagatcttttatttgcatgaatgtcctgtatgccggaagactaagtgggagcactgaatgctttgaagttctgtgcctgtgagacttgggtattttaatacattgttaccctattgcatcaaatcacgcctagggatgcattcaataaagactgccccctccccgcttagctgcgctgggactcccttctggagggccagagtttctactttgtttctactttgactcctaaaatgaggactgaagggaaagcagatggcattttgtacctctgacaatgaagcctaaattgtttacgttggagagggagtgggagataagctaaagaatgtgatttgtcttccatttgaagataccagggaaaagtcttgtcaagtagcaggccaccggtgtctagtgtagaggagacgatttctgtcgatagagagcaaagccagccaggcaaacgaacccgtaagccgcctgagggacagacaggcataaaacctaatgaatgggtaggtagactttgggcaaggctaattgcagcaagctgtgttcagttccccggcctctgttaagtagtcatttttatacaatctgtcggagggaagaggaaatagacccacacggtaaatgaacttgtggtgtttagctaggaagtggagtttgctctaagtagctctggtagcagactccagggagcacatggcaggcggactcatctgagtatctgtgctgaggagttgtgttaaactgttgaaacacttagaaattgctatagaaaaagagtactcccaaagttgccagctaatatggtaccgaatttcctgaaagacctttcttttgccatgtggtttttctataaagctgagtcaattaggcttctttatctccctgtccttggcaataaaacgacaaaagccgagggttgaacaggtagacactgttatctcactgaatcttcaccgctgccctatkaggtggctattgttactctccccattctatagatgaggacactgagccrcagattggttgagtaacttgctcaggctcacacaactagcaggtgataacagctgaggtgaaagarcattttttctgggaagatacagggtgtttaaaggtacctgtttagtgcacagcaagttgcagtacttttaaattggagactggaatatgtaagtagatgtttgaatctctctctgtctttcagtgttacaggtgaatcaacaaaattagaatatctttctatttagtgactgaagaaggcggtccatgcatatatcagatctagtttggagtcacagactagattctggaccagagatgaaagatatgctttgggtacctctttttgattaaatgtagtttttaaaatagtgacttgactatacctcaaggagtcttcataatcttctgcatgggtatttataggcaataatgctaaagaagacagtgccagtacaagtgaaatgataacatgattgcagtgttacggcttttgttgatgaattatttgaactgggaggaaaaacactttgagaactaaatttaaagtaattcttccgatattatcagtaagacctaaagatggttgcttttagaggacctaaatgtattaaattcctgatttagcatgcttatagcaaggcttcaaatatgtttaattctaccagcttcttgagcttcttaaggagagtcatagaatcatagggaattaaaatgaatgttagaaatctgtatctcctctgacttgactggatcacacctagagcaacccaaatgaaaaatgtaccttgttttaaagctctccagggaaaaatattctaaaacttcccctgataacttactccaatgcatagtaaccctgagacttaatatttacaaattggtttcttatatatggatgaaaggaactctaaatgtatcgtattataaaaggtatgcattacataaaggaccttttatacaggaaagaaagtatttagatgaaaaaacttcttaattatggaggtacatctacaatacctaaaattaaaaataaaatgaagtgcattttcctcctaagattttctcatcaaccccgagaaccactgctggaaattacctgaagaagaaatcttaccttgctctgtatctttaggaaatgttttacctaattttagaaggaggggaaaagaacgataacatcacagacacacacacacacacacacacacacacacacgacacaaacacaggcacacactgtagtttcctaagcagtttgttctaattcttcacatccccctgtcaaaatgtttgcttatagctttctttgtattgtcatttaagcccatttctaattggtgattgttggaaattgaataaatgtgttcagtttttcataatgtatgtcgttgtatggttaattattaaatcgctctgaagtatgtagactattatttttgttaccatttaatagctattttttcttagaaaggatttagaaaaaattggaaaaatgctctggactttaacatctgcttactgagattcttttaaaaaaatttaactcatctggtagcatcactaaaattataattttaaggcaactgaaaattcatctaggagaagaaatggaacacttaaaaatttaagtctgtacctagtaattaacttaaactcctgaagttcaatgcggaaaattattttaaattaacttaatcaatgcactttgacaagctttcagattacatattgttttattctggtaacatgggataatgctcccttgaatcctaatatttgccaatttttattaggtggaatgagcagattttttttggctaacaatgaatgttttaagaagtgttttctaatatgtagtaagaaaaaatttaagttcccagacttcactgattaaacctgaaatatgctttataggccttaaaagaaaaagtgtgtgctccttgtagttcacatcagaagactgataaactcgttgctctgtttgtaaagcatgggttctgacagcagggctcttccagattgcgatagaggtctgtcctaaaagggcttcagattgggatagaggtctgtcctaaaagggcttgaggtgcaatttgcaagatgtgattttaggaccatacccaaattgcatctgactgttgggtgactccctttcttttctgaactctcaatgcacctgtaattaaaaaaagaaaaagaaagaaacccattgcagagctacattaaaagctggcagtagtttccttaatcaattgtattaagtcaccgtcattttgggatcatttgcacccgtgttcgttagtgaatgccatttcccgatggggatagatgccagattcttttttctttctgtgtctttttccttctccgttttctttttccttttaccccgttccctgtcttgccctcctctccctccctcctcttccttcttgccctcctttttttttttttccttctcttccctcaggtgtttaagacacttaatggtccccagcactgggccccggggggcggcgggcaggccgggtgtggcccgcggggcgccgtcccgcccgagctgcccatgtcgctcttgtcccgcaggcccggggccggagctgagcggcccgagcaccccgcagaagctgccggtgcccgcgcccggcggccggccctcgcccgcgccccccgcagccgcgcagccgcccgcggccgcagtgcccgggccctcagtgccgcagccggccccggggcagccctcgcccgtcctccagctgcagcagaagcagagccgcatcagccccatccagaaaccgcaaggcctggaccccgtggaaattctgcaagagcgggaatacaggtaacgcaccccgccagcaaggggccccctgcggtgtgctagcacctgccgcccaagccgaggggggtgaggcgcctgcctccttggttggccaaactgtgattttcacccgtgcggtcggaaaactttcatccactcctggggccttcccggtgctgaggggaggcaccggggttttgaagatcaaaagccgacggggacttcctgtggacccgagagagtgatcatctcacactgcgactgtggaatacactgtccgtgtttgtgcttgtgcggttcggtgatgacggaggggctgggacgctgagtgtgttgcgctggcctgattttcatgttaactgtacgtttctactaaagcatccttcggtagcttggtataatctttgttttaattcacgtgtgtctatgcagtgatccagccttatgggtataccctgtgcgagtgtctttatacaaggtctatacttaaatcattagtccagaagcttaatttttacctgattcagccatttagcagaatcaggggttttggtaaactcttcctgtaaagagccagatagtcaatgttttatgcactctggggccataccgtctctgtcacaactcacctctacccttgcagtgtgaaaacagctgcagacaataatgggctggctgcctttcggtaaactttacaaaaacaggctggaggcagaatttggcctgcaggctgtgtttacgagacccctgatgtaaatggttaatgtcaacccaaaagggagtccggcaagtattaagtcaagataaaatgaagctaaggttgtggattctggagtctgccagaaagcatactgtgtcatcagtaacttcttaccgtggcgaagttatgtctcttttctgtgactcagtttcctcctaggctaaaagaagatacctctcatagtgttgggaagataaaatgatactgaaacattcaataaataatacctattattatttcccaaagactttaattttaaggaaaattagagtttaaaaattatagagaatgttggtaaacagtgtctgggctyccttttaaaaggttaccttaatctttattgaaaagcacatcactcatttcttatcagactaaaatactaagttaccagcctagagaggtaatctgaaagaaatcagaataacttgccattagatgtgtttatttttttggatgaagartataactttattctcatcactattaataatcatctgttaagagattttatattgctatttccaccatttcatgtattcccagagagctagatactcattgtcaattgatatttcagtgctgataggcagattctgctgggtgaataattgctgtgtgttataaagtcaaatactagcatattcctctattcrtgtgcaatagactaatgtgcagtacattctgtatgttactgttgagtttttaaaaagctaaaagtattggaaaaagtcagtaatagaatagagaaatacaatgtggatgctctaaaattctgacttcctaagagctgatattttttttcctaccctaggaaaggaaaaagctctgtacaagctccctagttaaaacattttttttttccatttgaattaccagtacctttgttaaactatgtgaactacccttagaagagagatgctttctatagctagaaatttttacatatgtctagacttctttcccttattcagcctggtatgtgtgtgtgcacaagtgtgttttaactttttattttgctaactcctaaatgttcttaatcattttttctggaattttcattgcaggactttcttgtaataagtttattttaggaacttttttggagattacctyagtggatggtcttccaaagtgcacagtattaagtagtactatttggcctattccaatgtgtaaaaagcttttgttctgccctcctatgtcaataaaaaatgctgtcagtatcttttaaattacatgcattacaaaatgtggagaatggcaatttttcatagtattattattgctttataaatgcctactcttttgtaaagccatgtggcttttgaaacgactgatctggacaaccctgaatccagaaaggtcatgggtcctttggtctgaattttctcatggccacctggagaagaagcacagtttggtggtgacagcattatggggcatgttttgtattctttggttacagagcaatagctctcttctgcctatttgaaggtaagttgttcaactgcagagattaaatttatcccttaaaagggttaaatgaagtcccttaggcacttgcaaaagacaacaaatgaaccattttttttcttcttttgaccctttgtgacagaatggcttaccagcctttagcattgataactgttaggatccagttcatctttatcatccgatcaaagattagagaggggtctaaaaaacctcttttacaatttgataaacttagtttcagcaaaaatcatctgtcagaaattcttgaacagatgttaatttctttgggtcttgtaatatcatttaccttgtctatgaaatttgacaggaagttttcagcatcttaaatttttttaacgtttaagtcagttggctgcttttccttgttcatcataaaatcagaacgttgacaaattgaccttctttttcattcatagcataaataaatgtctgcctatgagcactttgctgcagctctgtacaagctctctagttcaaacatttttcccacttaaattggatcctttctttttgaccatctttctcttataatggaactttattacttccatagtaagtgtcagagagatgtttccctgtactgctttttttttttcttttttttctttttggcacacttttgatgccttctcattgtgcctaacttcgctttcttctatttagagttagatgtctgatcaaaagtacctcaggaatcatcacattggcatgtaaactaattccacacatgtttgcctggaagatgtatttcacacttgaaggggtttatttgggaagaacatgtctgaattatatcagccctcttcggaataaagtcagactttagtatgaaaagagcggtatatcctctttgtgtcaggaagcaggcataggctgcttacctgtgatttttttttttttttgacctgcccttgtcgccattgcaatcctgaaaattccttctcaaaaattaccagtagctgctttaccagcagagttacaaaaagtcacacacgctctctttttaaagtgtcactcagctccttgaaggaacaaaatgtaccagtgtcattttctgttcagataactctcctacaggaatcataaacttctcctctggacctgawcaagtatctgttgcatttaatgcaactctttttcttgccagaacagtaacccctcgtgatttactgttcaatctgtatgaaaaacctgtgtgacctaattctgcatcaattttctgtactcgtgaggacgctaaatgagtcccctgcagttatgcagtattacatcttgttgttgtttggggaagtttagaatcctgaatctctttatcggactacctgctgaatctcactgatggggagatgaaattgtctggagaggaacattatttaaaatgaagatttctattaacaacaacaacatcaacaaagatataatcttctgtgttmaagaagcccctcctgtacctttgcttcttccccaccatgtgctgaatcaaatgcatataattttactatggagtctacctttcctcttctcctagagtttgcgctttgtacttcttgcctcccttccagaaaagggattcttttgtgccagggaatcagattcactgacaaataactgggctccttggagaaggagtcatttcagggagaggtgcacccccctcgctcccactctctctctccagtgcctaagtcacacagtgccccatctccccggggttcccaccccccatctcctcatttccgctccacttccctgcttcccacctcccagttcaatgtgatgtaatctctaccctatcaccccagttatctgacgattacttatttagtcctagttccatggttgtttggaagattaagtaggaattcctctaatttggcatctgacccactttgtcaaagagagtaaatcagaataccaagggatagtttgagttctaggatattcaaataagaaagatctgcaaggaatctagaaccaaggatgcggaataaccaaatcattggccatgggctcacgccactataatacttaattttcctttggtatggccttaacctgtgaaagtaaagttgtctcagttttattttttccctttaaattatatatttcaaaaaaaatcaatagtggatttttttctttacatcttaattgttaagatgcatcatctgttgctgtatccagagatttggggctacatagatgttgtagaaaatgagtaaatgaagtagatgtctgtttcatatagtgaaaattaaaaaccacggtaataatctcacgagtatcactagtacaaggaatgtggaagaaagttgggagaatttgaacaattttgccaaaagagtaaaatgatgagtttattattgttgcatgaaatacaaaactttcagtcttttgaatgattaaaccacttaaaaatgctattgtttgtgttggtatgcatagttaatagcacgggccaggcatggtggctcatgcctgtaatcccagcacttcgggaggccgatgcctgcggatcacctgaggtcaggagtttgagaccagcctggccaacatggcaaaaccccgtctctactaaaaatacaaaaattagctgggcgtggtggcacgtgcctatagccccagctacatgggaggctgagaggcaggagaatcgcttgaacctgggaggcggaggttgcagtgagcagagatagtgccactgcactccagcctggccgacagagcgagactccatctcaaacaaacaaagaaaaaacaataacgacagcacggtagcagtgataatattaacacattatgatgacaaatcatttaataaattagaacgaataacgtgcgtatagcaaataaaacaagaatcagtcttagatactatttttagtgaagtccctgaaaaatagttttccttaccaccatttttaaatttttaaaaatgatgacattttatttcccttccaaactaagcaactgtaggttttttaaaaaatcactcattttgatatttgggctatatgaagtattagatcttctacagcatttaggtccaggaggtttcactttttcacgttaatgaaaatgatggctgtcgtcatcagcatcttggcaaggaagacaaatggtctggttgccttaggacagaaccagaagttagaaagaaaaaagtctgtcctcccagctctgtactctggcaacatcatcatgtttggaaaaaactgtaatattcattttttaagacaatttcgacttttattttagattgaggggattcatgaataggtttcttaacatgggtatgttgcatgatgctgaggtttggggtgcagttgatcccatcattcagctaatgagcatagtacytaaaagtttttcatcccttcctgcgctccctccctcccccgtctagtagtccccagtgtgtattgttgccatctttatgtccatgaatacccagtgtttagctgccacttaaaagtgagaacatgcggtatttggttttctgttccggcattaatttgcttaggataatggcctccagctgcatccatgttgctgcaaaggacatgatttggttcttttttatggctgtgcataatttttaacagaattcttaattttcagcttttatagttgaggtccaggaaggttctcggaaagtgtatcttaattatctatcattttattgcagtggttttggtatcaggcaaattgaggttccaatcttggcccccttctttactagctctgtggtatctccaggtgtcttcagttttcctcatcagcaaaatgggaccattataacttttaccttacagaggcgtgtctgtgtgtgtaagagagagacaattaaataacattgtacattaaaggcacttagtgctgttaatattagcctactttaacttattacttattattattctttctttgttgaaatctagttcagtacagtttgcctcagatttaggggatgtagttctaaaaatagtcttaaatggcatataattattttgtcagaataggattcaggtgaactctaaaaccagcagtttatatatctaacagtaatagtatcccaagtgaatggctaaagtcagaggtcttttattttctactctgcctttattatgaagaagtacatgcagttatatttttgatggtgtgtaaaacgagaatcctcaacatccttttctagaaactcttggtttttgagtactatttactgctggccctgatttttttaaaacagcctcatttgtattttcttttctcaagcaagctctgctcacagaggaagtggttgtggctggcagagcgctttctgaatgtttagggttggctgatttctgtggcatcagcacctaaaactgttcttgctcactgcgctttaatggctgtcgtcatcagcatcttggcaaagaagacaaatggtctggttgccttaggacagaactagaagttcggaagaaaaaagtctgtgctctcagctctgcattctgtctggctgggagttagaaagcttgtcaattggttctgtctcttatattctctctctgctaagagtgagcaaggacatttgacttccccactagatgcagggtgaaccttctttccctagtgttagatagaggttatggaggaagcyacattgttaagtaacatatacctgtctgyattaatgcaaaggtagcttttctctgcttaacatcaaaaattctagttgggtgttagaratcaactatcagtatctggaatatgttttgccccggacttaaacctaatgtcattgtttatcatttaagattaaattgtaatgtgtttttcccctgcccccttttccccattttattgtttcctttagacttcaggcccgcatagctcataggatacaagaactggaaaatctgcctggctctttgccaccagatttaagaaccaaagcaaccgtggaactaaaagcacttcggttactcaatttccagcgtcaggtaatacattttccccagtgaatctgagatgtaggaaataaatgtaattgttcctaaagtgttatctgtgttgcctttagtctattcaatattgttacaaagatataaagatataaatatagtaaaatastgaatcttttagaccaacagcttacaactaaaaatgatgaagatgaactgcttattattctggttttctcttctgtatatgggaaagagttttycctcctgtactatgggttacaaagtcagagttatggcgttttgttaccayggatgaaaaaccttgggaacaagtkgggtagctcatgtttgcttttatgactccaaggaaaaaccagaaggtagtggattggagcttctttgtaagcacagaygtaaagtgcttgccacgactgtgaaaataattttaacaaatatggtagccacgctactgaattagtggttcatcatttatagaaatacataaagcaatgtcttatagcttatttattcaccgatgtctaagtttggagtgtttgatcacatcaggctcatgtattgactaatcagtaaattatctgctcttgtagtttacagcagttattaaaagccagtataatgacctattttctgatttctaaattagtaagagacaagtggaatgagttagagctaattttcactttggcgagttttgccttgtggactgaaaaggttcaagtttgctagtccgcagattgcctcactaacccaaaggggataaggaacgtttcattgttagtcagatgggtttgttttgttaaagtctggaacatgcgaaatgaataattaatgagtcaaagtagtttggaagtattgacttggtttgttggaggatgtgactaaaatcacaggccactccagttgctattgtggtaggaatttgggtgtatatttgccttaccggctataatctcacagatggacattagtggtgggtaggtgctacttggctcttggtttgtgagagtagatttcagcttaaattttaaaaagaaaagggaaaattctctgagttctgtttacttctttcttattggtgacctcataagatgaattaataaagtgctggataaaatcttactaaatgaatattaaccaagtatattttccggaatatgtttatgttcaaattagcgttgccatgmcggactcttattgatttctgatttttgtttgatattattttaaaaatctgttatttatgaagcttcctaattaaattaactgtaactaatgatatttcagatgcagtggaatgattatttaatgtgtattctccagtccctaccccctaccaccacataacatgcaatacagataaaagtattacatttgtgatctgaaataagttcatgatataatataaaatgtagatctcttggaaagaagatcattattggagtgggaagaagccaaaactcatatttcccatcctttgtatgagactatgaattaacgttgtttgagtacctgctgctaccacacgtgaaagtaattcttttattctttttttggagcatcattaaaattaatctttaaacacaaagagaatgttaacatgacacttaaaacaaagcggaaaatttaaaaagcttatttagctaattggtatcattagaataattagagaaaatgaagttatttaaaaggcaagacaacatcttttctttcttttactgttacagtactataattgcttttgatttgaattatttggggagaaaaatcttgtaccgttcttgaaaatattgcatacatttggcatgattttagttccttcatttaatacaaaccaaaggtgattgagaagcttgtrgagattccccgccccactctattccattaaatgcaaccgcgagaaggccagagttcaggaacctagcttctgttagggaaggctgtctaactgctctcttcttgacagctgagacaggaggtggtggcctgcatgcgcagggacacgaccctggagacggctctcaactccaaagcatacaaacggagcaagcgccagactctgagagaagctcgcatgaccgagaagctggagaagcagcagaagattgagcaggagaggaaacgccgtcagaaacaccaggttcttagaccytgggctttgctcaccctcactttggcagagctgtccaatgaattcatcaaatggggtcagaatgactgaaaaatggacccttgtgggtggtggggacatcacagaacagaacggttccttgacatgtacataatccaaccacatcattttatagacaaagacgcttaagccaggacgtataaatgactgcccaaggtcatacaattgcttagcagcacaatgaggtttagtattgtcttagtttgtctgggctgctataaaaaaatagcacaaactgggtggttgatgagcaacagaagtttatttttcaccgttctggaggctggaagcctgagatcagggtactagcatggctgggctctggtgagggtcttcttctgggttgcaaactgttaacttctccttgttttcttacgtggtggaagcaggccaagaaagctctccgggcttcctttataagggcactaatcccattcgtaagggctctaccctcatgaccttatcacctcccgaagaccccacctcctaataccattacattgggagttagcatttcaatatataaattttgggaggacacaaacattcagtccataacaggtgtcatgttcataatcccatgggaagtttttgaatgggtgggcataggtggatttcctagagcaaaattctgggagcaggaacttggaaaaggaaagtagaaagcaaaaagttattttcataacaaatataatagtgtcctggcttctctgaagggcctagttgaatgtttcacagaggcaaatattaaaaacattcctttctgggggtttggaaatattttgatgtaggatttgatttcctgtcatagtcctgtaaattgtatttgttttcctgtgcttaatttagtgcttagcttagtttccttttgaaaaaatgttggattttagtgtaaatagagtatatatttaaaaagtggatacaaattctgcatggcaattttaactttgtataaacttattttgtgtcatactctagggtagttagagcagaaaaacattacttttgtgacatactttttgctggaaatactcatgttcctcaggtttattttggagtgaatgagtggtttgctttacattttatcattgccattttgtaggtctctttcagtcttcgatctttccattctcatgtggccacaccctcaaggctaaggaggcttctcttgctaaagcttacaacaaaaggaacccgaagaggctatctttcccaccagccccatggcccacacctyaactgcagagacaccagggcacctatccccaaacagattctagtcttcctatgctgttaaacacacactgagagttttcttggacaacactgatagctcagaggacactggtcattggattttaagtatccttttcttccctttttggatcttctaggaatacctgaacagtattttgcaacatgcaaaagattttaaggaatatcatcggtctgtggccggaaagatccagaagctctccaaagcagtggcaacttggcatgccaacactgaaagagagcagaagaaggagacagagcggattgaaaaggagagaatgcggcgactgatggtaaggaactccctgcaggagcccaggaaactactcaacccacrtccgtctgcartgagaccattaaatatggtggtagtagaaggaaaaaatgaaaactgcttatcaaaaattttagtaaatttctttgaaccttagggagatgaagtaaaaactttttctctttcctggagaatgcatgccaaaaatctagggggatgactgatgcgtatagtatttctgtgtcctggggtggcattgcgcggtacacattacagcttctctcataaaagcaggtactgtattttgcatgagtttgataaccagatctggaaggatggcaaatgcagttcttttaaaaatatggcctctttgagatgaatgaccacgttttttggaatgaataacacattaagtcgtgtcttcaaatctaagaasgtctgtgttttgaagcctctggtgcttatctttcttttttaatggcagaaattattctctaacagtgtaataagtgatttttaagttgattttgaaatgttgccttttttgtgatagccttgttatggtcaaaggctattcatggattattacatttgcactgttattttttaatgggcatataagcacagaagagataggtttatatcattggcctgagtatttgtttttattgaccatttatttttggaattggacctcagagcacactgtggattttagaaaagcgtgtgtgtgtgtgatgttataattataggagacctgcagattctatctaggacgtaatgcctgcatagatgaagataaggtcattagtctcagaccataattatgttcctggaaaattctaagtgacactgtcttcctggctggtattacagtttgcatttttttcattttttggattccagagagtaaacaccatgttttaaaagcctctgtgtgcaggtactactacatcttactaccctatcctgcctccctctccataccagggagagaggactgtccgagaggtttctgactagaccgtttttgtagtaatttgatcactaagcagtcaaatttgtctgactcaactgaagtgaaactatattagaacttcagtaacagattggtttgacactaatgattaggcatttgcaaatcattaatttttgcaattaagtgatggaatatacagataatagagaaactgaagttttttatcactctttcttcaagtgagttcaaccataaccgaaagcaattagagttataatagcatttgaggctcttgctcatccacagggcagacggcagctagactgagtgatgaagctgctgtcactcaggcagatgctagagtgacacccctggacaaaagatcccaagtttttgtttttgtttttgcaatggagttgcctcttaaagattttgcagcttgctccttttatcgtggcattacatgataaaaataatttggagtgtccttttattgggatacacaaagagatttctctcaaaatggcttagagtacatcagagttttattctgtttaacctcatcatgttgcttaatgggaggtggaggtgggaattactgtatctattttattgctcagcagtaccagacttcaggtgctaagtgacttgtctccagtcacctgggcccattactcagtgcagatctgtggccaaaaaaaaaaaaaaaaaaaaaaaaaaaaaatcccccaaatttgatctttcctgttaaccacaaagtttgtaatgccaaaaagaaagactttttaaaatataagacattatttgttaaaagcccatttgattccttgcctttagtagtactttttgaaatatttatgaatgaaaggatattatgtctggaatttgcttcaagacaattcagtttgggtttagaagaagagtagcaatgaaacaggagtcatcacaagtgaatttttgttgtttggggttggttataggagaaattaaactattctctctgcttttgattatatttgaaaatgtctaaaatatagagttaaagataaagtttagatcatgaattgtcaaattctaaaatctttttgtacagttaaagcaacacagaaaacaaagagcttggctcagagtgcttaatcacaccacacgtacagtgtggctttgtgcccggactttgctgtaaactccagtgtcctgggatgtaggcgtcacacttctgtgtgtttgtcccacttcagactctgtgcaatggcttgaacagcccaactcatccagtttgctacactcctaccagtcaaaatgcagactgtcaaggggaggacagagtggagagtggagttgyctgcacgcttatattatgctctcatcctgctcttctttccttaataggctgaagatgaggagggttatagaaaactgattgatcaaaagaaagacaggcgtttagcttaccttttgcagcagaccgatgagtatgtagccaatctgaccaatctggtttgggagcacaagcaagcccaggcagccaaagagaagaagaagaggaggaggaggaagaaggtgcgtatcctagtggtggtggctgagtccagggtgtatgggcagggataagtttttaaggcgagtattgctctttaagtactacttcttacactggtggaaggtttagatgattgaattgtgaaaattgcataaatgggtatggcatggaagtgttgattaggtacactagacaactattggaggtaagggcataataatgggatatactaaactaaaacaatgttgttcataaatcattgtttaatagaagattttaaattaagtacatacagtcaattgggaaaggaaaaacagacacaaataagtgttcgcttaagtttaatgctagggtggcaggggattactcaattaagaatgaaatttaagaagaaaatgcagtgtacaggttggaagaagccagaggaagatataagcaatagttacttggacagatggcagtgccaaagctgttcattcagttctgctgtccctgtgtcgcagtgaggtgagtgtgcacattggggttttaggtaattacataaaaaaagagtcctatgtgaaatatctcctaattatcatgagaaatgaagggtaagatttagaatctctgcagctattatatctcaattcaagagtaacctgctgaggataggcctgtgaatatgatcctctttgaagcttaagtcatccagtcgtctagttagtggttgatactgtgtgttcatgataaattctgtttaggccaggtacaaacatcaactggaagtcagaattgtaaaggttgaggattggtagcatttaatcattcattctgtatactgaataagtgaacaaaatgcttttcaaaaaacaattaatttcatggctcctgaatcctcatacctgtctcataattaaggaggaggaataaatgattaagaaggcaccttcttgcactgatttctttagtataagatagcttacctcattgtgaagatgaacgagagatgactcagggcttgtgtttagacattttgttggtgaggaatacctcattttcttgtcartgtagcattatagactgtgcaaaactccagctccaattcctaccttaaaaagatgttttcagagttagtgaggaacatatacgtaaggggggagggaagaatgatggggaaataaatcatataaatgtagttattaccactgaactgtagacttaagaatggtaaaggtggtacattttatatgtctaatgacttccagaaaaaatttttaaaaattaaaaaggaattactgacatattgatagcagagagagagatggaattctggaatattctgtaagtggaccccattaaatggcagttttagtttttcctaattcagccatgtgttctgcagaggttgtcactgttagtgtttttagtattaaaatttttgtattttacatttctttgtgattaaaagctaatgacccagwtttgagattatggcttacaattaatagatttctgccgtggtgttagatagttgcatcgtcgtaggcagagaaagatacacaattgagtgttgatgattatgcctatatttttgtgttcatctgtacagaacagggacttgtcacaattgtttttcatggtgttattctgcatgatctgtaagttggcacgcccctttcaaacccttgccttcaatttggtaatagcacttattctttgtgtcttatgcttgcactcaacatgtgttaactgaacacttactatgagctaggtcgtgtgctagaatgctgggagaaggaggggtacaatggtgaggaaaagcatcctgccttctctcacagtttaatcagagagagaaaaagagaggctagactgatattaatcagggagagaaagagaggctagacagatattaatccaacatgcacccaactatacaatgacaagctgggatgaatgttgtggagggaaactgtttccagttggaggtggggcctgatttcttggcaaacgcgtaatagttgtcaaagcagctactgtctaccttacagatatctttgagtatctcccattgattatctcacatgatcaatgtgcagaatttttactttatggtcagccatctacccttccttgcatgctcttgggtgcctagcatttgtgccctcagcaggactaagtcggaggggctctatttccttccagggtatcttactgggagaagtgggacaaagaagggggaagaaaaaaagaaaagaaactgaggcccttagcccttcctggtacctgtctcttttgcggggctttaagacttagttcagagcgaattatccagttccagatgcacttttattcaagtgcaaaggaaggggatgctttaagaagctgatttgacactttggattatctgtagttcttcttccctccattgcagtgaatgattgggagttgcttcttctagcttctctgtagtggaggaaaacttctgtgtctatgagcataaaaatctctgctatcctttttagcacttttccatagtattaagtattatgctgtacctatcaatattttttaaattaacaaatacttcaataaacctttgttttgagaaaacctactttactcagtgagctagtagttaatagcactgagctggtagcaacacttgaaggacaactaagctactgattactctaagaaatgtgctattaaagatgaatatggttgactttttcacttaatttaatctgaaaaagattaccttttattttcagcgttaaactagtgtacaattttttttttttaattccctagaaggacagaggcctctgtctttctttgggagtttattgtgttgacttgttgctcgtgaataatagggtaggtttcctttaacatgttatgaccttgtttaattttctcatcattacagacatttttaggaagtacacatttataaatcattttgtaacttctcattttcagcctggtcttccattaaagcccttgaaatggaagaagaagaagtgaactacatgtatctccttaagtgtcagaggaggaataatttttaaagtattgaaaacctagttatacgaaactaatttctttgatgttacaagatgaatgtgctattatgtgcgtttagcgtgaccttgaggtttcctacagggtacaaaagagaatggggctagatcaagccaccagggcctgtagaactaggattgaacatggctgaattagaaaattggaccactgtctgagtcgtgttagcaggtaatcttttaaaatcaaaactacatgagaaaatatttatactaatttgctattattctcttgtaggctagttcgttaaaagatctattaccatagtgcttcagtctcatgatctgtaagaaggcaataggaatgttgtctaccccatagatttgtagtgaggattacacgggaaagtttatctaaagcatgtagaatacaccctaacatatagtaagtgctcagtaaacattatttcatcaagcaattctatgatacgaaagtggaatcataattataatacggttatgtttttctgaaaacaaatgtctttttaaacctttactgcatattctttgtgatgttgaatcaataataattggtcaccactttttttctagttggaaatcagttgaatattagtgtgtaggatatctttgaggacagtgacagattctttaaatactgaggcatgcagaagaaaaatgaggctttatcacaggtgataaactctgcctaccaccctgttcccccaactcctacaaagagaattttctaattacatggcctctactttactagggttcctggcgattatgaggcatctctcacagtactttagggtacatttttccttaagctgtggttaggagcccataccaggagcagccctgcctattgcttaaaagtttagccatcagctgggtgcggcggctcacgcctgtaatcccagcactttgggaggccgaggcgggcggatcacgaagtcaggagatcgagaccatcctggctaacatgttgaaaccccatctctactaaaaaatacaaaaaattagccgggcgtggtggcaggcacctgtagtcccagctactcaggaggctgaggtgagagaatggtgtgaacccaggaggcagaggttgcagtgagccgagacggcgccactgcactccagcctgggcgacagagcgagactctgtctcaaaaaaaaaagtctagccatttcagaggttcagtttccagagccgttgacatcagccaaaactaaatatttaattctcccttccacatctttcagtgggatgtataccagcagaactattcttgtgttatttatttgtgacattttttggaaacatatgatactaatgggcacatactcagaatctctgaggcaacactagaccagatatagtcttcattggagtgttcgattttctttctgaaagttcttttatcctgtctctctctctctctctttctccttaccaaccgctattataagtaaatctcaggactgtgatattttgcaggttgaaccttcctggcataatgtattggccaacatagtggtaggaaatgtgtttttatcctgtttagataccagaatgtcagaatagcctgccgttggcacagttttcagtaaaaagagcttgaaaagcaaagcagtaatattgagacatttattttaaatacaagctactccctgattcttctcattttttttaatctcttacagtttccccaaagattatatactttattacagctttcctctacaggattttcatagatgaaagaaaggttctaatgtaattctggacatttgagtgtaggaactattgtaaggataggcgaacacaatgccacagtgattagatttatttgattagttgagtgtcaaaatgggggagaccagaagtttcgagaaaagtcctgtttaactggattgaccagttacttgagtcaaaatgtttgaattgattttctctataagaaacaacccaagtaatttgcaaatgcctgctaatttcatatccctgggcattttttaaaattacccgattacctatcttaatgctcaaaggtccccttaaatgacagtaaaaataactcaagtggtttttgaaagcttaggtttccagcaaaacagaatggatacttcagataccagcacatttgaatgttgtttcagtatattataataacacccactgggggataaagtacattcagtttataatatagattgtaaaatatttgatttaaaactttatgtaatgaggctgtttatagcctatgttaaagtaatctaaataaaatggcctactgaagtcttcttttgagttcagcttacacgggattttcatatttagagatttctttccctcctcagccctgttgttgattactttttataccttctgcaaggaagatgggtagccatgcacatacctttgcttgtgaacattgctaaatggaagatatgaattgacgttggccttggaaattgggaacacacactgtctttagtttgagtaatttttagttatgagtaatctttagttatgaataattcctatcatgtccccttacatgattaggttaattatactcctcccttcctacataagcataattagttctaaactcttttgcatgtaggaagaagccagtacaaagtttcttgttcagtgttttgttttgttttcaatcaatggaaataagtgcaggcatcagcccttaatattgatagcatgtgtctgcaattaaacgatgcagataactacatatgaaaatttctcaggtggcaggagacgctgtagcagctgctgcattcacaccaggacatttcwttaggtgcttagagactgtccgaagtcagctcaaacagtagaccaatcacaaactcttgggtgttaattttgaaccaagaaaaagggacagttgtgtttgttttgctttgtttttttaagttttgagacacagcatgargttgatgtgagtacatgtgcgcaccaaccagcaatgtcatcaaactgaaggaatccaaagaatgatgggaggagttgatatctcttgtcatagagtagactgccacctggcctctatctcttagaataacatggcagaattaggtccaaggacagggcatgcttgcgaggaaagtcacacagagcaccaattcaatggctaattgtgtgcgtgcttttaactattttatgacttgcaaatgtattggcatctatttatgatagtaataatttaatgagcatatgctaagtggaaagcattgttctttgtgctttcattcattccttcaatcaccaaatatttatttagcgccttttaagtgcctgatgcccttgtaggtgtgggaatgcaccagtgaacaaaacagacagaaatccctgacctcatagccttatgaagcagttttcaggaaatgcgacagccagtcttaattatagacataaaagaatagtcctcggactatcgttgacccttgtacaatgtggagattgaggctggcagcatatatattacttgtgacactggattgtacatgtcgaaatagtgacccagtcctgcagaagccctaggaagcaggcactgtttgttaccgttcctattttatgcaagagggaactaagacacaagagaaaatgatttgctcaagatcatacagctaagatctcttgcacttaattacagagagctragattgaaacacagtttgtctaattgcagaaccaaatgtcttaaatctaatattactctgtctctcagatttgatacctaayagaactttaaaaaatagttttggggattttaagtaatggaagggcctgactgtgaggcagtttttagataacaatctagctagtctataggacattcataggaaagtatccttcagaatagttttgattataktaatatatgatgcttcaagctttttaatgtactattcattgaagtggtgatccaattccacttgctagatatttgaaattggcttattcattgtctcatttgattttctttgttggccaaatttgtagcttatttctgatttgtatggaaagaatggtgggattaattgactttcccccattaattaaaacagtcccctgagtatagattctgagaactccaaaaatggaaccttcagtgactggtagcagggatggtttcttttttgaattcaagggttctgttattgttctctgtgtcactagcttagatgtagagcctgatgctctttgaagctgatcatttcttttgagcttataaatgtttttgctctgaggtgacataaatagaaatttaattacttggaaaatcataaccaaagggagcattttatttcctactgtttggtggaagctgcatttttttttatgccttgtgctttggcatacatacatacatgtatttttggtaaaaattgcattgtaaaggaacttcagaaatttcaaatgttgatggaactgcctttcttcactatgactaaaaggctgattttaaactttaagtgttttcgtaaaagctattttgtcaaaagacagttgagttattttcatagaaggcaaaacgtattatataatcaatatcttaagtaaacaaagttgagttcatattgattctgtatcgtcattttttatttttaattaactaaagagcccaagggaggaaagctcattttctcaagcatcttggcaaaggaaatgactaaagttttttttttttctctcattatactatgcagaaatagtatagctttccagcagtaactttaaaatagtgattctgtagaggtgattttaaagatttcacttgtcagagaggttatcgtaagtggaagaaattttagattattttgcgtatattacagatgagactttcttggatatgtacaagatatgacataaccttttgtttttttttttgagacacagtctctctctgtcacccaggctggagtgcactggcaccatctcggctcactgcaagctctgcctcctgggttcacgccattctcctgcctcagcctcctgagtagctgggactacaggtacccaccacaacacccggctaattttttgtgtttttagtagagacagggtttcaccgtgttagccaggatggtctcgatctcctgaccttgtgatctgcccgcctcggcctctcaaagtgctgggattacaggcctgagccaccgcacccggccgatatgacataatcttaacttttcatttaggttgtttttgaggcacatagaagttaatggactaagatattgggatatgtaagaaatggtagataggctgggaggccgaggcaggcggatcacgaggtcaggagattgagaccatcgtggctaacacggtgaaaccccgtctccactaaaaaaatacaaaaaaattagccgggcgtggtggcggtcgcctgtagtcccagctacttgggaggctgaggcaggagaatggcgtgaacacgggaggcggagcttgcagtgagccgagatcgggccaccgcactccagcctgggcgacagagcaagactctgtctcaaaaaaaaaaaaaagaaatggtagataacagaattcttcatcagataacaatatctgcataaaattttcccatttacacatggtagaaatactatatgttatgaaagaaatttaggtggaattaaaaacatccagggaactcataaagttttatattatgtttttatgcccatggagtgggtcatagcttattcttttttttgaggrtgcaatttgatttttattatttcaacttttattttagattcaggggatacatgtgcaagtttattacctgggtatattgcatgatgctgaggtttgtgttacagttgatcctgtcacccaggtggagatcatcgtacccaataattagtttttcagctcttgccccactccctccttcccccccagtagtccccagtgtctattgttgccatcagagcttattcttgatggacagttttagaatgttgttcttcattgctgaagaaaacttgcttaggggataggaaagttgagctaattatgtcaggatatatcttcccactcccaaacacgagaagaacatttcagattctgaccactgtcttgatactgccctgtcttaagctctttgggtccctgaagacacaatctacaaatctctagtgtgctggcctcagatcacatctgactttaagtgactctctacaagttgctaataaaatacatgttttgtctcagcaaagacaaatgaacataaaaggcattaacacttaagctgtgttagataataatggggtaacaatgaaatcctattacataccggagagttaccaggaagtcctgtaccccatsatcttggttacttataacattcgacattgttgttttgcagaaggctgaggagaatgcagagggtggggagtctgccctgggaccggatggagaggtaagggatcgtcatcctttccactgtgttctgctgaatggagtctgtgccatacctggcagcaccattcttcatgcatactattttattcttactgtgctatttattttaagtaaaaatagtaatacattagcatagtagaaaattagaatgatacaaaagggatacagtgaaaaataatctacttacatgtcagactgtcaatcaactgatattaaatgtcttgcatagtatttcagaattttctgtgcacatataatcgtatgtttacaaatatataggatgtgtaagaatcttaaatgattctataattatattgcccaataaatgatacagaagcataaaatatgacacagtttctctagtttattattaatttgaaattataaaaatacataaactaaagaagtcacatatttggttaacttatttttgaaatttttaatgggcttgccatatagcttctatgtgtatgttcatcagcctagtcctaaaattcatttcctagtagttccagtattctcctgaattatgaggatacaattaatttattggatttttttctgaagaatttaaggttccctgccagcgattcacagtgaggaggcacactcccagagcaggatgggaagggagtttgtttcaaattatcttcattttgtctcataaattctgataaacctacttggaggatcagagtgggtgggaggttgccacttcccattctggtatcactctgcacacagttgtattgtgaactcaaaacagtggagatgcagaaaaaaaagattgaaccactattctatgcagaaacctcttgaacaataaatgttacttaaccactataatctatcacaaggaaagaaaggatcaggataaatatctgatgtgtgagaaactccgtgggctgttactggttaagaatactatatattagagcacttagaaacaactctaatttgcaaaagcccagccttacctaagaatgcctcccattggtctataattaacaagcacacagggagagatttaacatgttagcgtaatagtgttcttatatcttattatctgttgggaaaattagctactgatcttggacttgtgacatacatcttttttttcttttaatcttaacacacgtgtcctgtttgctaaggattgcaacgtggacatcttgctctattttgaaataatgttcttctgttctcattcagcgcttttgccaaggttctaattccatctacagtgatttccagttttcttagaggcatgacattagcacgaaaacaagctgtattataatggttcatgataacagaatatgatttttccaagggaaatgatagcaaattgtagatttccttctttatctcttgagtatatagatgaccttttacattaatgaggaagaagtgtcatgttggcatgcaaagtaatgatgttcaaaaccattgctttagcacacacaaaagaaaaaaacgacaatctggagtaagccttttctctttttaaggttatttttgtggataattgctaatatattgtttcttgtgctgacagtgctttgttgagggtgtaaggggaaagaaccattgggtatgtgtttttcattttgttttgttttttggtcatctcctgtaagatatagaagataaacgatagcatactgtaggttatcctatcatttctgcttaattccaattgaaaggaatctagcaaaaattttggaattcatgaattgtctaaaaattcaattttatcacttttcaggaaatagataacttgaaccactcacagaccaagcatttccaaacaaacattttacttagggatctgttcttagaagtacagatcaccctgcaatcaggagcagtcattcgttackgattatattcaagtgtgattcttgtgttccttggatatagtagtctagtaatgaactttagcttaatttttggtcaatttgccagatttcagaggagcagagcttttttctttgtcacactcaaagataccaatagttgggttagacccctggggggttagttttggaaaaaggacaccggttctgcagagaccaaaccagccactcatgagatgacataagttataataccttttctgtttttcattctctctgaaaccatgactttgcaatagttgttatctgggaagtattagttgaggaatggggattgttagttacaaatgaccaaaatcaagtctgcctgatttaaataaaaagggaatgtattgataggatrctgggcaactcatcagatctccagggtttctgaagaacctgactcagggctatccccaatattatgctctacaactggtctagtgaggacaggctgtggctgggagcaggcagaagtttgacagagccattaccgctttcctggcattgttgccactgtggtctgccctgcaccggtgcacctgttggtttccacacccttgcacttctagctcttaactcacaaccttggtgatgtatctggttgctggagctgaggtttgtgcctgtatcttagctaccagggaggcagcattttcagtttctttagtgggaggtagcctctcacctcccaccaacactcattaggtagtgaaatttccaaacacagaataaggtttcacatgctgggsagcaaaaactgctgagaaacgtccagtacaggactsggggaaggtcttaacatgaaaccgtgacatgattttccctcctttgtagcccatagatgagagcagccagatgagtgacctccctgtcaaagtgactcacacagaaaccggcaaggttctgttcggaccrgaagcacccaaagcaagtcagctggacgcctggctggaaatgaatcctgggtaaggcatgaaagcagcgttcatggtgttcttttagctttttagattttggtaatcttgtaygatctcgaaactaaaactacacagcctttgctgagatggttgaagttgttacttggatttgtcttttatacatagartgtgctattaagtcatgtgtgtctttattgtwttgtaatttaaaaaactaagcyccctcctcttcctcactctttttccttagttatgaagttgcccctagatctgacagtgaagagagtgattctgattatgaggaagaggtatgtatgtatctctgtttggggtttattggtttgaaagttatcagaggaagaaattcttcctgaatgtaagcccgggccttgggtccttctatcatttcttcctccaggattggcctttgggtgacagctggggctaaggatttacaaatgctttgatggtgtatgcctagtggtacagtgatctcttggaaggccctggctaatggggaaacytggcacattctaaattcacttgaaaccaagagaagagaagctggcattaacttgggagatggtgaagtggtcttttgggggagaattggagatggattaccttgggaaaggccataccatacctctaagtggttcacattgagaattaactgccaaaaagttctgaagtccttcagaccttcgagtctatttgcaattctgagtctggaaactttgacaaaaagggcaacrtgggcttggtttaatgagtttattgatcctcttgatttctctccaaatgtgattcttgtttgaattccttagatatacttgttatccaaagagaagcgctcagtctcttggaaggaatacttagtataactagaacctaaaatgggaatcttgggtatttttaatagaaattgagaaataataaaatatttgttaaatcagcyacaaaatgtttaatttaataattacaaatagaaggattaaaagaagatttgctctcctttattagagcattgttaatatatwgtcattagatctgatatttttgagagtgccgtagtataggtgccgaggacaaggtaaaacatccttacccataatagcttaccagggtctcaagactatggctgttttccttctatttgtggacctgtgttttccaaattagtcttccatgagcacttaatgcttttgtaaagagaaagaataataaaagttacattacaaaaaagcataatcattaaaaagcaaacatggttgggcatggtgactcatgcctataatcccagcattttgggaagctgacgcaggagaattgcttgagtccaggagttcgagaccagcctgggcaacatggtgaaaccccatttctacaaaaaacacaaaaatcagcggggcgtggtgacgcatgcccgcagttccagctactcgggaggctgaggtaggaggatggcttgagccctgggcagagactgcagtgagctgaggtcgtgccactgcactccagcctgggtgacagagcaagatcctgttttgttgtgttttgttttttaaaagcaaatactttttgggggatgctatttgtttcccccagctactctatctctaagatatttaaaggtgtcttgtttacttggatgaatgggcttataagtgacctactggaagaagcttctctttgaataagagagccagagagggcagagataagatgaagtaggccgcctagccagcaggtgccatcctgagaatgacaagcacagacagcccttgtccctgggcccatcacatgggtctgctgcaggtgagcctgagtgacatgtggagagtcatgtcccctctcagcgttttatttcctggcctggaaaatgaaggagttgtgccaaggccttagctgactccctgcttctaaatgatctgctatcataaggtttgatttttctccttgatagtttgtcaattcatactttgtcatttaagagttatggaaaagcatagttctctttaaacctgcttttcaaggaaattctactggattgtctggaaagatttagccttctacaccaggttagtagtggacagaatggacacttacttagtgatgctttcaaatgggtcagctggatgtagcactcggttgagaagggagaggtattgaatccttcgccaagttattgagagtttttaatctcagtactctgcaatgtgtgatgtgaatcagccacagaaagcagtgtgtttacaagatccaggtcctctacagtggacatatatggggccatccaagtcccatgggcattatcagagagagtagattttttttgttttgttttgtgttttgttttgagacagagtttcgctcttgttgtccaggctggagtgcagtggtgtgatcttggctcactggaacctctgcctcctgggttcaagcgattctcctgcctcagccccccgagtagctgggattacaggcatgagccactgcacccagccatcagagagagtgtttttatgagaaggaggatcctaagagctctacaatctggctttggagagagtgctactgagtgagagcagatatgctctacaggactctgataaccaaataatgataaacatttatgtttctggcatgatatttacatactcattcttgggagcaagggttctaggggatcctcagagagttcccttcattatctcattcatgatttcaacagcagttgaattgggggtattaccttacttaagtagatgttacatttacttcctccctgaattttatgatcttacttcatttgtgaagttcaatactagtttatgtcttttcagaaaatgtcaatcwtagagatttccttgttaaaatataatttcctccctatctttgttccttttccaggatgaggaagaagagtccagtaggcaggaaaccgaagagaaaatactcctggatccaaatagcgaagaagtttctgagaaggatgctaagcagatcattgagtatgtactgcatttttcccttggaaatgcattgcatgaggatgatgcttaatgaattttcttttaggaaattttgttcaaggaaggcaactaacttcacgcctacactctgcttgaaactgtgctcctagaggtcaccactgagttctgggttcccaggtctcggggtttcgtgttgattctccatccctccctcccttccttccttccctttcttccctttctttctcacttccttacccttctctctccttaatccccacctccagctcaggctcactcctgagcctcacacctgtcgtctgcacctcagtcccagattgaactaatgaaacttatctccctaactggctgcttcgctgcctttcctgcctcccttaatgatatcagcagtctccctgaaacccaagtgagagacaccattcctgtcttactcctgctgccatagccaagttgaccaccaactctcgcccagtccctgaaccctctccagccctccgagtgccctggctctgtgtctcatccattcctgtgggccctctacgtcaagggtttgcacatttctttgcttgtatagctgtactattaaaagaaaactgttgtgaaacaatataaaagatgaggtattttaaaaaccagaaatagacatcctaatatttctcccttttattccatggttgtgtgccccactttagggacccttcctcgtagcagtctgccctgatccttcactgaaggtgttaagaatccccctcagtggttcctcattgcctgtagaatagcagagtagctcatgaacaaggcacagaagatagaagcctacctttcctccttcctacccctttaatgttgggttgccctctccccctgccctcccagctttagccagtgttctgtgaataggatttatctttgtatttaacagtctaggacagcttcatcggcaaagtattcatctgcaggtgtagggttcaggctcctatctgtcttttgggtcaagggggcctgcattcgaatcctggtttcactaccttttatgtgatccaaacaaatgaagtaacctctctaagcctcgggttctccacctgcataaaatggggatgatcatcataacgccttttgtgcttgctttttgagaggattacagatagtgtatattaactgcatggcaagtcgtggttgataaataaaacacacttattgcagctattttaggttctcaaatcattttttgagtgaagtaaaacaacacatgcacgcacatgtctgtgtgtgattctccactttttcctttcccaggacagctaagcaagacgtggatgatgaatacagcatgcagtacagtgccaggggctcccagtcctactacaccgtggctcatgccatctcggagagggtggagaaacagtctgccctcctaattaatgggaccctaaagcattaccaggtaattggcatggtttcagtttccttggcaagttgtaaccatttacctaattttgattgaagtatgtcgtgcacatgttgactaagggcttttgatgayattttaggccacrtcacttataatactgaggttcctttcattgtgcctatgattcttcttttagagtactccatgttaccatctttactagggcatgccatacccattttctcttttatgcttttgggatgtattttaagtgatctctgcaaaatggaaaacccagccacattctattaaactggagaacatccacgcctcatcttgaagtatttctttaaaatttttaggtgtggctgtggttttatgccgtggattgaacccacctaggagtagctgtctactacatttatgctttttcttaagacacaataggccaggcatggtggctcactcttgtaatcctatcactttgggaggctgaggtgggtggatcacttgaggtcaggagctcgagaccagcctggccaacatggtgaaaccctctctctactaaaaatacaaaaattagctgggtgtggtggcacatgcctgtaatcccggctactctggaggctgaagcaggagaatcgcttgagctccggaggtggaggttgcagtgagccaagatcttagcactgcactccagcctgggtgacaaagtgaaactccatctacaaaaaaaaaaagaaacaataaaattgtgagcatctgtgctttgattaaaaattaggccattgttttatttgacctgtctggattgaggctaattccctgtgttctaccttctaccacttagtgacgtttcccaaattgtgttccatgagacatttgttctatgaattgttccttaaaaattaaaaaaggaggccaggtgcggtagctcacgcctgtaatcccagcactttgggaggctgatgtgggccgatcacaaggtcaggagattgagaccatccttgctaacacagtgaaaccctgtctctactaaaaacacaaaaaaattagctgggtgtggtggcgggcacctgtagtcccagctactcgggaagctgaggcgggagaatggcgtgaacccaggaggcggagcttacagtgagccgagatagcaccactgcactccagcctcsgcaacagagtgagactctatccaaaaaaataaataaataaataaaaataaaaatagataaataaaaaaagaggtttgtggccaaatactgtaactaagattaccatataaattactatttctaacttgaatacttgtgaacgtgagtcgagggccttattattgataataggcataaccctggactgtccctsaacaacaaccagatacggtcactctggcagtgacccctcttgttaattcacatgcccgtcagcacacttgggactctgcggaaatcaacatgtaaccataaggcacatcagcatcctgcagtaaaatcacttcttyaacattgtttaacttcatatttcccaaatttctttgactaccaaaccctatttttatatcaccaattaacatcctgtaagactagcgtcttctagaatacactttaggaagtgtacttgttggcatcgggtcctctctactcttaacacttggtactgtgtctgctgcccttgcataggagtgcagaatacaatgactgccagtacagtactgccttgatggtgctgaagcactagcagtttttacctaccaatgcttttgcatcatcagtgcagacgtcaacacagtaaaaatgacaagtaatgccttagtattgtcatgctaatcattttgacctcgtggatctccttccaagatcttggggggccctgagaacccctggaacacattctgaggaccactgctctggccttagtaagatcatgttttctccaaagaccatgtcatagtcctgagatccaaagcaggtttcatcttgtttggcctacctgacatagatgttaactcatagcatgctctaataaacttttgtatatctgcatatgggagatccatcttttgaattatttgtgaataacttgtaatgccacatgggttttcttctgtcatccaacacccttctaagcagtcttcatcactctcttttcaaacctagctccttcgacttccatatgtgagttttatgcctctgtgttgctgagctgctgtagattccccgaacatgccttgcagtgtctctctggatttataccttatgaagtgccttcttcctggaatcttgactagccatgtccgcctgatgagatctcacaaaccagttcaagttgtggctcaaaccttccctgatcatttctcataaaccagttcaagttgtggctcaaagccttccctgatcattctctccatgagtaagctttctatcttcttgcttcttgacaggtttttgtgtcattaatatttacttaaccttgacacggctgaggtcttcctgctactcctagagagccacataagcttggttcaatatctaatcctccccctggccaattctgccagtttccagcctgagaaaatccaaattacttcccacaatttttgtgaatttctagtctcctctgctgctagtttctacttctgttttgtattgaattagcacaaacgcaaaattcagcccctttaccaattttctctaaaaaaagcagaaacaaaaattcatcctacagagtatccaaaatgtttcttgtatttagttgacttttctaaagctctagtggtttcagggtcacgttgcaggctgacagcttctcctgtctaccactgtttgttttataataatttcccctctttccctctatcttttgcccattctcttggaggttcttcctgtttctctacttatctcttgttgttgytgtagttctgcagaaacctttaggatgactttggaatcttgcatggtacaaagtatctcaagtggcttatggaagtattgcttcaaaccaatgcggtgtctccctaagaaaaattcttgtcaatacagttttatatgtatacatatacattggcactgtcaaccacttcttggcatatgtgtatatgtgcctcattcattgttttctcttttatttgagcttctgaagggaggcatgcatcttacagaccttggtatctatctgctacagctccttgcatggccccttgcacagaatagtcatttaataaatattttaaataaactaattgcttgctttgttcttacataaaaaattaacatttccctaagcataacatcattagcaagctaaattgactttagcaaacatatatataattgatcctatcatttaaatccagcatctgtggtatgatggtggaagggaattgttggttgggggatggaggtttaacaattttgtattttcacccaaccttacttttgtacttaacgtggggaatctctggtacagtgtttttgtacttcagaaatacgttgagcatgtttccagttgccagcttccagtgtgcagcctttgggtagtacycacattacaaagttcccatgtgctgtctgggaactttctctctgccaggaagagaaatgtcctcctgtggtcccagcagagtgtccctggctccctggtcagtccgccttttcactgaggggacctcacccatattaccgaaaaggctgtttttaataatctgtgatctgtgtgccaaatctgccttcacattggctttttattcttggagtggttggattagattttggtttgggcttttttcatttataataattctagaatgtcacatactgtgaaatactaagtgtggatgagcggcaaagctgctttaaaactcacctgtcaagaagcaagaagagagaaagcttactcatggagagaatgatcaggctcatattttacattctttttgcattggtgcttcccccattttcctactgtgggaaacccaacatacagcagtgaggagttaagaagtcacaccctcacttgggttgtattaggattaattacctgtgcagatcttggataattgaagcaattactcttcatttcagctccagggcctggaatggatggtttccctgtataataacaacttgaacggaatcttagccgatgaaatggggcttggaaagaccatacagaccattgcactcatcacttatctgatggagcacaaaagactcaatggcccctatctcatcattgttcccctttcgtaagtaaagtcatttattccacagtcatcgttctgtatgttgtagagtgcccgattagtagcttgtccttgttttttacttaagacagaattgtagcatgtactaacctaaatccagattaccaagagcatgtaatctggatttaggttttaatttcccacccctccccatcctagcctgtttgattggctatttaagcacgggaccgagtgattttatcggccatcagcattacaggtctgcacagcctgaacactgcatagtgagtcttgctcatcattattccttaagtggctcacaaaggggaaaggtgtgtgtgtgtgtgtgtgtgtgtgtgtgtgtgtgtgtgtgtgtgatttctttgattttttccttattccatttccaaaagatgatatattcttaaatcttccttttaaaagcagaacataaatcaaaatcataactaggagttttgcattaaaataaccttagtatgtgcactgaggttatgtttcaatgagtttgctgcttagtaaggacaggagtttgctgttcgccattacgttcccagtgcctcacctgctaggtggttcttagaaggtcctaagtgggcactaccgagtgagggcacagtgattcacaagcaccctcctgggagttcagtgtgtctgcctgtgggtgttaggttgcagttttgttcaccaaggtcttgttatagatctcaatgctgatatgaacttggaccttcagtaagaagaaggattctattaatattattgtgttttctttgaattttttctaatgaagactatttgcagccctttttgtatgaattatctgtatctgtaatatttaggcatcttttgcatttgatctatattttgcgtgttctgaatcatatatacagtgacactttcagggctttaaaaaacgtcattcaatatttcttcccctgttccctcttgacagatttattttatgttttcatgtggttttataatttctttttcctgactcatcttttttctgaacctatatggctgtttatgaagattcctaaaatcattctggcaattgctcttttttaatatcatattacagtttagttttttgctctctatatttatgtattctttagtttttttcttacaagatttttttatgaaccacaaacttgtcatgttttgtgacagtttgttttgaacttatctcctatttccacacctttaaaataaatatcttgttgagatatgttatattctgtagcccctttcaaggtgaggcctgaacatgaataagaacatctttttaaccattgatttttatacaaatgtcttttttctgttgttttttttttttgttccataggactctatctaactggacatatgaatttgacaaatgggctccttctgtggtgaagatttcttacaaggtttggaatgctgtatttatatataaatgtggaaaagcaaaaaatagaccctattttcttcattccatatgcacatctgtgaactgtatttggttgtaaagttttgtcatgtacatcatgtactaaaccgtgagagttaatcatcccaagaagattactgtaataaaccataattactttcagatagtgaaatccagaagaaaattgttaattatcatattgcaaggtttctgatgagagtaatacaaatgacaaatatcacacattctgcgtgctgctgactggctcgctgtgggctgctactgtgctgactgttcctgcaaagtcaggcaattacccggatgcccggggctgcctgctgtactttctcaacagaactggagcctttcagcagagcggtgggttctctactaccacaaattcactgtcatttccatttccctttgccctcccactgtctttggtgggaaaacctttctaaaaaaagatctgaaaagggtcaagacgtgtaatttagccaaaacttcctcgtgtataatagatcagtctatgagaatgtgtgtctgtgcattcttcagtcacatgtctgggcatcattaagctatgaaaagtgagaaataatgcacatatatgtccataggatcatgcatgtatttttttctttccattcagggtactcctgccatgcgtcgctcccttgtcccccagctacggagtggcaaattcaatgtcctcttgactacttatgagtatattataaaagacaagcacattcttgcaaaggtatgtttttaaaaaattattttctctctaattaggaccattgcactggaatgtgaagtattgcccaagtcagtagtgtaattggatccttagatggcttgtccttttctttatttttctaaaattttttcagagtttgatatgttttggtcgtggatttgatttcatgcatgctgtgtgtgtgtgtgtgtgtgtgtgtgtgtgtgtgkgtgtgtgtgtttatgattgatcctggggcggctcttgtctatcccctcagagttgatgagtttacatctcttaaaaaaattcacctggttgcttctgcaactctttttctctctaacagctttgcacattctcgggaaagaaataattgtttttgttgccctgagatattgtcagtgtaccttcattcttcttgtgcctttgtttctccaaagatgagccagacacctctccatatggtctccaccatatgaacatttatccaagccgtggcttttgtggtagtcttgtttcaggtttttcctggtgaaataatagactatcattgttggarttacttaaggttgtttctgtgactatttatttgaaactgagaaagaggtgtttctgtgacttacatgtctcctaatttttatgtcctaagttgttccttagccacaaagtagaaatttttactcccatttatatcatcttgtcttctaatacgttcatgtagaaagatggaagtgctctctttcgtggaacaaataatgaaaactcttttttttcctctttagtaattttttttaccccatgacgttttgaaagcactataatctgaaactaagttatgtccaaaattgaatagaacctctatttctggggtctattctacctctgcattaaactcttgctctgggaactgagagttcccttcatggcatcataggaaataacaaaaaggaaatgtgttcccaggggaggtttaataattgagatggcactggcaacaatgctgtgttccacctcctcacactcagagatgaatttggcagtgtcaaaaatgatgtgttttcaatattactatgggaatgtgtttgtacatttgagatccttttaaaaaaattcatcttgtgtcttctgcatatgtatttcaagattcattggagacgcctggtaatgagatgcactgcttttatttgttactggagaaatggagctatagaaagaggtagtaattttgtccaagtggaagacctaattagtagtagaccccatagcaaaatcaaaggcctctgattctttattatttcataagctaaattaggcrggaaagtagatttaggatatttatttaaatatattttttgtctgcttgcctcttttcatgctgttggtaagtctgaggcagttgattgtacagctttaattatccttaaacacttttcttagaggtggtggaggaaggaaaaaaaatcgaggtagttttttttttgtttttttcttacctgtacatcccagcctgactgatgattttattccttttctcctggcacgtctgatgcttctaatgaggaaggcaaggactgtatagaatactttcctcatctcccttctctctctaggagctttgcagcaggatctggggacatctgagcaccagatgtttttcttggccattgccactgttttgtagagaatggataggcttagtggaacattcctcattgttctcactttaagaaactgaacagtgctcttaagaggactgaagggtaaggtatgagagagggaacgtactgtgtagacaggaaggaggactgggccatataagcattctggacgttttacgcaatcgtcatgttggggaagtatgctgtatttaattctgcagttttggcataaatacaggagtgatatttttgcagtgcgctttctgccagtgagtatattcttttattttagataaaacaggggtcctagatctggcaggtaaggaatgtgcgtgtattgagggagcttcgttgtcagacctaatttttgaaaagccgtatgtacaaatttaatgtgaaatagtccaacttttaaatgttagcaaccagtccaaacaaaacaaaacacacttccgggccaagccctaaaggtagtaaccagccaggctaatagaaaagaaggcatggagccaaraatatctcagctgtagaacctgctagggccatcttggaaaaatcagtcattaacctctgcttcaggtgggtacctatattctgtgcctgtcatgagctgaaatagcatgaccatgaaatctgggatagctgtcatgataacgtattaatagaaggggcattggatggggagaggcaggatccacacgtggaaacaaccatgtcattctggacccaaatttccttctttgtaaaaagttgatttggaattacgtggtctgtaaggaacattgttcctttaacattctattattataggatgtcttatgcggcctatcaggcatgagacattgttgagattcccttgtctcaaaggtaatcacagcatatcatataccaaggatgggttctttggttttccgcaccaccacttgcttgttggaaatagttgtattttcccttgcttactacacrtccgtccttcctcttgtgttatagattcggtggaaatacatgatagtggacgaaggccaccgaatgaagaatcaccactgcaagctgactcaggtcttgaacactcactatgtggcccccagaaggatcctcttgactgggaccccgctgcagaataagctccctgaactctgggccctcctcaacttcctcctcccaacaatttttaagagctgcagcacatttgaacaatggttcaatgctccatttgccatgactggtgaaagggtactggtctgagttctgttttttccactgcatgataatgacatgaaatgaaaggccctaaagctgagaacattagagccacagaacacccgcagggtggtttccactgttgtttattttatgaaacccatcggtgggtggacatggtcttgtggtggggttattttcccctcctaggaaaatggatctagtggtacatggggcatctaacccctttgtcttttgccagcatgtttaccaggctaccagaaaagggtcccaaccggtggaatgcttaactgcagtgggccacagggaggatgaacatggagatattttgctgaagtaatttaaccagaccaaattaaccaactaaatacaagctttaaacaaatctttccttgttacaaacttggagttccctttaaaatatttccacataaagattttgtgtgtaaaacagaactagttttcacacattttctgcagaccttttttttttctttttaggttttaatgtgattttcagttttgtgtgtacataaatagtcttcctggagtagccatttattttccaatttcttattgttccttccactgtcttctcttaagagctcatttatgaaaggtagacaatgggccattgcaagaaaagaaatgggcacgtgtcattttcatagtggttcctcattcataggaatgaaaagccactaaaaatgctttagtaaaatttcggtttgaattatttggccctttgatgttgaggcacatgggcccatcctcagtagttaactcactggcttgcccatttgtagaaagtagtgtcaatcaactctgccccctagaggttaataggagaaggtgaaagagaaagccgggaaatgtataagatggactaaacttgaactagatagggctgagaaaaggaaaggagtgaagttagagggacttagaggtccaccagcataaactggatcaactcttgttcctcttctttatatgttcaagcccctgttcctttagtatgtttctgtgtctgagacaaccaagacgaagggcctaacttaaggctgccactttaaatagggaacatattaactgttgcccaccttctcccattctatctcagtcttcagtctgtcttcattgacagtcatatcccatacaatttgaggctgttgacactactgataaaaaactggtggcttccgggctcttttccatagaactcagcgttaagacaaagacacctatttagaggtcattttgttaccacttggtaggcaggtgggaagataattcagaggtagatatgacaggcttaaacttggctttaatgcatgtaaaatgtcaatcatgtattgaaccacacatatgtaacataaagctttattgtatgaaacatccttttctttaaaaaatcaaattcataataagcctctcttacaggtggacttaaatgaagaagaaactatattgatcatcaggcgtctacataaggtgttaagaccatttttactaaggagactgaagaaagaagttgaatcccagcttcccgaaaaagtatgttgcacaaccaaaagttgtgggttttttttttcctccagcaaatatatttgaagtacctgcctctgaaattgtgtttctgaaacagcagactcatattgtagttaatagtatcttgaaaatatcttaaattgtttttttgtttgatagggctagagagagcagggaaattatagcatttgcagcctgttttccaaaagcgttcgagcagattttatgaaattatcaaattcactgagtctcatttacattttaattttagatttttttttttttttaaattacggacctcattgagttcactgttgcaggcactgtagaattgttctgcttataagtgaatggaagatttggcgttggggacttgtatcatcattgaagggggtggtaaacatttacaggttttctagaaatttatttaacatttgatgtttgtgatgtcaccattctgacagtaagtgaaaaaacagagttcctgcaaattacagacacatcatctaattattcggggacattatttttgttctgtgccataaaaattaagttcctgtgaacattttaagccagtatttttcggactaacttttggaaacttagtctgcagtactttagaacaccttttgagcccttagctccatgttttggggttggatgtgagtattagtttaatatgtttctgatcatattttggaaccatgcatatttgaattctaagtttcattctcttagagacagtttagcattgtgtactatttgttgcatgaggtattttgatttgagttttttctttagaagagccaattctgaaatgtcttatttttgcatgattgtggtttttctgggtaacgactctatttttggacagattggttcatcctgttcatttttaagtgggagttttcaagatggtgtacaacgttgatcactttgttacgagagaattttattccctaatcctttatgcattgtcagaaaaaaaattaaaaatgacttttataccatgcatatctcagtgaaagtctacgtatttaagtattttattctgctggtgaatgcatcttggacgtagaatgctattgatattcccttggacttcctgtggtcttggcctctgggtagcaccctttctgttcaagatggagtttagttactgagtagataaattgatgaatgggtatagtggccatgtgggtgccttgaattacttcctagcatacagttacgrtgattctgcaagtgatagagatggaatgttaaacattttaatttatcccataatttctttttttttctttasaagaggtataaaataaaaggcaattaactgaagcccttcatttattcattccrtaagacttcttaatcttgttcattcacttctaagactggctaatacagatagatttttaaaaatatattgcaagttgaaagtatgttatgttgtaagaaaatccactagagaaaaattgaaatttttgcagcttaagaattatgaggtgattaattatatcacaaaggaattctttgctttacaaaaatatttattttatggttctttctacaagagaagttcctgagtatacttgaaggatgataaaatttttatgaaatgtatctaccctcaaatgatcacgagtatgtctcttgcataaagtatacatgtatttattaacacccagagtattatatttgaggtatgtaaaatactcagtgtgtggtattatctacctttagaggtatctgtacctttaaaggcagccatgttatcttttcctttggtggagtggaaatcatgggctctgcctgtcagagtaggcatgggtttcaccacattctccatctcttactatgtgaacttgggcaagtcttctaacctaaatgggtcttagtgttctcatcagtgaactggaagataaatgactctgtcttatggagttgtgaggattaaatggatgtagggctcctaataccatgccaggcacatggtgggcacccaaccaatgacagctgcttctaccatattccttattttccactcatgttgctgtctctgttattaatgggagttccattttcctattcttgaagctctttctcgctgttctcttgtctttgctctccttccggtagcccccccacatctctctccataaacttttcaagcactttgtgtgtgtatgtggttgttgttgatatggctgggctgatgttcattttctactttttcakccttgttaggattttttttttttagcctggggaaagttggaaatttcattgccatcctagggggtaaagaagtttcttctaccaccactgcttacagccacaaacaatgtgcatgtcttacttagcctggataaagaatccagaaaggaactacggcagatggaggaaaaggctaaatactttcacagcagtaattctcaaatgtttttatgaaaaaagagccatataggaaagaggcttttacttttattttttaatttatgtgtagcaaaatttgcttcttttggtgtatagttttatgagttttgacaaatgaagagttgtgttaaccatgcccacaacaaaaattcaaaacaatgtcatcatccaccgctccaaaaaaaattccctggtatttcctggtactacttcttttcagtgaaaccctccctcggctcgtagcctcatgcagccactcatccgttctccatccctgtctatagctttatcttttccaaaatgtcgtatgagtagaataagacaatgtataaccttttgcatggttttttttaatttggcaaaatgtgtttcagattcatccatgttgttgcatgtatcaatagttggttcatttttattgttgaataatattccattacatggatgcagcgcagtttgtttgacatttgggtcatttctagtttttgacaattatgaatagagctgctataaacttttcatgtacaggtttttgtgtgaacataggtttgcatttcacttgagtaaacgccttaggtgtatgactggttgatcgaatggtcagtgtatacatagatttgtaagaaacttctgcattgtttcttagactgtctgaagcactgggtagtcccaccagaaatatatgaccattccacttcctccacattctcattagtgcttgctattgtcagtttttcaagatttttagccattcaataggtgcatagtggcgtcttgtaactttgattggcattctctaatgtctaatattgttgagcatcttttcatgtgctttctcaggtgaaactaaagcaggtatataaaggccacggttttgtaaatgcaggtcaaccgcataggaaaattagctttaatattggtctaatgaaacacttaatgagcaagggaatatacccaccccccaaccaccaacaccgctaagctgttgtcataaaatccatttcttatgcacgggaaagaatgccaaatagaaaagggattatgtaagaacaacttaagctaaataaaaattgatttttctatttagctcacatttaaggttgtctgtgctgactcttttgttaattcatatcatcaagaaccaactatacttgcaattggctgggtatttctttatgtctaaatatgctaaaatatgtatataatatctgaggttaactagaggttgacctacctaaagtcaatcctgattctgatataatttgtgaaaaacaccaacaaagctttgcttacattggcaatttgtgtattcattatatcaaattttggaatgcttagcataattaatcattactttgttcctctctcatgccatagcgtttagaacctgagacttttcataaattgaatcatattgtttacaaatctcagttcacaaagtggtgatatatcgcatgtagtttaggtttattattccaataaaacatcctttaggaaggggaattataaatgaagaatagtattcaggcagaagctatgaacaaagttcaaatacttctacaggggtatataagaagaaatgctgagccagtataatgacctgatttgcctacttttagggaccagttaggccatttactaacataagaatgcttaggagataattaccagatacatgaggtcagcacctcagttttacatatgatttaaacaaaaatagctccagtggctctcacaaacctaacttactgggagaatcacccccgtgaagaagtcacaagtttcatttgctatagcaccagtatattttgaggagctttcacatgcatgctctaaacagatgccatcacattttttgggggatgaactcagactcaaccgagttggagttggcacgattattataaaaacttctctcgtcactgtgattcagtgtggtggctgtataattgttcagtccatcccttttcttgatacaaacctgttgattgcctgctctgtacgttatactgcactcaggccaggtgggaggcacaatataccagaaatgggaggcatggtgtgagaagtcaacagacttggctgtggagatgagggctactcacactgaataatagtgtggcaatgcaaggcagcatcatcccaccaatcagaatgaatgatccaggcattcaggtggtttaggacggggtacccagtrtgtacacatgggtgtatgtgttgggaaatgcttattagtaatccattgggtggagaaagatgttagaacaatcatatatattgatctttctcttaaaaagtcttcactgatatttaacatgcagattgacaccggtacctatgtggtaggtacgtatgtgtgtctgaaagcgagtcatgtgctgggagtacactgtgtaggttatcccaggggaagcgtgagagtgggtttccaccactgggagcatctgatagtcctttcatccttgctgcctggttcatttactttctgccaatggtggtgaggcmttatgggtttccccgtgcccagataaggagatttagtatgatctgattttaactaaactaacaaccctggtccccagaagggcttaaaaggattctgcaaaggagtgcaggttgaaatcacataggcatagatgaacaatgggaaaaaggccatcttgtctcttttcccattcctagtattggttttcaacagccacatcatggtacatgggctggagttgaccaaaaatattagatatcatcaaattggcagctttaaatagggctataaatcaacttcctttaacattgacctgtgccctgaaagtaactcatatcttgagacattaatattagtgcatgcatatagtaattcataaataaatatgtagatatatgttgggaaaatgagcttcagcatgtcttcttgtttttcttctccattatcaaaaaagcttactgacaaacttctttgagagaaatgaaagggaaattggctttggctgatagtgtgattgggaaagatcttaaaaagggccctcaaggtagagtagagttagaaaggagccttaagactaagtaaggatatcccaggcctggagacaagtacaaaaacaaaccaagtggcctggagttgtttgagaaggctctgggagcaaacataaaatatagttgtgaagcttatgtgatttttgatcctgtgtattaaatgccctaatkgtgtgaggaaagagactctgccttctaagagcagccatcaggtccttgagagctgcttgcctcyctgctgacttgacctcgttgagaatgcttggcatccctgtctccatggtatcaccatgcatgcctcctgctttccaaactccttcacctccagcccttagcagtggctgactcataggaaggtgcttgagtgttctttcctgaattctggatctgccttccccaaatgcacaagcatcagccatgccttccacattcaggaaggtttgatcaagccagcagggaggtgcaggtgaaggtgaacctcaggcagagctaggaagcctgaaaatctcctcagtcgtcctaacgtggagcttaaaagagtggattctatttcaaatcctaactgtgccattcartagctatatctttgggtctgtagctaaacctctgtggtgctcagattcctaatctataaaatgagaaggctaaatgtggctatcccagtacagctcttttgtgtgttaaatgagagaaggctcagaaagcactttgcacagggctttttctgtggaaagagcccagtaatattagtccttgatgtcattttaccattatacttgttaaagtctaaagttgttcagcgtttttctttacccttatcaaatgtcaytgtgagttaacagctcttgaaaaagtagaagcctggggtaatcatttcacaatgtttatgtatatcaaaatctcacagacgtaccttaaatatacacaatatgtatttgtatatattatacctttctaaaatattataccttgatacaattatacctcaatacagctgaaaaaattagaatttttttttttttttgagacagagtcttgctccgtcacccaggctggagtgcagtggcgtgatctcagctcactgcaacctccgcctcccgggttccagcgattctcctgcctcagcttcctgagtagctgggaytacaggcacmcaccaccatgcctggctaatttttgtatttttagtagagctggggtttcattatgttggtcaggctggtctggaactcctgacctcgtgattcgccygcctyggcctcccaaagtgctgggactgcaggcgtgagccaccrcaccgggccaaattatagaaaattttcataaaaaaaaaaggagaagtactttaaacatataacatgatcagttatctaaaacacaaagcctgtattaaatgcatacttattgattaatcttggagatttttctttcacctggccaagaaggtcattaaagactaaagcatgtttttggagggttacttacacttctcaccttttctgtaaaagagcgggcttttctctaatctcatttgatgcatgaaaatgtgtggccagaaactattaattgtgcttccatgtggcctgacagattccttcgaaagcaacaattgaaggaatattcaagttctctgtgacctcttctccctggccctcagagctgcaaataatgtgatcmttttacatcagtttrttaaacattagtcagcttgctgatttatttttaatcacattctgcatatttctaggcattaatctgatgtttattatgagaattgcacatttgtattattgggattctttattaaataaagaaaaacaatggtaggaaataaggcagattttatgtattaggagtatgataaagtaygcaggtgtgkgataaaccatgagcatgtgaattccccttaactttttaaaattggattttgatggtatttcaactggaagcacaggaggccttgtcctcctttagatgaccataaagtagtgtccaattgtggattaatttctcttccacctgttctcactatgttgtatcctgccatttctcaagagtagaagttaatggtagtcaccstagggatgttataaatctcactttaagactagtattagagataccacatgtgaccatttaaaaatgtttcacaaagaaaatcacaggatatttgccagtcactgcttttcctaaaaccgttctgttcataggaaaggaagtataattgggaagtgaaggaaatgctaaaaatatcccatattgaacatttttgaatttaaacagtttgtaagccattctctctctcaaatttggaaccaagtcaagaaatttcagaaaacatgaccctagcatcaattacatataaccttcagaaggcccccccatcataatggtaccttgaacaatgatgactctggtctcttctaacacccccatctcaccccgcactccgtgaatccaagaaagagaaagagagacacctttgtgcttccaggagtgacactgactcagcagtcttcttagaacaggcgccttctccttcctgctcttgcctacttactgttctcttttctgcaggtggaatatgtgatcaagtgtgacatgtcagctctgcagaagattctgtatcgccatatgcaagccaaggggatccttctcacagatggttctgagaaagataagaaggtacgttgcgaaagatgatgcaactcaaggtgctgtggtatgtcttctcatggctgtgacattgaatattcacaggaagcatccctgctaatgctgatttgttaaagtaaatcactggacctcctttgagctattatagctgccaaagataatctcttcacctcttagctgcattggggcaggaagaaagaaggaatatgttcatattaccaaaatagttagctctgcttatgtcaattttgcagcaaatatattctgcctaagtgtggggtggcattttagaaggttttaaaatccagtttcactccctgggcatctgttctgtgcttctgtgttccggagtcctacggaatagacagtcatgtcgcaaagccatatccctcactggacataatccttcaaggttcactttttttgtagcgtaagttaatcacaagaaagacattatgtctaactcaggaactgctatataattaaagaagctttgaaccacaaggtgtgtaggtgactgaaaaaacctatggtcctttgtcctttgtataagaagcccagtgtgaaggatctgaaatgtctgaccagttaataattaattctatttttccctttccactggttcttaggggaaaggaggtgctaagacacttatgaacactattatgcagttgagaaaaatctgcaaccacccatatatgtttcagcacattgaggtaagtctgtattgtgtgttttgagcctgattgtgctaatcatactaatgctagttaaaaaaaaacaaacaaacaggaaaaaaaaaaaccaaaatagatttaaaacatgttggyggaagttgagatgacatgatctgatagctcgacaagcagaattaacaaacatgagtattctggttatgggttctcattggcaccaagcatttgagcatctggaattttataaccaagagtttaaagtggagagaaaatgctataagcagtggctcacttgtgtgggtttgggtaartactgtgaattaccttgttatactgggagctctgaaattgaagataatgataaatacattcagcttcctcaaaagaatgccrtgaaaaatattaaaataatgtatttatgacttctaaagagaaagattttctttaaatattttctttgtaaaagacactggctttagtctgttactttgatttatatttttcctttcttgtttctgtcatgatgatgtaaatccaggctttcatcctgatgctcaggtctctagaaagctattttgcagggagaggacattttctgccatgttcactccatgtgaataagtttcctaaattgacagtgtttcaccccagtsggcacaattgactggagcaggaatgaaaaggagccacaattgtattccccatttgtcattgctgctgctgaggcaaatggtcctggtggcaattatttgccagggtagtgcctacttgctactgcaaaatgggcaggagacatagagaacatcactgcagggctccagtgtctgcaccaatttattttaaaaaatacatagaaacttctggaaagttaaaacttartcacagtataaaaattgagttggagcactcttcttttcgaatattcttttttgtcccttatttttggcagttgtacatgtcaggtcagagtattcatggcacaccatatccacatgtcagagttctttcctagctgtgctggataattggaaagatttctgacactgctattcaaggagtccataggagaaagtatccatagacactggggagtgtacccatagacataggagagagtgtgtgggcatagaggagaatatccatagacacaggggaaagtacctacatactggagtaaaatgacaacagcaacaacactttaaaaatctcatggctgggtgcagggggctcacccctgtaatttgggaggccgaggcaggaagatcacctgaggtcaggagttcgagaccagcctggccaacatggtgaaaccccgtctaaaactacaaaattacaaaactacaaaaattagctgggtgtcgtggcaggcacctgtaatcctagctattcaggaggcttaggaaagagaattgcttgaacccgggaggtggaggttgcagtgagccgagatcgcaccattgtactccagcctgagtgacaacagcgaaactcggtctcaaaaaaaaaaaaaaagtcacagttatttacatgtattgttgaaggggattgcaatggccaaaaatgagttcatatccaccaggtcactttgtaactgtgaactggggtaagtcactcagattcttcatgttgtaatgtgcttgatttgtaaacaggggtaataatagattatactactggcaggaggaccagcttttaaacaataacatgtgaagcatcttgtaaactgatgatgtgttatatcagatttaaggtaccaatgaattggtggtgggtgtatgttgggtttasaggagctgggagaaaagtctaatgatgaaactgtctgggattttcttagtctaacctgttacccactgtcccatttyttctgaaaacaattttaagacatgtatggtaatctatgggggcctttggggacttaggaattttgaagattaagcatcaatcttacttcgttttggttatcataaaagaaatgaccccttgagccatgctgggctaagtagggaaggaagggagatgatgccttctgtcctccagcttcagtttggagggtgggaaaggatagaggaggagggggaatcatgaaggaagcgaagttgaaggtkcatgcccttcagtacctacatattgacattttaagtagcagttggtagaaaggcagactctgatttgcaatttttttccctagaaacaagagatccacagttattggcaaatctattgacaactatggaacagagatggtgtgtgaatttgcctttgttgtgtttcgtttgccacacaccctttgttcatactaaatcctgccagatgctgagcctcaaaatgggtctcactgcctccctggggaccttaaactcaagaaatggaaacagtatttttaacatgatgctgttacctaatctccaacagcatccattgacccctctctttggttttgacaatcctgcttggagacagggatggagcctaatggagaccatgggtttggttctaggggatggagttgaggtattggccacagtccatcctgttaattttgccacagggctggagcctaccgtagatcatgagcatatttgagagtactgttgagcccagagggaaagatctggtccccttggaggaaaagctgcagggatccagggaggagggaaagcagaaaagggagacagccggtggctgatgtgaaggtgtaacctgctctccattcccacagatggttgccattcccataaagtcagaatggagaaatgcatggagaacagtcatttctcataaagtcagaatggagaaatgcgtggaaaacagtatttctttctgtgaatcagaaaggacggagttatgtgattacgttctgtattctgaaaacagaagctggacacttgaggggtgctgtacatctaggaccttatttgtaatggaggaaagcacagtatagaggagacattaggatttcacctaactggccaggtgtggtggctcatccaataagcctagcactttgggaggaaaaggcaagcaggtcacttgaggtaaagagttcaagaccagcctggccaatgtggcgaaaccctgtttctactaaaaatacagaaaattagccaggcatagtggcacatgctgtagtcccagctattcaggagtctgaggcaggagaatcgcttgaacctgggaggcagaggtttgcaatgagctgagactgcgccactgcactccagcctgggcaacagagtgagactctgtctcaaaaaaaaaaaaagaaaagatttcaccgaactaagaattataatatattatataatcacaattatttttattgctgaatttttccacaatacatattgtattagtccagtttgatgctgctgataaagacatacctgagactgggtaatttgtaaggaaaaagaggtttaatggactcacagttccacatggttggggaggcctcacagtcatggcagaaggtgaaaggaacgtcttacatggtggcagacaagagagaatgtgaggcaagtgaaaagggaaaccccttacaaagccacgagatctcgtgagacttattcacaaccatgagaacggcatgagggaaaccttcctcatgattcagttgtcgcccccagggtcccacccacaacacatgggaattataggagctataattcaagatgagatttgagtagggacacagccaaaccctatcacatatatttatatatacatattaattctgatttgcttgtttttgtgctcttctagtctagactctgtattccttgagttcagatccaccctagagggtggatctccagaaataactattggctccgctatgggccagtgggtgctcagtgactgtgtgatgrgtaaagtaaccctgttacctgagagtctagagactagaagaaactcacaggatacttttctgatggaacaaaagtctgcatgcaatatactgaatttctggttcattacgtrtgtaagttttttgcttattcattaattattttgttttaactatagaaataggtaggataacctcactaaaagagtaatcattaagttaataattacattttttaaaatcawtctttctatctctctcttttaaaggaatcctttgctgaacacctaggctattcaaatggggtcatcaatgggtaaatctcaaatttttttttcttttaaaaaaaaatgttgttggccttacataaactcctcctctctacagtgtttcctcttgtgcaaatacttacttccagccctctaagggctcttcagtggagaagttaaccaaaacggtatcagcattctcttttactttactggcataaattattacttgccttaagcaagtggctattcaaaggacatagatcttatttaatagacttaatagtatcctagtgttctaaaaatgttgttgaagcttcaaaggtttgttatttataaccaaaagtatagcttgggcttgaagagaatgtatcttattaaatttcacattgacatttgacattaatgtacatgagaagaaatctctcatctgctgtaaatgtttacagttttatagtcatttgttagagtgtggtctgtgtaagaaatgtttttcattagcaatggatgttaaagagaatcttgacttgcaacaacaaaaatgaacactgcattaacagaaagtgtgtgtgtgtgtgtgtgtgtgtgtgtgtgtggtgtgttgcaaatttgaaaaatttattattaggatgtagtcatcatttttggrtcccaagggcggacagtttcactgggctaagaaccaggaactatagcctatcctgaagcagtgctgctaagctttccctacctctccttgcctctctcttctctgggttctgtggttactcctgctcccatcagcttggccagggttgcatggtgaaaacacagctatagggtatttggagaacagttctcagagtggaggatggatgtcgggaagacatacgtttgaaaatgtgtctgttagaaataacatatcctgtgtcataaaatcaactaccagatgagacatttcagtactatagattacatgtgcactggcaagttttccaaacagtatcacctaaaattcggttttaattgtataacacagtcctgttgataaaagaaaaaaatgggtgaactgtagagggaaaaggccctgctttagcctttctccatatcacagcgtcttctgcatctcatactcccaacgtgtttttgacttgtacttgtatagtaatccaagactcttgtcctcccccagtccattcttacatgacgtccatagtgatcttataaaaaggtacgccagacctcatcactcccctgcctaaaacccattgatgacttttcattgcactgaaaatgaaaacgttcagtatagctcatagagccctaaagagtctgttcctagtcccatcctccacctctctgtcttcatctcccagtattctctcctcacttctgtttaagccatgctccctgttttttttttttttttaatttctcaaatccttctgtctcctttacccctcaggacctttatgcatgctctttcctctccctggaatctcctcctctccaccccagtgcccccgttcttcacctggatgcctttttactcattatttcaggttttagctaaaatgttatctcttcagggaggtcacctctgacactctaaaccagtggttggcaaactttttctgtaaagatccagattgtaaatattttcagctttgtgggccataaagtgtctgccacacctgctcagcgtagcctctgtaacatgaaagcagccagacaatagagatgagtgagtgtggctgtgttctgataaaaccttatttgtaaaaacagacagcagacggggccaaaggttgccaaactctgctccaatctaaagaaggcatcacatgttgctgtgagttttctcattggaacttgttattttaatagtatttattacagtttgtaattatccatttagtaaaatgagactctgttttgcttattattatatacatggctagcactgtgcttggtacatagtaggtgatcagtaagtatttagatgaatcttaagtgccctgaattaaaaatttaaaaagttatatactgaataaggagaaatttacagaaacatggcatatacgtgtgtgtgtacgtgtgtgtgtgtgtgtgtkagagagagagagagagagagagagggcgaggagaaagaataagttgagagaaagattgaaagtattaagaacatgmaagtggttccttttctttctagaacctgtcatcatacctagtatatgcaatgcacttttcatgggttttatatgaatatattttccttttctgctaaatattctcattgctttggagttcatattcattcattcattcatttcacagttacttattgaatgtttacagtgtacaaaggactatatgaaaagcaaagcaatgctggatttttyaagaagacagaagtaatactgtcttcttgtttttgcatttttttgggttcagggctgaactgtatcgggcctcagggaagtttgagctgcttgatcgtattctgccaaaattgagagcgactaatcaccgagtgctgcttttctgccagatgacatctctcatgaccatcatggaggattattttgcttttcggaacttcctttacctacgccttgatggtaagtgcataaggcattaggctcggaagccatastactgaaaatgaagggataatgggcacttaggtccaatctcagccaaaaagaaggggtaaaattgaagaattgactagaagcattgggagcagtttttctagatagcaattttttgcatccttaagctttaaataagctgacctcatttgtgcagctgcatagcccacaaataaaccaacacaaatgagtttagagtcacttttgagtacctaaataaaakaaaattaaactaaattaaaattttaaaatcttccttgctcttaaaattgttacctatgtgcsaaagatatagaatacattgacacacctttaactttttcagttaaggcatattttaaggggataaaggctatgtcacttttctttgtaacaatacaatcattcatttaagattatatttatcattaaagcccctctcttcctaaataagacgtatccacatgttacattgttaagagacatgacttcattgtttcctggattttgcaagctatgtaaaatatttgcctggttttaagagtgaaatttaaataccgtgtcctaaaaattagtaagaaaaaatattaatggaagcaaatatgattttagggataatccctaaattattttacgatttggatatcagccataatatattagaggttgaaagtatcagcatttatacacaatggaagggcataaatatggcattcaaagagtggtaagtaggaatagaagttaatttacagtcaggatgctatttaatccctgggtagaaaagaggatactgctaataccagtatttatctaatgcagtattactattgttaaatgggaaacttaaggtttatgtttcattaaaagactttattttcaatccaacattttgttttcctttttgccttaattgaacgtaattggatagataccaaactcagacttgccgtatgttctctgacttaaggttttaggtgaattctctttatggtctgcctcttagggtattgttaattaattttcaaattaattataccatttgacaaacttgatttttttttttattttattttgtttttattgagacagagtctcactctgtcacccaggctggaatgcagtggcatgatctcagcttactgcaacttctgccacccgggttcaggtgattctcctgcctcagcctcccgagtagctgggattacaggcatgtgccaccacgcccggctaattttttttttttgtattttttagtaaagatggggtttcaccatgttgcccaggctggtcttgaactcctgacctcaagtgatccacctgcctcggcctcccacagtgttgggattacaggcatgaaacttgattatttaaacccctttacctctcccctccaaattacgtaatgaatgaatggttacgtaaatgtcaatttttagttcacaaatacagtcctattaggcacagtttttctctgttggcaaatttcctttattgtctcttctcctttgactggatccctgcctccggaaagtggaaaattcggcactcttctttcaaaagacaaactgtcctttacctgctgctcaagtgaggggctgtggggttgtggggctgtattttcccctgaactgacagccccacacaggcgtcctgcgtaactatcacttgctactttgtggcatttcatttccaatctcaggtctctgacgactgcttctttggaatatttgcatctctcaaactggtaagaagtgacttcctggaaacaaattgctttcatgttttcttgtcagcctgagaggttctctttaatagtttattggctgctgtccttttgttagtaatagtcacaacagctaacatgtatggaacaccgctctgtgggactctgggccaagcatttcatgtgcattattaatttgattttctcaataaataagctactgttatccctgtcaaccagtgtgccattatgatgcccatttaaggatgagaaaacaaaggcatatggtgaaaccaggttctaacttggatctgtttgattccaaattagctcagttttagcagatccagagaggtataccccatctctgaaaatacaggcttcttctctagctacaacattttaagaatgattttgaacttatttaaaattttcaattgactaattgcaaaccaccatgcactagagatacaggatggatgaactattcactgttgctgctctcagagtccttaccattaggtggaaggagacagacaagcaaattgcctaacatgttacagatggaattgaaaaggcatctttccgtaagaaacagcagccgttccttttaagggtggacagaactaatggacaaacaatcaatatacacacagataagttagtacacacacttccagctgaacccccttctgtcccccatcccaccacccaattattaaaatgacttcagattttcattgctgaatttgatgtctcagattttgactttaggggaaaaaaaatcacttgatgagagctaagcagaaattttctgcaaagattatggttgcatgaatagatttagctaatactccatatagtttttgtttttactggaaatgatttttgagtgagagcaagtggtgaggttttatcccagaagacaacactttctaaaagcaggtgaaactaagttaaaattagtcatcatgaaagtctgacagtgtgttccttctggtaaattctgtaattttcaacacagttgccctattaattgtatgcttataattggttatgtatcaaagtctgaaagaccatgaaactgatgttagtattgagcacgttaaatcttgagccacttgcaaggagtgtctgcctttggatagactgttacatggtagtttgaatctccctgaacaatattaaaaattttgttaaatttaacaaaaaaaatttgttaaattaaaaaaatatttgttaaaaagattgctgatgatcagcaaagatcttgacttggaaatctttgacagaaagggttttctagcaaattgcaaaccttatgataagaaatgccatagctttgtatgaaaaatgacttaatcttttttgttttttataatttgtcaagttcccagctatttatacagtttatttaatttaattttattttattttattgagacggagtctcgctctgtcccccaggctggagtgcatctcggctccctgcaacctccgcctcctgggttcaagcaattcttgtgccccaccctcccaagtagctgggattacagatgtgtgccaccatgcccagctaacttttatatttttagtagagatggggttttaccatgttggccagggtgatctcgaacccctgacctcaggtgatccgcccaccttggcctcccaaagtgctgggattacaggtgtgagccaccatgcctggcctatacagtttaaatacacaccagatatatggttggcctgtttgcttgaggtatctgttatagggtctgaaaactcctttgaccaaataattttatttggatattccttttgtttttcagtgctttattttgcatgtaaggttatttcatctcagtaggcattggttgtatttatatcttatgttactggccagatccacgtctgttctgcccacgtgcagtaaatcaatcactgtgacacaggttttgcaaaagagaaaagatttattcacaagggcaccaagcataaagatggaagaacagccctcaactctacctccctgaagataaggtttagggatatttatggggtaaggaagtggggtggtgtaaggcacagggaaaggtgattggcagtggggaaaaatgaaatcacaggttcgttctacacaggcatagccagggttcatggcatttcctaggacatacatacaaaaaatggcagagtcagcatgatctgatggtggagtttttggctctccaacatcaaaaggccatctcttgggcacttgcgctcaggcccagtttaagggccagtggtgtcaacgggtttgaactggacagagctggccaaagttcctgaaaaacaactgaagtaaccattaccatggtgacgtatgcatgttatctgtaaagtagccagtgaaggtcaagtttgagcattcagcagcaagaccttcagctactgcagccttcagcttcatggaaaaagagaaaacaaaaataacaaaaagcaagaaaccagaagcatgcagggcaggcagacctgatgagattaactgttcggtttcattaatccgtgtgattatcagctggttcattttcagttaatcaaaactgttgaacttctatcctgagagtatagatgtatagttttgtacccagttttcagaaacacagatgccatgatctcttctttccccattttagaagaaatttttggtttctgtggcttttcattcagtttaaggcagaggagaaatatgtgaaccattaatacatgtaatttttaaaaaaattcttgtagctggaaagatgatagagaaggtttcacagcagaaatatcttccattagcgtcgtgaacagatagttcaccatgatctcagaaagccaattctgaaaataaaagaaaaaagagccccacatttgaaagctcactcatcaaagcatgtttagtgctcctcctccaaaatctaaactcggacagttgattgtgtcggacctcaccagttcactaaactcgaaacctaatgtagaaagtaaattgggtctaaagaatgtgactccatgtgactcaatgagagcccccagacccctcatttctaatccctgtttgctgtatgcagggaagtgatttgttttctccctcttcaggagggcatttgttatttttattaaatgtgaaaaacagatcgtccccatgtttgagaacttggccctcatagtaacttgatttcattagctatagtcacttaaatgtttyaatcctctgaaataaattgctggtatgttttcatccttaaaaaatgaacagcatgtaggaataatatttgaagagcagctggtcagagactgtcatgtaacatgcatacatatttcccaacagcctaaagccttctttcaaaattcagcatctaagcttttctggtgaaatatgttcagatggaatactggtgttttttttttctccccttccacaatgcatttcatgaaatggctgggtaaatacattacacatacataatatgtgattgagtggctcatctggaatgcaagaatgccccaaaagtgagcaccagactctgaggtttggtactgtctgcttattcactattttggagcctcttcagaccccatggggcaaascacccccaagtatttaacatgctgctctgtttagttggttttgatttagcatgctttgaactcaacagagcaggatgataacgtgagaaacagactaagagatttcttgtggggggggtggggattattgtggctttaagtcttgctaacaaggataaaattattccatttgcaaaaaaaaaattacattcataatttatgtttttaccaaccagaccatacttagtagtaatccaaatggtaaagtagtagaaaagaactttccttttttttctattttcttggcataaaaaaagtccttgctttaatgcctattggcaaagtttatttaagccattattacagttttaagtgcacgtgtgtgtgtgtgagagtgaaagagacagggcgagagaggaagtgtgtgtgttcttaaaattatttgttgttataaatcacagaaataaatccaaaaaatgttttcattgttttaggtgagagtaaggattttgtaaaatttgtgaagttgcgaagatgcctcattagaaatgtttaagctgtttctttctttttttttgtaattgcaaaatgttcaaagttttttatccagaagtacaaagccctggaaattacctcaccagtgttaggaggagtctgggtatatttcttgaaggaagcaagcctttttgtstcattctgtgccatttycagacaagagttaattggcaaattaatttttctgatcccctcaggcaccaccaagtctgaagatcgtgctgctttgctgaagaaattcaatgaacctggatcccagtatttcattttcttgctgagcacaagagctggtggcctgggcttaaatcttcaggcagctgatacagtggtcatctttgacagcgactggaatcctcatcaggtctgcatgtcccactcaggtgyccaggcctccctctggagagcaactaaaagatgatcagtttcattattcacatttacaggacagagcaaatatctaaacgagtgggctgttgctttcttggagccaattcttctggctgttttcttatctcccttagagcrtagatacgaggtcccacatatgcctttgaagagctgaagtttgaggtagaaaaacttagtttctccttagttttaatcccatctcttgggattgccattgaacaaagtatatttaatgagggataagtcaaaaatgttgcaaaatcatagcagtaagaacaayagcaaccatcattcatgggamccttaatctgtgtcagcctcttgggcattttttcattcagttttacgacaaccctgtcagacggttaatatgatttgaatctttgcagtcaaggaaactgaatcctaggcagggtaagtaacttccccaaggccaaatagtattacagtagttaaccttttattttgtgttttatttaaagtcatcatcaaaacatattctaatgagcatttattgttgtaaagctcttttagccaggtaagttcagggctatccttttaaagcagtactttgatgttttgtttttttttttttaaattgagcgggtctctcatggcactggttttctaagttactctgggaggtgaggcatctgcctgtaggatattgggtagggtgatattggtcaagatttgattcatactggagcaaatgttgaattcaaaacagtaaaaatgaagagcaggtgtggtggctcatgcctgtaatcccaggactttgggaggttgaggcaggaggattgctttgagcccaggaatttgagaccagcctgggcaacatggtgaaaccctgtctctacaaaaaaatacaaaaattagctgggcacagtggcmcktrtacctgtagtcccaagttcctcagcaggctgaggtgggaggattgtttgagtctgggaggcagaggctatagtgagccatgatcgtaccaccgctctccagcccgggcgacaaagcaagaccgtgtctcaaaaaaaaaaaaaaaaaaagaaaagcaaaaagaaaatggcaactctcacgtaggagtatgaattctacatcagcttttcctaggctcctcgttgagccctggttttctcaacagtaacactatctcactgggttgcgaagactgagtggcagtgccatatagcgtcacttttggcaggaaatcacattcaggggtacattaaaattctaagggagcttttaaaaaatatgcatgcctgctttctgttccctgccacygcaccccagttttcttattcggtggagctaggtgcttcctttgagcgctcccaggagattctgaaatagattctcatacagatgaggagcactgatttaaagactcaactgtgggcccaaaccaccaacactgggccactgcgtgtacttaccattctctgtaggtgaataaattaaagcgamtattaaaattttctgatcttgaaaaggattgggagccaccagcacagaatatattagttctaagtcttcaggaaatatggttacgtatttttataaatacataaaagtgtttcattccaaggctcaggtagaattcatattgatgtgagagatctgcagtttttctttttagcattatggattcagtatttgttccacaaacatttattgagtgtctgttatgcagcaggcastgagctaggctgggtatctaagggggaggaaggaagacgtgatgtgactcctctcctcctggtgtgctcaatgtgattggatgtttagattatccttgctggtacctaagttttgaggacgatctataggtgaatggagagtttgcttgtattctgtcttcggaggtaagcatttccactgactcttagatgtttaccttcactggcacagtatacagtataaatcctaaaagccactgttccaggaaatgctaatttaacatggaaaataactctgggacatctgtatgatgttccaccccaccccgcctctcatttttttttttcgtactttctctctagctctgttaaaaactttgaactctagaatcaaagtaaattgcagtaacatgaaatagtcccctcttaactacatgggaactaaagctttggcagcaaaacacaggatcccagattttctctggtggaatttacaacaggttcctcacactgggcctctgcaagtatttctagctgccataggtagattcacttccacctgattgaataaactgagctgaccagatttttcatctgtcactgaacaggaccattagtttggtcaaatttttctttttcaggaatcagtgattttatagtgataaagatccatctgagttttcatttaaaaggtacagaactctactaaatattgttaggcactttgcatacctcacctcaagtaatcgtcaaaatatcttctacataaggaaaccagtcaatgttagcttgctcatgaacaccccaccaggatcattcacacccatgtctgtttaggtttcagtttgaatactgggtttgagctctttctaccttgcacccttgcatatagattgtatagcccccaaaatgaaaattgtgaaggtctttgtatcaggttaattttagcatgcattgaagaaaaatttctataagtatgcattatcatgttgaatcaaaattaaggcacattggtgaaaataggggatttgacataggttgacagatagaggccttaatgttgctgattgaggaccctacctagaagcaaagatagaactcgtgattgtggaattaacaaaaaaaaatcccaccaggttgccaagactctcatttccaaactgttggttagaaacatgggttggtactcgtgttttttacccacggagctgcagctgtgttgctattacggaatggtcgaccacatttagcttgcagaccctcttctcagaccaggctcttagcttcaagtattatcagacctaagtcagtgtgatgaagtttcagaccaccgaagtgagacttcagaaacatggagtaatccatccaataattacagcacttctttgtcacaatattccccccacattttggcttagrgactcaagctcacatttcgttaaacttctccagtctagaaatattagcttttgtgaccttccaattagatgggtgatctgaaacacacaaacacacatcactgctaccaccaccaaacgaaacttaactgcagcaaattcccaaggattctgtaatgtctgaccgtgttcctatgttgtccatgtgccctgcttcctcacctgttctattcatattctgctgccccctgcaattagtatttttgtggttttgtcagcatcttcttggacaagggtcagcaatctactactcgcgggctcggtctgacctgccccttgtttttgcacccccacaggtgaagaatggttttcactttttaaagtataaattagaaaatggtggggaaaaagagtatcagccttctggtgagaacagttgttcaatttttgcttctgggccagacagcatagaacgtttactatygcgcccattttagagactgttggcctctgttccaggagatagtgaaaagcctcatgacacagaccttgtcatcttgactgctgttagcaggtctggtgaagatatgtggagagggacggttgaactaaaagcttaaaaaggaactttagggtgttttaragttctttgtcccctttggatttgaatgatccaccttacattctcctctttagaaaataatctaatatagatgggtcccagctgttttcatggcttagcactatgatatttatattaacttattcaaatatctgctgaggaagaagttttgcctaattggctacttaattttaaaggtccctgcagcaaaaacaaatctccagggcagccttttgtctgctgccttcttgtgctacaacaggtgaccaggagacttgtctggtcaagaagacgggtttacagctgttgagcatcagctctctgcaaaytatggtgccagggatgtgggatacagaaaacagacttttgccctaaaaatctatacagtctaatgggagacatgtgtaaacaactaattagcatcagctcagataacatcacctggaccacaatgaataaaagccacatgccaagaagtttttattacgtagctrtaaaattaggtaattctgtttcatgggctcatgaaggtttttatttaaamatttcatgaaagcttttttcttattattaatatatgagtaacatttaaagcagaaaaaaagcaaaatgtaagcaaagtgaagaaagtgaaataacacctataatcttatcacctggagatttacgttgttggcatgttggtgtttgtcctcctacctttttctttatatagataaatttgcacatgtaagatcagaatgcacatggttctttttaacttgttttcacttatgtcattaaatctcctacaatataatttttatgatactttgttgatacatacatatagtaggatactataattcatttaactaattcagtattgttgaatgtttcttttttwaaaaaaaaagccattagagagagtaaattattctgagaaggtacatccttatttctaaatctttgtgcatatctatgattatttgtttaggatacatttccgaagtaatatttctaagtcggagacatagacagttttaacacttctaataggtagtgacaaatttctgtccccaaaagttyaccagttgactacccaactagcaatccttttgatttcccarattgaagaccgagtctttgataaggttaggttcgaggaaattgactacctgagcagtcagtgtgtgtgtatgtgtgtgtgtggtaagatgtatgtatgtataatacctgaatgtacaactcagtgatatttttaaaataatcttcaacacatcacgccaaagaaaaggcgtttcttgcaacttaaggttagttgtaggtgttatgtaagtcataattctgacattggacattggtgtcttgtttaatgttttagatatggactaaatctgatggggaacctagagacagataaaamcaatatgatacctggatttcaaaacctgagatgtatttcagttggcttggttaatttcaacccaggtttcttcaactaggaatgacactgaatttttccaaacgtagcttgtgtgtttttaaaatgtaggcaaaatcttaccttagtgaaggtgaaatacagaacccttccatatttccctctggggtggggtccggttttggatgcctatgccaggcatctcagtcctcatagcatattgaccccccaaacaggatctgcaggcccaagaccgagctcaccgcatcgggcagcagaacgaggtccgggtactgaggctctgtaccgtgaacagcgtggaggaaaagatcctcgcggccgcaaaatacaagctgaacgtggatcagaaagtgatccaggcgggcatgtttgaccaaaagtcttcaagccacgagcggagggcattcctgcaggccatcttgkagcatgargaggaaaatgaggtattagagaaaaccccaagtttatgaaatcaaacagtggccttttgtctctgaaggactcagaataatccctttgtttaaaaaacttcctgggctggcgttaatgaaaatgaagaaataaactgctgttttagatcccaaccacagaaagcctgtgaaagttatccaaaatgagtgtcttaagagctatggctggaggaacctcaaggcttggcctgtgggtgctccctcctttttcccagggtggtaaaaccagctgctttattgaaccatcagtgctgccttctgtagggcagatgcagaactgcagaggatactttagggacaaaatcagccggacgagacaagacataaatggaaggggtcctctttctctcatcctccagagccctctctctcttttgccttttgatcagggatcacagagcttcaacatgtttgtaggacaaaccttcacagccatcttccgcacatttagctatacttgctcttggcaagcatgaccttaacctctactttaaatttttctttaagagctgtctgaaggttgggaaaaattctggttaaacagcctttatttgtcagggttgtatgaagaatgctttgattaggtttttattaggggaatgttgagttgtcatttgtattatttttagattgccaacrttagtaattttataaatattcattccaaaatggatttgaagtagatttttaaacgtatgtatatagtgtagcaaactacagaatatcagcagaagtccttatcataaaactggctgaacatattttttgtgtgtgcccatacttacaaattgaagagtaagtctaccttacatattcatgtggaatactgttttcattgcatatattagatataatttgatttttgccttaaataggatatgtgtttttgcattcttctataaattatgaacctgagtcttttaaaagtcttataaacaaatactcctcaacttacaatggtgttacatcccgacaaacccatcataaattgaaaatatcaggacatggccccatcttaagtctagtggagtactgaatgtgcatcccttctgcaccattataaagtcgaaaaatcctaagtccagccgttgttaagccagagactgtctgtatattttttttttctaaaatgaatctaaatgtgaagtaaagcttgatatttaaaggtatcctgaaatgaacccatttgcaaattgaagagcacttttgtattatgcctcctaatttgtccgtcttatatttttgattagctatccactgagtttcatgaaaatgataaaaaatacatatgcacatgcactcactatccacacacatttgaaaaatttttatctcaaattatttatagtttctgattctagaaattgaatatttgatacagatatggagtcaaattgtcaggtgatttttttgttgtttatacacttggacatttccaaaaaaacaatatggcgaatgatctatcctgtgacaaagcagatatgagcagagctgacactcagccagtcgtctccactacatttttgcttatttgttttgtgtaggccttgtgaaaatagtacctgatctggttgagaatcaaggaagcctggagttttccagccttcctaagccgcagggagttgctgatctcccctgggcccgagggctgccaggtggggcctgacgtgcactcccctcccagttgtcctgccatcaaggctagctgtgagcagccttgctgaggctcctgtcccttcttggctgccagtgtgtcagaaaaatgttgccgttttcaggggggcttgtgtcctgatgtaaagatgtttgaaaacactgagagactgcagtcaaagactctggttctgaaagatcaggacaacataggctggcatcaccatggttgatgcgaccatgaagtgctggggcagagaacccaggaagatgcattgtgcacttccagctatttggttttccatgaaggtcataaacaggcactttacaagagaatcttttcatcttgggcatggggttgtctgagcccctcatggtccaggtgatgagagggtaatgtgtggttctaggaagaaagtaggcgaagcgggacatctgttcaccagaggagacattaccagatattttgtactgtgaagtctgaacccactcccagctagtctgtgtccttgtcagatgaaatgtaatatttagacaaattgactttaatcaatctggaggcaaactagaatagaaggtttttcagaaataattattatcttgaattgtagatttttttactttattggattgcattcatttctaacacttattaagttcctgcagtgcgaaagacgttatcttgggagccgacacagtcatctcatttgagccgctagtacactcatactctttctctaaaacaagttgcctctttttgaatatacagtttgtgaaattggatgtctgaagttctgtgttttcctctttcttccctcgactgatacactgaaattccccgtttgatttctaacaagcccactcagcatatgataaaaataatttgggaagataaatcctgaagcatatgccgaacttttagaatcattttttaagtgtggaagtcatcctataacattgctaaaaatcctgagaactgttggtttctgaggaattagcagagagataatgtacctttgtttgacgtaatataaaatgaaaattttagcccatatgtaattgctttctctgcttcatttaaattattttaattaagtataattttgaggttttttttgttactgatacctttttagttatcccatccatagctccaatcattaacaataatacccatagaaatatattaagcacacttcaaaggctatatatttggcacatatatgtgatttttattgtcttagtgcctagtaacaaggtttcacatacttatgtcttttgtaaggatttgaaaataagcatttatatttggcataaggtaaatggaattaaaagaattaatgttaggtactttttcatatggatgtccttattaaaatcttacatccccatgtgaaatagatgtcatacccatatgaccaatgaggtcactgaagcgaggagacattaagtaacttgttgtaaaagtaacagaatcaagatacacatccaggagaactcatatttcttatagtggaccacagtttcctccctgaacggattttgctctgggaagatggttttaatagcttgtaaaatagtaacgtcaaggactaaatccagcaaccccttcccttttctttctgccttgagaaatgggacccctctggtctggaggacagatcacttacttgtttgtaccttgccccagctgtccactggttaaaatcactctgtttttaaccccaggaagaagatgaagtaccggacgatgagactctgaaccaaatgattgctcgacgagaagaagaatttgacctttttatggtaatgttacagaaaatcatgaacacaaatgctttatacctctgcccctttttctgttaagcagaatgtctgsagcctgcgtgcctggcagaacttcatacgtaaagcctaygcctttccttcagttcagaggctgcaaactggctggagttagcctgcagacatattttgtttggcccacgcagcgttttttaaaatttcccattcattgccaacataaaaaagaatcctgatttctggcttctcttgaaaaatgagatcgggcagtaccaggcccacatctttgtgtggaaacagttggccagggctgagtagcagctgcactctctggacaggcctcgcggtctacagcttaccatagacgccctcctgttcccagttcgtttctaatcccaggccagtgtcattcaggaagcctacctggctcctataggcattggaacttacaacagtgcccttacaggatcaaagcaacatgctccttagggagataggtggacaacagctaaaacaacacacaggtgtgccttttcagattgttgacgagagcccgcttaaatgaatgggaaccttcaaggtgtgcataaaggtgtagccttcatttaaggatcaaaatcagttggatttccctccagtatcttcaatcattttcatcttcatcaaagactgattacagagagagtaaatataaaccacaactttggtggttgaatgctgcagaaccctaaagttagaggtcccaaatttgagtgccatcagatcttacatgagtaatttgcatgtgtgaagcaagtgggcagaggtaggtgtactggagatgctttgtctatggggggacagagctgcaaggtagaaatgtgagacctatgtcgccagaaatgacaaattttcaaggggagcttgaagtctaggtgtttatatgtgatctctagattttaaaacactgcaactaaatccaactttttaagttattatataacactgcatgccaaacaaaacacaactgtgggccaaatatgatccacagggtttgcaatctccacctttttagcctagacagaatggaactcyacctgtttggagaggcttatgttattttggggttttgtgtgtgtggcttttttctgggaacattgattgtatataatgatccacaataaaattttctttctcaggaaaattcaggtagctgtgggaataactactaaactggaatatgcacttccctttctccctccgtccccgaaatgaaccacccttcccaagtaaagctatttcagagaggaatgrtagtaagaaagacttaacagcatggtcaatgtagggcattcataaattctagatttcttaactcacactggtcagcataatcaaagattacaatattctctatttagggaggttaaagatacccatcagaaatagacatcccctctgtccttgaagaactaattaaaaggcagattactggggaacacccaagcaagagaccctcagctgatcactgttaggcaataattcagcactgctaaagccgcagatactctcaagacactggagaggacaagctgcttgccattatacaaatwagattaggcccagaaatggagaattctttcagcagccctgaagtaagggggtgagtgtactttcctgccttacttttgggctatttgtagaaattgaaaacctcagaaacaatctgaatatcttggaaggcacagccttcttttaatttgggactattttaccactcaaagaacagggttgtaacacaggtgaggctggctagggaacactttttgtaggcactttgattttgtgaattttctgctggtttcttaaaggctggcttctattttgaggattagacagattttaggtttggtttagtttcttctaatccaccggccgcctttggccaattcactattccttagcacctccacttgggggcaggaaataaaatttgaatctctgccagctacagattaaaaagtttggtgagaaacaagaatggaatgtgagctagaataaatctttggattttaaatatttaaactctttatccattattagaaaagaatgagttctctataaaattaatgcaaacttattatttcattttgtatcatagacactggtttacacatgataagcagatagtttatttaaaataacgtcttttaaaaaaagcatgtcttgctttctctttctaaaaatgtaacttcagaaaaagtatcttttataccaattacttaggaattttaccaaaaagatctttggcagctcaagataagtatctgagacattttgctaacatacaaacattaagcttttagatgctatgttctctacaaagggaaaaagcacttttaaaactaattgtacttgtaagcataaggtttataatcagatctcaagaccaattattcacaaagtaactaaatagtaagtttgacttttgccataatgttgaattaattatattggtattttgtgggtagaaatctctagggagagatgcagttattaagactttaagcttatcttatgtaatcgaatctacctttcctaaaagaaaaaagaaacaagtgcataatttacttttctatcagaaaagatttattttctcaattgtggacaaatatattagcaagaataatgtccatagaaatgtattgattaaacatacctcaaagactatttttttgctgtagataatagtagcagtaaaaccaaagattgaaatggcagtattttgtcatctcagtataggacattaacaaaattttttttttcttattagctctctaataactattaggaggttgcctcacgaagcccctctttagaactgctgtaaagaaggcaacctctgtgtgccagttatgaaggtttggtggatccatttctcataccaaaacattagaagacaggattaagcatygtgagctaatyatagcacatgacagagcaaggtggccacatttatcaaccaatgggacttcacctgtctcccaagcctaccagattctggaaatgtaatgacttccaaaaatgtggaagaagtataaagagctttgaccactaattttaaaataggttctagaggtcatatttgggtttgcgtagatatttcatttacattttatcagttttagcttttaagaaaacataatattgaatcccaatttcagtatggtagaaccaaaggaagaaggaaaaggtaaataacaatgaytgatggtccatttcattgtggaaatgacacatctcgctagtgtttatacataatgtctgtggatatatagtggcagtttattttttaaaaatccatcgtattgtttagttatagattaaagccaagtgtgtggcccttagtttatttacaagtgaactggattattaaaaagagagaaggtggggaagtaggcattttgaaggctctgaaaggaatccatttcacttacaactagatcagttgggatgcgattacctctgagctctctctgtctgtggtataatatattcataagagcacaaagcttaaaatgtaaagaattgaagagcattcctcagacagtgcccatgaggtattgaaaagttagtatattcatggccaatggaccagtgaaaccatttatgtctcttccacatgtccaactgtgggtagctattctgtactgataccttgggtcccccttttttttttattgctgattgtttagttcaaagcacaagccctattgaataaaaggaaactttcttaaagatctttcttttctttactcaaagaataagtttcttccagggaagcaatgagttgtatagccaagaggtcatatttttaaaatgcattcccaatttgaatttttccactattactttaaagagggagctttgcatacacacagactaagaaaaggaaattctttaaaagtactttttaaatgtatgaataagtttcaaaaggtgggtacagaaaaagggargggattttacttaatggaatctctccctagatatttagggatgagctagaacaagccaaccaggatgagagaggttgaaagggaccctgcagccataggaagtgactyggggaagttgtgtagtgctggraagtctgcaccatacagaagccctgactttcggtgaccctcttattaatgtctccagcggatggacatggaccggcggagggaagatgcccggaacccgaaacggaagccccgtttaatggaggaggatgagctgccytcctggatcattaaggatgacgctgaagtagaaaggctcacctgtgaagaagaggaggagaaaatatttgggagggggtcccgccagcgccgtgacgtggactacagtgacgccctcacggagaagcagtggctaagggtaagcctagcttttctaacccgctctcactaggtggagggtttttggtggcttggagaaaccaggggcctagagctgggattttctgaggaggttgagttcgcaatcaaagggaaggggctcttgaacacagaagataaagtcattctgctgttgcataaagtcattgtgctgttgcatgaaaagataaaggcgttctgcayttcaaggcggtgcttggaaaaaaatatgcaggattttttgctagagcagaattggccattggaagcacaggattatgagagctgtgagacccactaatgttttatgaccaattgcctggtcatgcctcactctctccaactgagaatcaaaatgtggaagggcaccttagagatctttgtaattgttccccctcatttcatggtctttaatcgaggttttacttctgcaaggtctgcacagatctttcagggatagcagagttttctaactgtgtggttattttgtagacccatagtacttttagagctggaaggtacctttgtacttgcttggtttgatgaagaaactgaggcccagagaggtgacatggctatgcaggacacacagctggttagaaagcacagaatcggtgggtgcttatgtgtctrcatgctcgatttcsgcttgatctgatctgtccatcacaaacacagattagagcctgggactcgggtcaccgatgcttggaaatgttattcgggagtttgtttatgttgtttttcctttggaaaatggtgatttctcattttgattgaggactgaaatctcagaacgttccttgggcagcacagaaatatcaaaatgctcttaggagtcgcgtgtgtgaacactgaggcccgggtgactgttccattcgaagggttagctctacttcccatttttgggagtagacttagtacctagaaaggcacagcaacctgggacgtgcattccagacacagccagtaaatgcatgctggaaatagtaagtgtagttgggtaaaaaccaagcaaaacaaaagctttggggagttgttcgttttatccaaggggagtacagttcccaagctttgtgaaacatggattttaggacccaggttttaagtaggtagatgggtagaaaggcagtgggcagaattttgagattagataccaaaggcraacaggtcttgtcaccgcttgagatgtgatttactcaggatgttgtatgatgagagggacgtgacctgaattttgaaaagatgggagcctgtgattctgaaaagcactgctcattatttgtggttgaacmgttgtgtataaaatagaacatttgtgtgattagtttgtcgtatccagtcaaatattccagtgacctcagaatatgattctgtgaattttctttgtttcactattgagattatagttatgtaattaggattcattctgtaatatgaagagttttttggctaatatatatttctgagcttgggaaaattttatttaagcaataaattgagtacctggagtattattacagcagacgggacaataataatctgggccaaccttttttttttttttttttgagacagagtctctctctgtcactgaggctatagtgcaatggtgtggtctcagctcagtgcaacctctgcctaccgggttcaagggattctcctgcttcagcctccccagtagctgggattacaggcgcataccaccatgcccggctaatttttatatttttagtagagacggggtttcaccatgttggtcaggctggtctcaaactcctgagctcgggtgatccacctgccttggcctcccaaagtgctgggattacaggcgtgagccaccgtgcctggctgggcgaaatttttaaagctaagctttgatatgtttactctccagacattaaaagcaaaataaccttgtttattgggcaagaatgtagctgaacttaacttcttaaaaataatcattgggaattgccctgaagaaaaacaacattatgaatctcaggaagttttccagtttaagatatctgttttgttttctctttttcattcagtttctatccctgatgagtagcacagtgcctagcatagagactcagtgaatgtttgtgaaaatgaaastacagccttaagaggaaagggaaagtgactaacttatcagcagtgttaggagagcatttctctttttagygcatctagtaaacttccttttatctacaacatgcacatttaaaaatggaaaattagtttgttttacaaaactgcactgtgaaaattggtttttataattgtaattctraaatgccatgcaacatactaagtcatccaagaaggacgaaactgttctcaaaacagctttattgtaacgtatctttttgtaatctaatcttttgaaaactgcatgcccgtatttggtatgaaactggcaacttgttattaatcaggacatgcaatggatgcaacatgccccakggcctaagcattcaaagtagatgcttcctgtctttggtgttcaccagcagcaatcctatttaatatcagcctgttaagcttttttgatgatgaaatgatattgaaggggttctcatgggcctggatgtgaagagatgttctctactggcttatgatttaacacattgcatgaacccagccaacatggccttgaaagggagtttggcaaggaccgtcgtgtaagaaatgctgtaacagggctaaaataattcttctttttcctggcaatgttgtacaaagcctgcttggcagagacatccaagatgcatagcatcgcagagctgcaaggcagttgaatggaacagcttcccatcccttgcttaaatcacattctctgcaatctctgtgccaggaggctggccacccctagaaggaaaaactacctttttgtctgtgtagcccctccagttcgtggtcagctctgattaatagttcttcctccctttgaatagaatcttctttccttgtagcttctcctcagaggccttgattcttttccctggggtgaagagaacaatatttttttctgtctttagtatcacagccccatggataaaatgtttgcaaactcatgttcagtctggattgaacttttctaccttcctctttctcttgaactttcctcctccttcaaggcccaattcagttgctacccactctgtggcaccttcacagataaatattaattgcacttttaattgtcctcttaacatttctttgcttgtccttcagtcacagtttcctagtattctcggtagttgccaacctgcctgctttcctgactagttgataagctggctctgtatcttgttagaatttaggacttctgtgtacaaatactaagtgcccatcagttgccaaattaaagtagcactggattgacagataagggtatagatagatgtgggtaatgttcactgctgccacagatggacctcaacatgccctgtccatggacctatccagaaaaataaacagaagttgatttctcccttccctgaaagtccatggtaggtatacctgattggtgaggacagctgttctccatagggtcattcagggctccaggctgacagagcctctgccggcttggtcatctccatccacttgagctggaagtggggaaaacaacatggagtagtgggtatggaagtctaatgggccctgcctaaatggttataattccattggctagaacttggttatgtggccactccagctgcaaargagatggaaatgtggtctggctgtgagcccaggaaaacaaaattttggtgaatatttagccatccctgcctcagcacacttaggttaaatttaagtgttatggtcactttctttgccartggtgttttggtttcattgaagacaggttttattttgtaatcatggcatgctaaaaattcctacagtgtcctttagagaatctgttyagttggtggaatttagaatttttttctgcattcataatgttgtttttaatcaggaggatcacaatttcaaacacagttcagtttttttttaaaggtattttacattgttttgaaattcctatttccactgaggaaacttagatgtccttagtgttagctggtctcaagttaacgtcatctttttgtggtagtcagttcaacattcacattctgggctgtttctctcttccccgggggctcccatcccatcctcctctccaagatggcatctggataaagaygtggtgtttaagcatggcattgggggcgagcatcctggttctcttgctccccatgggtctccactgatctcagcatatagctgctggtctgctcctttcctgggaggtctttacatgcagctggtttcatctcattcttttagagaccttgatgacatgtgctgttgaaatctggagcctggccacaggcactagttagaagctgtcctgcattctcacatctcataagaccsctggcctctttggcctcatggtgctcttagctcttttgtgttctgtttggaagtctgcaaactctccttgactgatttctccacactgtgctagaagatgcagggtgcagtgaaactggccccttcctcagcagttgctaagtcagcaccaggggttgtcaaacctgaagcttctagaatctgatggttgggtgggtcctggagctttttaaagaaagcaattcaaaaatgtcttaagtttgcaaattgtataaaagtatgtaactgtatttgggatcacatagtgagggatcctcccagagctttggaaggagcttgtgagtgagaggcctaaagcctaagcttcattagctttccaataaatccacctttagcagttttagtgcctcattatcttcctttccactcartctctgcctccaaacaccccaggcttggattctgaagggggwgtattgcatttcaacccagctgcaattcagtgctggcacaaactagccagacttagcacagactccataagttaaagkgcatagtccccaacaacactgccctgacttcagacaccagccacactttgggggtcccgaggccccccacacttttgactgactacaaattcaggggctcgtgaaccctttaggcttgataatttgctagaacaactcacagaactcaggmaagtgccattagcaacggattcrgattsattatgaagtatacaaatcaagagaactaggccaggcactgtggctcatgcctgtaatcccagcagtttgggagggygaggcgggtggaacatgaggtcaggagatcgagaccatcctggctaacacggtgaaaccccatctctactaaaaatacaaaaaattagccgggcgtggtggcacgtgcctgtagtcccagctgctygggaggctgaggcaggggaatcgcttgaacccgggaggcagaggttacaktgagccgagatcgtgccattgcactcctgcctgggcgacacagcgagactccatctcgaaaaaaggggactagccaaatgaatggaagcacagcatgcagtctgggaggaaacctgggctcctctgcctgctcctcgtggagtcagcgtccatcagtcctccagctcatcagtgtgttcactaaccagggagtgctactgggccttgatgtccagagttttcaatggggtttcacaatgtataggcatgattgattagattgtcggccacatgcttgaactcattccccagcctctctgccctccctggaggtcagactggctcacatccccaaccctgtagtcatgtggttggtctttctggtgaccagtgcccactggagctgtttaggggcctatcacacatgacacttcattatcagaacaaagttactcctgtcactacggagatgtcaaacatagaaactccatgtcaggaacccaggacaaagaccagacaaattcttttttttgaggcaggatctcactctgttatctaggctggagtatagtggtgtaatcttggctcacagcagccttgacctcccagactcaagcaatcctcctacctcagcctcctgagtacctaggactacaggtacatgccaccatgcccggctaattattgtacgttttgtagagtcggggttttgccccatttgccaggctggtcttgaactcctgagctcaagtgatccacctgcttccgtctcccaaagtgttgagattacaggcatgagccaccatgcccagcctgacagattctttattatataataggtagtaatatattcaatcctgaccttacttctcttcctcttgactcctgtttcctccatggaagaaggctctcctccttgccttcctgttacgtggcaacttcctgttcccgagtgatagcaccatgtgctgtggcttcttgtgccattctgagaatcccggtcctcggccttgtcgtggccgagtggttaaggcgatagatgagaatcccagtccgctaggtttggctcttgatcgtaaaggtggtgaagggaattcactaccctattttggaagtcaaagatgttgtcatttttgtctctgcataccaactttatcctaattctgctcaaggcaatgagtaactctcccgaacaagggatggttcttttagaaagtgtgaaagagaatattaacatggttaacaaatattccatccattacagttttgtaactttcctatggtgtgtgcccaaggtgataacagtgctatattacagattacatatatatatatttgcatgcgcaattatacatatacatacatacatacatatatatatacacacacatatatatatgtataattgcgcatgcacaagaaatggcccatcttgataatttcttggaaacatatatttgcttctttatatgtaagagcaggcattccrtctacctaaattctgacaagcccagtgggccasggttttccggtttaatgtcagccctgtgtacactggctgtgctgtttctagcaccrtaaggcagtcatcattattgagccaggggctgtgcaaaattggggtgattgcagagccaaaaagcgggctggagggtggtttctggaatgcctgttttactattcttcctgttcctttgctctttctgccaacttcagaatccttcctttccttaaaacatttagtgatatccctgaatttatttaattgctacgtgagtgatttttgccccacagcactggaagataattggaatgcattctagcttatgtgctctggataatatgcaattaccagccagctggagagtagtatgcctttgtctcacaatgtcttgtaattttaaaaagtttctcctatttgctgttgtctcttgttacctttcttacggcatcatatatctactatggggtccttatgtctgaatgtgtagacacttcttttggtatactgaataagctcctggcgatgagggaagacaccgctttgttttgtgatgtcctgtgcagttgggccccagtaaacgctacggaaatgatggtgatgagacttatttctttagatctttaaattgggcgatagataacagcaagttttagaagccatagaatttcaagaggaactttgcagaaagacrgaacaccctccttttccttgaccagtctgtcaccaggtgacagcctgagcttcccatggtgaacgtgcctaaatggggttcccatcatcatgtctgctgactactaaaataattttggggttttcttcttcccaaagtttaacaaagtagaaaaaacaaaatgaggccgggtgcggtggctcacgcctgtaatcccagcactttgggaggtcgaggccagcatggcgaaaccccgtctctactaaaaatgcaaaaattagctgggcgtggtggcgggtgcctgtaatcccagctactcgggaggctgaggcaggagaatcacttgaacctggaggtggagcccgcagtgagccaagatcacaccactgcactgcagcctggcgacagagcaaaactccatctcaaaaaaaaaaaaaaaggaaaaaaaaatgacatttataatactaggtgctaatcagtaaggtaaaatgtgatacatctcaagagaatttagtgtctttaaaaagctatgtaataccaagctgcaataagctctctgagttggcctctcatcacaggaagccaaactgctaaactctacacaggaaaaggcagacaaatccatggtgaattagtcacaaaaaactggggaaaatacgaagaaaggttaaagaacaagacatttgaaattctatggaaatacacaatgataaataaaatatttcctcacaggtgtaaagaggtgggctgtggatttttctctgcctagagatcttgcaagcaagctaatgcctcctctgggctgcattaagtatgatccagcctgaaatcacagacaggggcttgaatcactcagctctgtttctcctgacagcattagtgattctcgtagatgtacttttcccctaaaatattttattttacactggcaagatttttttgtggggggggatcctttttctaaagcataatgtgcatcatgtttgtaatatttggctgcatttgttttgtcatttaaaatcttttcttgctttttctgtaagatgtgagaagctttgtaaacatggacccttttttcttttatcaaatggcattttaacttttaaaattgggtcatcagatttactggggcaaaattttctagcaagctgcatttccgtttttatacacaagggagagctaaggccctagaaaatagatttgggttttgccaaattccaagtccttcaatactttagggtggaagtactgaactaattaagagyggtaacagttgtgaattgtttggaaaaatacttgatagtaataaaataattttaagaactttgtataatttttatttttttctgaaatccagtgactagattgctttaacagcccattggacttaacatttcccattttatataattcgggagaataaatttaatagaatagtcctcagaggtctgacggaaatatactaaaataaataataaaggttgaggagtgagagggaattgttttgatttttaaaastttgatgcttggaatttctggtcttgagttatgtcctctgaaatcaggattcagctctgaaatcaaactcactcatcgaaagtaaccatgggaaactgaatttggcctacagatactaaggagccccaataatttcacattatcttttaatggagcaractattacagagaaatcagagaaataatattttaggaatttgtattatattttagaaataatattttaggaatatgtctatctgaatcaagatttggtttttgacgttttctgcttttttactttatttttttaagagacagggtctcactctgtcacccaggcttactgcagcctcaaactcctcggctcaagcagtcttcctgcctcagccttttgagtagctgagactacgggtacgcaccgccacacccagctaatttttgtatttttttgtacagacaggatgtcactcaattgcctaggctggtcttgaactcctgcccctaagtgatcctcctgcctcagccctgcaaagtgttgtggttacaggaatgagccaccgcgcctggccagtttttgttttgtttagtttttttaatcaataaggctacatgtttcagtcagtgtcaggatttaaaaaaaaaaaaaaagtctacatgaagaaaatcttcattaattttcttaataaagaaatgtaattattcattaagaggtggaggtggggaagagtacagtttaggaagcagagacagggcagggtggcctcatcatcattatgcctcagggttcgggtgagcatcagaaaaataactgtgacttttgatggctctctatatggagaatttaggatagtgattaagagtacatgccttgaaatctgatgaaccaagaggttcagattccggttccatctaattagctstgtgaccttggggaccttgtgtcacctctcatagctttgctttcctctcagggaaaatcatagaacctacttgatagggtattctgagaattaaaggygkgtaacatagaatctggcatataagaaggactcagaaatacgtattagctattaagaaaaagtttccaattatttcgaagaagacctaatggataatagaaaaagaagaaaatacgttctcttttgtgtcttgatgacaagactcggggtgacaagagaaaggtaaaattgggaatcaagaagctcctttcgcttactcactaatggaattaaaagagaacaatatgtttacttgctgaatatgttacaggaccacaggtttattcatctcaagcactccagcttgtactcattcagccattaastctctttaccctggtttttacctaggtgcacaccaacccaaactcgctcggccattaactctctttaccctggttttctccctagctgtacaccaacctatactcacttggttattaactctctttcccctgactttctacctagccgcctgccaacctatacccacatggctattaactgtctttactctggttgtctctgtaaccctgcatgcctgcaggaaraacaatggggctagcagtcaggagcctggaatgtgagttctgacgctgctaccagataaatatgtgatcttggacaggtctcctgaccttcctgggttgttatggactgatgtttatgtccctgcaaaatggatatgttgaaatcctaacccccaatgtgatattaggaggtgggccctttggaaggttattatatcatgagagccctcatgaatggaattagtactcttataaaggggaccctagagagccccctrggtctttctacaacaggaggtcagcaatctgcaagctgtaagagggctctcacagaatccaatcatgctataccctatcctcagacttccagcctccgaaactgagaaataagtgtatgttatttataagctatattagggttatccacagaaacagaaccaatgggatatgtggagccatgtataagaggagatatattatgggccttgactcgtgcaagaaatcccatgagatgccacctgcaagttggagacccaggaaagccaatggtataattgagtccaagtctgaaggactgagaaccagagcagggaccactgctggtataaatcctggattacgaagacctgagaactaggagctccagtgtctgagggcaggagaagatggatgacacagctcaagaaaagaaggaattcccctttcctttgcctttttgttcaagtccagccctcaatggattggatgattcctacctatgtgggtgagggtgaatcttctttactcagtatgtagattaaaatgcaaatctcttccagaaacaaccttacagacacatcacaaaataatattttaccaactatctgggcatcccttagcccagtcaagttgacacccaaaattaaccatcacatcagtcacccagttaatggtattttgttatggcagcctgaactaagacatgcgttgagttatattatctttaatttgcaggatcccttccatctatctaacagtaacctctaaagtcacctgaagcagctattatggagtacagtggtgcaatcttggctcactgcaacctctgcctcctgggttcaagcaattatcctacttcagcctcccaagtagctgggattaaaggtgtgtgccacaatgcctggctacttctttgtatttttagtagagatggggtttcgccatgttggtcagcctggtcttgaactcctgacctcaggtgatctgcctgccttggcctcccaaagtgctgggattacaggtgtgagccacagcacccagcaacttttactttttttttgagacagagttttgctctgtcgcccaggttggagtgcaatggtgcaatcttggctcattgctacctcygcctcccaggttcaagtaattcttctgcctccgtctcccgagtagctgggactacaggcgagtgccaccacgcccggctaatttttgtgtttttagtagacatggggtttcaccatattgaccaggctggtctcgaactcctgatctcgtgatccgcctgcctcagcctcccaaagtgctgagattacaggcatgagccatcgtgcctggcaacttttactttttattgtggtttttaataataattatcccctgcttctttttttttttttttttttaagatacagtttcaatctgttgccccggctggagtgcagtggcacgatcttggctcactgcaacctgcgcttctcgggttcaaacagttcttgtgcctcagcctcccgagtagctgggattacaggcacgtgccaccacccctggctaatttttatattattggtagagacggggttttgccatgttggccaatctggtctcgaactcctgacctcaagtgatctgcccacctcagcctcccaaaatgctgggattacaggcrtgaacactgtgcctggcctattccctgctttctcatcttacataaatgtactgtgagtacatttatggagactgttgaaaagcaaattcaattcaacatccatttgtcaaacattgattaggttgagcaacacactgtgattggcctggggaaagcagtattgtttggattccttacagtcatggcagacccaccttattagtgcaattaggagccaggtttgagagagactattaatagaggtaatattgcacagttagccaccttgaagagcttgtcaagagcaggtctccaagtagacacagatggaaattgatagagattaaaataaaccatgagatgctctgacttktaggggtttaagctgttcaggaaatcagagtttaaacaacacatattttacttaatgctagaattttagtgtcattcctctggatgttatttgcaattttcccttccaccatcctcaaactcccagaggaggaaagggccactgcctctttggccaagcagtctggcctccagacacagcaggcaactgggtttatcttcctggctactgctaggagactcaagccttcttaacaccgccagtgctcgtgtggtttctaccaaccctacttggcccaaaatgaaaaaaatgtacagcacggcccattcattcacctttgagaaaagaaagattcagggctttaggtgccaaagtaataaggatctggagtgtgtaacatttgcagatttttggcattttggaggatacctttcctccttgttcacaacagttcaggtggctacccagagaggtcagtgggaacttaccaaaaatcggccctgatgaccactcctgcatcaggttctccagtggccttccattgtaagtgtwattaaatctaaacacttgaacatggtctataaggccacaatcaccaggcctttgcctggtgctggattcccacctccttgccttcatctctgggtggctgctccactgaactctccttctagtccttggcacttctagaagtctttctcccagatcttcatgtggctgtctcctccttgtcccaatgatctccttccagagagacccttcctggccaacctagctgaaatagatagcccctggcaacaagtcatatcacctatgttaactttcttcatggcatttgccactatctaaaagttatcttactgttcctctccactggtataaagctccgagaaagccagggcctttgcctgtcttcttgactgctrtgtcctggtacctgcagcaggactttatgcgtggtaagcactctttaaatagstgtggataagtgaatatactaggcagaaatgagggctaggagggatttggttgcagccccatatccttttggcaaagacagtagaatcatgtttttgtaactaagatgagtcaaggtagaaattgtcattctctcctgttagattccagtgatctgtgacttcatgtaaagatttcttaaaataattctaaaggcacacatttttgatgtaacagtgcttttgagctttaagaatttgaggcctccattctaatttcagaacatattaatgaagatttaaatatgcattaaaaagtacaagcattgcttcaacccagctatttctcagaaattctcattgattttataacagctgtcttctagcttgagccttctaatttcttcagcaaaaaacaacaacaacaacaaaaaaaaaacagataaatacatctaacttaaaattaagacaaaaagtattaattggatttttagttttgtgtgttttccgtatttaaaatgtgatgctatatgccttttagatggcttcccttcttttatgttaaagaatgaattgtcagaatcatggaaaattgtggatgacaccatgaccctttccttgaggcaaaacttgattcttgttctgtcactcctattgaaataagtatttaaggtcactatgctcttaggaaagcatattcctaacatatcatgctgttttgaagaatatctttcccttggacctttgtagaacctttttccaaagattattttaaatatcatcctcaaaagttgagctttaccaaggcttcccatagtccgttcttctcttccacagctgcctctgataacttatgaaagatgggctcaggtgtcagatgatcagggttctgcttgcagatttgtcactgatttgctctgcaacatcttggataaatcactttacgtctcagagcttcagtttccctgtctctacattggagtcatgaaatggggawaggggtagggaagagagcaccatctctcctgctctgtcattctccagctttgcctttggcggccctagaaagaaccatgtgggtttgccttggcctggctccatctccgagaactcagctcttaggaactgaaactcagaggggtgtgggtgagagatttttctccctgttcttagccggagtttctttcaaaaatgcaggcttgacaactaagggttccctagcatatctgtagcttagtaactggtcaaatgtgtagagcttttggggactcacctgtagcatctgaagagttgagatgagtcytgtrtgctgacaggatgtgatggacaggacaccaacatggtggagtcagtaaagggagcacctgcttgccacaggggtttactgtaatcacccaacaggtcttccttctggctgcacaaagccaggccactgagaccgtggcattgcggtaaagaaagagtttaattgacgtgaggccagccacaccatgtgggagatggagttagtactcaaatcagtctcccctaagacttgtaggtttgggtttttcaaggattgtctggtgggcaggggggtagagaatggggaatgctgattggttkgggatgcagttatagaagtgtggaaaatggtcctcatgtgctaagttagcctctgggttggggagccacaagactggtcgagtcaccaacactggtgtgatattgtgaagtccagcacgctagagtgtcaacattccaggaagatcactaaaatgaacatttgttctgcaagagaattaataagtccagcataggggttactggtatatatttttatttgctgccattttatctgatgattgactgttttgttctatttttctccatttttataatcactacccccaatatagtcgctactccaggtggagtcagctggtcgtcagaaatgcagaagtctgaaaagacatctcaagacaccaatcttaggttctacgatagtaatattgtctacaggagtaactggggaagtcacaaatcttgtaacatcagggaaaaatacctggttattgtttcacttacatacatcttagcagaattcaggcccctctcataatcctaacctgtgggctttcattagttttacaaaggttgtttagttttgggaagggctattatcatccttgcatgaaggttaaactacaaactaaatttctcccaaagttagcttgacctattcccaggaatgactaaggacagcttggcagtcagaagcaaaatggagtcaactatgtcagatttctcttactgtcgtaatttgcaaaggcggttttgctactttccttgcaaattagttggggacttcagcagttctgcatagaccaagaccaagagttttctagtactctcatcaagaagtcacctactctggtcccattttaaatcccctgcatactgtctagaagaatatataacagatgctaacaggatccaatttgttcattgaaatatatcaagttttctccaaattttcaagaccatattcatttgcatttaattttaaaatatcaatacactgatgtcatggtatatcatttgaaggcacagggaaggatattgtgaagtccagcagactaccgtgtcagcattccagggagatcaccaaaatgaacatttgttctcaaagagaattaataagcccagcataggggttcactggtatatatttttatttgccaccattgtatctgatgattgactgttctgttctgtctttctgcatttttgtaatcacaacccccaaacgcctgaagctttgggtttttatgtaaactgtaaagtagaatttatttggaaccagttccctgtcataaaagctaatgaaaaatacagaagagtgaagaaagaaactagaatcacctataatctcattgaccttcaggtatccaaggttggagaaggagccaagaaaaatcatggacagagttattttggtgccattacattcagaattatttttaacctgttgtgaggctcagctcttttgtagtagcttcagtaaatcctaacccatgatgcacaccgagcccctgcccgttagtggtaatgtgcatgtctttccatttggttgaggacaccttgctgtactgggcacttggtgccagaggacttttttttttaagggccattaagggatacatggagacctgcattctcacactggcgcagtgatttttgcttcctctctgaaccggcctttggtatttcacaggctgaacccttctctttttaagtgacctgtcacctctcatgtagtcaatgctttcttactgccaccaagttggcaagtgtcatgccattcctctccccaggggagagaattcttaatccaaatttattcccataggattttcaggacttttcctgagccaaattagaccctttctctcagttatctactatctcctcctttccctgtattggccagtgctagactggaagctataaatagacagcaccttttaattcctttaaagatttggagtaggtattatttctcccattctgcaggtgaggaactaagcctcacaggtagggagtatggtttttggatttcgcatttagttaatgacaggtgtatttgtttagtgaatgttgaatgtagagttttaccttctttcatatattgaagatgcacatctatgcaagtctgtgcataatgtaatggcacaaggtaatggcaccaatggcatcctataaattttatttaatagcctgtagcattgaacgtcttcaagccttttaactctcaaagctaaaataagaagattgtgtagttactagttaaaataaaggcagtttaaagaggtggggctggagtagggcaaactgagaacaaagatcttcattttgccccatttctctggcctatttttattcactatgtagttgtgtggccctcccttgagcagtaatcatccaagccatctatgcaagtctgtgcatagatgtgcctcttcaatatgttaaaaaaaactataggactatgggagtttagtgaaagtcaatcacattttggtttacagcccctttgcccactgagctgatctcctggcttgtgaattctggcctcttcttgaaaaggtgcaggagcgcgtcagatcagcaacaggtggtctagctggcccggggaggacttacgcagaattgaagacagcctcctgggggsaggtgatgagacctgcccgtgaaggctgttaacctggctgctcctacagtaggggccccttagtggacttccttctgccaagcagttaggacctacaggttagtttccctctccttggttgtctctgtttctcgagaaggtagggcccttagctccatcagtcaagttgcagatgctctacctttgggctagtgggtgttggtcttcactgctcctcgtcttgggtgacactggacaatcttttttactttgtcaaaagacaaaatgacatcaaatttaaagtttttaattggcttttcctgttctagaatcagacaacgtcaagcaaaggaagttggcttaatagaaagggtagaggaaagcagaaatagaacaaaaagcatattggttgtttcaaagttaattttccttttaaaggttaaagcagagggaacttccttatgcttgcttaaactggcctgtttggggatttggtattctctctctctctcctgatttctcagaaggtcagataaacagcttggtttcagtggtgtgtaacttcagcaagggtgattccattttggtttggcctgttgagtctagtgcaggaggtcagtccaaaccaatggcctcctataaatgttatttaatagcctgtagagttgaacgtcttcaagccgtttaactctcaaagctaaaataagaagattgtgtagttactagttaaaataaaggcagtttaaagaggtgaggctggagtagggcaaactgagaacaaagatcttcattttgccccatttctctggcttatttttattcactgtgtagttgtgtggtcctcccttgagcagtaatcatccaagccagttgttagaacgcgtttccctagcaagctctgtcatcctgagaaagcagaggggtaaacaataaagacttaattgtatctcaccaacatttttgggtcccattggtgagtaaggcatcaatttaagtgcctttggaagcaattttgattaaaatgattttttttaagttcttaaacagatttcgggatgataggagattcggacatattttaaaacaaaagaaacttatacaagcagaattaaacaacctggataaaagtacctgtaatgtattgtgctagtacaggggaaggagggaactgcgtaggatgttataaaagaaatggtattttagccttttcttaaaagatgaggatgctttgggtaggaaagagggatcaggagagttccaggccaagggaagyatacgaaggcttggaaatacgtgacccctgcttactgtgactgtgtgtttggracagagtttttaacagcagtagatgtggggaggaaaaatgaggctagggccagaccctggaggctatgcatgaccaaagaatctgggctttattctatttcayagaaagagttcaaagcctgagcgtatttgaaatgagagaatgaatgatgtgtccctctgtttaagcagagagaagataccatttgcattgaaaaagattaattgaagaggtsaaagaaagggcagggaaaacccataagggaggccatttaaatgtgaccctgtgrgagaggagacccgtctgwcagcagggagaccagggggaaaagattgcttatgaactatttcagaggtaaactatatgatgacaaataggactgcagggatgtgataagggaaactgatcattttaaagatttccaggagagataactgggaaatgatgctacctttagatgagacggacaggatccacaaagagaaatatttgcttggttgaaggaaaagtgataaacttgatttgtgatgtttggtaggacagtggaattcccaattggtgactccaaaaagaagcgcaggctagagagataatttttgaagccatatgcattgaggttgtaggggccaagggagaacttccccctttcccctctgaaggttcgttgagaatcaactgacaaaggcagattaataggagaaaagacatacaaaatgttaacaggcatagcacggggaactcacaggaggatgattacccaataacctagtgcaatacagaatcgtacatacccttttcataggggagccrggagatggggggggatgtaggcatttcttttgagggggcagtcaatcattagaggaaatgaatggacagaagttaacttggaaatgatttttttcttgaaatttgaatgagcccaagaggcaggtattatcttgtgaaggagtcttctcagatgtggttgcattcctcagtcttcttttctgagataatgaaatttcagggaggagagggaaacagttgtgtttctgttggcgacccctgcgtactgtgactgttaaactttcttggccagatgaggaaattccagagcaagtccgttcttgtgtcctgcgctggatgggggtgggacaagaccaggttagaaggacctcgattctgaggcagcttctaaggcctctaagcatgtcaaggcaccagtctttggggtatcactttctgagtcccgacaaggtcatgtttgaagccatagaggcaagtaggatccccatggcagattttacacccaggaggagggcttagattcctctcaggagcctcccatcagtagttaggagctgctcagaaagcactcaccatatggaggattggagtctatgatctaggctgctcagcaggagtccacaaaagagccccgtctccaggatcagtaaaattaacagccttcctgaattatggcttatgtcccctccaggggggcagtagtgaagttctctagcagcgaggcctccagaggtcattaagagactcacctgttgctgatcacaactcatctcacctgttgctgatcacaactcatctcacctgttgctgctgaggacatccagacttagtggtgcctggtgtgtactcagaaagggtaattgcccacatttgactgcatattcacaatctgtgaatgaaaaaaaagccaaaagaaaagttggggaatctgcatttaaggagagaaaaatgtggctagtaaacttagagaaacgcgctggttatggtggctcatgcctgtaatcccagcattttgggaggcctaggcggacggatcacttgaggtcaggagttcgaaaccagtctggccaaaatggtgaaacccatctctactaacaatacaaaaattagccgggcatggtggtgcatgtctgtagtctctctgagctacttgggaggctgaggcaagagaatcatccaaactcgggaggcggaggttgcagtgagccgagactgcaacactgcacttcagcctgggtgacagagtgaagactcttgtctcaaaaaaaaaaaaaaaaaaaaaaaaagagagagaaacccaaacactatagaaaggagagatattttaagtaaggagcaatggaggagaaagtaaataaaagagtttagacaagactaagatgtgggaattagaaagcttttggcaatttttttaaaattattaatgtccttctgggtgccaaggaattttattgtgtggtcaggcggtagaatcatccgtaaaggtgaccctagacacctgacagtaaaggggaggtgaggaatgggtgaagtagggaagatgcagagagtttgatgctagagtttatcctttagtacttgaagattgacattaaaatacctagaacaaatacatttggacttagtgttccataaatggatatatatctaagagcagttttcccagggaaccctatctaaaagttgaattcgttctcaactgtttttacagtatctagtttccctccctcattactgtgctatgtactctaggggaattgagaaaaacgaaggcattatctttgtaagaagaaaaaatcaagatgatctggcacacctggaggggtagtggaatgggagttgatcactgaacatgtatgcaatgtgcataggcacaggggattgggaaagacatcccaggcgagaagtaagagtaatcacaaaggtgggaataaatatggcatgctacagtgtggcatgggctttgtgttcctattatttgcagaatgttcgcatagctgggtgtcttagtctgggatgctataccaaaataccatagattggtttataagcagttctagaagctgggaagtccaagatcaaggcaccagcagattccatgtctggtgattctgtttcctggttcatagacagtgcctttttgctgtgtcctcacatggtagaagggacatgggagctctttggggtcttttttaataagggcactattcccaatcatgacctaatcacctcccaaaggccccacctcctaataccatcaccttgtgggctaggatttcaagacaggaattctgggaggacacaatcatttagtccacagcaataagaaatatgcgaaatcaggatgggtaggatcagatcatagagatctctagattctgttaccggatcccaccacttactcaaagttagcctttggatcgggggtttcctaggtattgtggctttgtggtcaccagaaagatgttgctgaaaaggggtccggatccagatcccaagagagggttcttgaatcttgcacaagaaagaatttgaggcaaatccatacagtaaagagaaagcaagtttattaggaaagtaaagggataaagaatggctactccataggcagagcagcttcgagggctgctgyttgcccatttttgtggtggttttttgatgatatgctaaataaagagtggatttttcatgcctcccctttttagaccacatagggtaacttcctgatgttgccatggcatttgtaaactgtcatggctctggtgggagtgtagcagtgagggccaccagaggtcactctcatcaccatcttggttttggtgggttttggctggcttctgtactgcaagctgttttatcagcaaggtctttatgacctgtatcttgtgctgacctcccatctcatcctgtgactgacaatgccttaactgtctgagaatgcagcccagtaggtttcagctttattttacatagcccctattcaagatggagttgctctgcttcaaacatctctgacagttccatacaggcaggcttggaattgatagactgaggakaatttaagaaactgagtagtgcagtagctcatgacagaagtgtttaagatctgagcaataggatacagctcataactatttagaaaaagtacagaatcgagctattaagtattattacagggaaaaaatgtactgagtgaccaaaaaaaaaaaaaaaaaagcaaggtactatgaccttctttatgacccccattccaaaaagatggaagagcagatgccttcttaaataatcagaaccagtggtgcattggtcaacgaaaacattcattagggtgagaaaataatatgtcacttatatgtacatgtaatttttaattaaaagcatatatctgtttgccacatctttcattgtaaggctgagattgcctctttgagtaaactggctagaacacataaatcacacataatctttctcacagaaataacacctataatgtttcacttaggatttccagttttggtgttctgggcgtggtggctcacgcctgtaatcctagcactttgggaggccaaggcgggagtatcagctgaggtcaggagttcgagaccagcctggccaacacggcaaaaccctgtctctactaaaaatacgaaaattagcggggcgtggtgggcgggcacttgtaatcccagctacttgggaggctgaggcagggaaaattgcttgaacccgggaggcagaggttgcagtgagctgagttcgcaccattgcactccagcctgggtgacagagccagactccgtctcaaaaaaaaaaagtagggcctcacccaggctgtagtgcagtggcatgatcacagctcattgcagcctccctcaaactcctggccttgagtgattcttgcacctcagcctcccagagtgctgggattacaggtgtgagccactatacccagccatgaatgagaatcctaatattaacaaagcatgctgagtttacacttgcctcccagttgtaacagtctagccctcaccaaattcaacagcatttctgttgctgctgctgtttttaaagaaactcacctttttggagtcttgtattgttcatgctctttatagaactaagaacccaatttcttctcacagttacattatattcatttatgtaagtamtatctaattgaattaatgtagctccagtaataagtataactaacatcaacatgtttgggaacacagctgatcattggtatttgagccaaatggcaagagcagagtggcctagacaaggaaggtctgtgcagtaggcagagtcataagtagtggtcagttgagtgagcctcttaatttccttcagatttattgactatcagttgtataccctctaaaattttctctagatactccatttctggaacacattttaggagatgttttcttttttttattattattttattattattatactttaagttttagggtacatgtgcacaatgtgcaggtttgttacatatctatacatgtgccatgttggtgtgctgcacccattaactcgtcatttarcattaggtataaggagatgttttctttcttttttctgagacacacgcacatgccaccacacccaactaatttttttattttttgtagagacagagttttgccatgttgcctaggctggtctctaactcatggcctctagtaatcctcctgcctcagcctcccaaagcactgagattacaagtgtgagccacggtgcccagcttgttttctatagatcttgccattgcccattagagcactttgtgtttgtctctcctgcgcaaatccttgactgtgcttcagttgacctggtctcctggtgtctccttctctgccaccaactcttcatgttgatttcagccatgtattaccagcaaaacggctagtcctggcttggaataccaaaaagctatggaagccatgcagggccagaatatagctaagtgtgtttattagtaaaacctgcctgtattagtcygttttcacactgctgataaagacatacctgagactgggaagaaaaggaggtttaattggacttacagttccacatggctggggaggcctcagaatcatggcaggaggcaaaaggcacttcttacatggtggcggcaagaraaaatgagagagatgcaaaagtggaaacccctggctgggtgtggtggctcacacctgtaatccaagcactttgggaggctgaggcaggtggatcacctgaggtcaggagttcaagaccagcctggccagcatggtgaaaccccatctctacaaaaatataaaaaaaattagccaggcatgatggtgggtgcccgtaatccaagctactcaggaggctgaggcaggagaattgcttgaacccgggaagcagaggttgcagtgagccacgaacatgccattgcactccagcctgggcgacagagtgagactcctcaaaaaaacaacaacgaaaaaggaaacctcttataaaactatcaaatcttgtaagatttattcactaccatgagaacagtgtgagggaaaccgctcccatgattcaaattatctcccaccgggtccttcgcacaacatgtgggaattatgggagtacaattcaagatgagatttgggtggggacacagagccaaaccgtatcactggccatgttcacctttgttcttatttttttgcgctttagagattcattttaaagtttattggatagcaaattgtctttgccacatatatgtagctcttagctaaccaaaactcaaaattttgtttggcattttagctttattaaataaagtgggatagacatacttgacaaataaccttttatatacttagcaacagcatacagactagatctgaaatgagtgtacatttcaagttggcttctcaaatttaactagaaccagacactcctctactgacactctaataatatgtgtatgtgcatctatgtgtatttatgtatgtgtacatacatgtatgtgagtacatgcgtctgtatctattgctaaccaaatacttgtgtgtgagtgcaaggaattagaacctccctgggaagagctagtcatctccttcacacagtatactttttgcatatctcctgttggcctctgcttattcatggcttctactcataacatccctagcataatgctaccttatgacctatattcaacttctactgccataccaactggacatgttctttcacacctgcagctcaaattcttaataraagtgaactgactggctcagccaatcactctggctgtgcttgtgcagagaccctcatgccaggccccacacaagcttagagacagggtactctgagaacaggggaccattcccatctccatcaggtgagactaggacagatagcagctgcctgatrcagaaratggcagcgcaggcagcagatgctgtgggtggggcagtttcccttagattataggatggcaggaaagataaagcctgccatcgtttactccgaggggtgtgttatatgtgcctacgagcagcgttgctttgcaccattccatatgtacacattcccatcactggatatagttaaacaccagtccctcartgacaaattttagttaccctatgtaatagtttgctaggactaccattataaaataccacagattggtggtttaaacaacagagatttattatctcactgtgtggaggctggaagtctgagatcaaggtgtcagcaggtttggtttcttctgagacttctccccttggcttgtaaatggctacctccttggtgtatgtatncggggttgttcctctatgtgcatctgtgtcttagcagccttttcttagaaagacagcagtcatataggcctagggccattttaactctttaaaagccctatctcaaaatacagtcacaatctaaagtcttggggattaggacctcaacgtatgaattttagagggatgcagttcagcccataacactatagtatagcaattsygagtcactgcacataaaacacagactttggggctaacttcacaaatcactatgtacatgacacatgtacattttgatcaataactaatcatatcacttctcagaatctggtggtgatttgttagcgagygtctgttcagttcatgcacagacagcaaagtatgtagctgtgttgctgccttctttctcagtgaaaacatgacatttaaaaaaatagttcatcaggagagggaattggccaccaaagatgaaagtgctgcaaagaaacaggtagtagtaatgaaggaagtgaaatttgttgtgatgagatgtgaaaatggcaacaggataacgaagacagtacaagacccaggccagcatgaagctacagtacgaaccagattgaggctgggcacagtggctcatgccygtaatcccaacactttgggaggatgaggcaggtggatcacctgaggccacgaatttgagaccagcctggtcaacacagtgaaaccccgtctttactaaaaatacaaaaaaattggctgggcccagtggtgcmtgcctgtaatcccagctattgggaggctgagacatgagaatctcttgaacccaggaggtggaggttgcagtgagccaagattgtaccactgcattccagcctgggtgacagagcaagacttcgtatcaaaaataaaaaataaatgaattaaaaaatatgtaaaccacactgaaaatgtccaatgaatataaaaaaaacacagtaaagtcatctcaatatattttaatttaaattgcgctaggaacagaaaaccacttatgattgaaattgagtattttactttagttggaagaccataatgatttttaaaaatcctgcttagtttgactagtattcaggccaaagtgtttaaaaatcctgcttagtgtgactagtattcaggccaaagaagttagtttctgaattaaaagaaaatggtaattacatggagactataggaggacttttgactgccagtaaagactggtttcattgtctcagaagtcaccatgaactgatgaatgttaaatrgtctgatgacaccactagtgtaaatmaggatgcttccgtgaaatttcaccccgaatcccaagatggaggcaggtttatgatgatcctggaatatttcatgctgatgagatagatcttttggaagacaaccctatcaagaacttaagtgaagaaaggctgggtgccatggctcatgcctgtaatcccagcactttgggtggccggggcaggtggatcacctgaggtcaagagagtttgagaccagtctggccaacaygatgaaagcccatctttactgaaaatacaagattagccaggtgtggtggctcatggctcatgcctgtaatcccagctacttggaaggctgaagcagaattgaacctgggaggcagaggctgcagtgagctgagattgtaccgctgcactccagcctgggcaacagagcgagactccatctcaaaaatttaaaaaataaggtcgggtgcattggctcacacctgtaatcccagcrctttgggaggctgaggtgggcggatcacctgaggtcagaagttcaggaccagcctggccaacatggcaaaaccccatctctactaaaaatataaaaattagccaggcgtggtggtgcacacctttagtcccaggtgcttgagagtcttaggcaggagaatcacttgaacctgggaggcggaggtttcagtgagccaagatcacgccactgcactccagcctgggcaacagagggagcaagactgtctcaaaaaataaaaataaaagaatttataaaaaataaaaataatttatgtgaagaaagatgtaggatcacaaagtggccatacaggagagattctagatattcagctagggaaaatggtaaaggtgaacttacccacataaatgagggatgtggctatcaagaaaacgatgaagatgacccagaggaagtgataatggcaaaaacaaacaaacaaacaaaaaaacaaagtcacagtaaaggaactcagctaattcacgacatggaaatggcaaaggataaaatgttggaagccaacccaaatttaggagtatggcagttttccaaggcatagaaaagacgtgtattctatatcgtaagttatttgacaaggagaagaaaagcactgttcaaagtgccctcgataggccagatgtgattgcttgctcctgtaatcccaacactttgggaggccaaagcaggaagatcgcttgcgcccaggagttcaagacaagtgtaagcaacatagcctgaccctgtgtctacaaaaaagaaaatmgccaggcatggtggtgtgcgcctgtagtcccagctctcaggagggtgaggtgggaggattgcttgagcccacaaggttgaggctgtagtgagctgtgattgattacaccactgcactccagcctgggtaacagaatgaggccccgtctagaataaagcaaagcaaagcaaaatactctggatagagtttttttaatagggaaatgaaacattttaatgctcaatgtttttaatattttaaattactgtactaagcaaatgcttattttactagttttttccttcccctctacatgtatgagtttttaatgtttagacataaattttttaaagttgtggaacagtaatcccattgactattaaaatgacttgtgcactttgaacttgcatggttacttttatggttccacacgtctatgcaaagctgtgtgtgtgtgtgtgtgagagagagagatctttgctggaagtgtgtttatctgtgtgtgatatttgctgaaagtcttcctaagatgtatcatgttatgtttttacttgaattattcacctaagcctggcaagtataacttagccttttcctgatggtgcagtcatcattaataataagttattgttttctgctataacgtagaataatctggtagttaagggtgtggtttatgcagccagactttgagttcaaatactgagtcatcttcttactatgatatgatctggaacaagatgctatatctctctgtgcctcagtttcctcatctgcaaaatgcagagagtaagagtggctacctttttagggttattgtgaggtttaaatgactaaatgtacccaaagcactgagtggctgtcaacacagcaaacgtgttagccaatgttgctgctgctgctggcagggacaatggtggtagtagtagtagctgcatcagtagtagtagaagtattaatgatgctgtgtatctgaagatttattaaaagttggggctatttttttctatattagacagcctcaaactactatgcttttgatttcttctgttgctttatttacgtgttttcctctctcatgattgggctgttaatggacattctttgcattggactcaagcagaacaactacctcattctcatcagtatcttattaatttgatgttcttaaccacgatgggtgtagtgaccttctgaaagtctgacttgttgcagtagcgtggaaccctggattgtggctcagttcctcatggacggcctatcccagggaagcccaggaaagaaccatttattttgctcaggcctcacacattcatgaaggtgcttccaagttgccatttgacattatctccaaatgaggttatgctcttaatagttgtattttatctgtcttaaaagcattaagttattctttgtgagcattaaaactatattagttkgttaccctcttttggcatttcatttttaatatactgagaacctcgaagtacagaagtggcccaggcccttctgaggagccctgctcaacagacaagcggatggagttcctgactgtgttaagagtagatagtaacttgattgatgatctcggaataggaaagcagaactgtatttcttgcagttctccattgtttctctaagtctcttgcagggtctcaagatcatctctcaggttttttgattctaccccagggagctgagcatagcatgtgcctaacttgtaagaacaaaggtgtaaatacttcacatttataatttggtagggtcttcagggccagacgttttgtgggccaacctcyactaaatctaaaagtcattctccaaatagagtatattgtgtttaatactgcttaaaaggtatcagtcacatgggttcttagttgaacttatggctaaaataatttttaaactcatttttctttttattttttttttgagactgagtcttgctctgttgcccaggctggagtgcagtggggcaatctcggctcactgcagcctccgcctcccgggttcaagcgattctcctgcctcagcctcccgagtagctgggactacaggcacgtgccaccacacctggctaaygtttgtatttttagtagagatggtgtttcaccatattggccaggctggtctsgaactcctgaccttgtgatccacccgccttggcctcccaaagtgctgggattacaggcgtgagccactgcgcgggggcattttcgtttttccaaccaaattgcttttaactaaaatagtgtattaattgaccttgtctcagatgtgtaagccgtagctccccttttcccttcgtcacccacctccatgtgcttatggcatatggggaaagagaaaaccttttttttttttttttttttttttttttttttttttttcaaaagtgatctgaagttattgatcagtaaactggaaaacccactgtaccagaaattcagttaagctgaggctcaattttcttcccctttatggtcagctttgtacatttcagtcccaaatcagggagaactgggagtgcagttggcatcccagttgcctgacgaatgaaatacgaaacagagtctgttgagttaatgtcatcagtttattgaaccacagtcggaggaaaaaaactatatccaaaaaagtccttacccttcagaccaactcatctcttgaatatgggaagcatttgttaacaaaagtataaggtttgtgaatagttatgtsctatacacagttattttcttacatcatggatattcccttaataacctttgaaagaataaatggggattttcgaaaagttctagccattggccagggcaagactgaacgtgctatctgttgaaatgttaaaagggttgaattctgaaggaaagctagcaagatttcgctaatatgtgctgtgtgtcgaggtggtaagaacatgtatgaacctgcagttgttggggtttaattggggttaagttgttccttaatttagataatttggtttcttttcagggacttttttttcttatgggaaaataccataaagtttaccattttagacttttttttttttttttttttttttttttttttgaggcagagttttgctcttgttacccaggctggagtgcaatggcacaatcttggctaattgcaacctcagcctcccgaggttcaagcaattctcctgcctcagactcctgagtaggtgggattacagggcatgcgccaccatgcccggctaattttgtatttttagtagagatggggcttctccatgttggttaggctggtctcaaactccctacctcaggtgattgacctgctttggcctcccaaagtgctgggattacaggcatgagmcaccgtacctggcccatygtagccatttcaagtgtacatttcagtaacatgaagtacatttacattgttgtgcaaccatcaccaacatcccatcttcagaacttttccgttatctcaaactgaaattctgacctcattaagcactaactccccggccrtcttccctcagccgctggtaaccactgttctcttttctcatctctgaaatcatacagtatttgcttttttgcgtctagattatttcactttagggaatttgattttatgtcagtttttctaacaggttgcttgtggagacagtaataatcaaaaacttactgtccaaagccctgagtctgaaattctgcatccaaaagtgctacagtatgcattaaaccgatyaaaataacgtagcatctttgaggacgagctctatgttcaactttgttgttgtttaatatttatattgtaagaaaatctctcatatatgaaaatgtaaatgtaaaattccactattttgttgccattgcttttcttgtttgggggatcattactgtattattggcttccaggatctcagcagggcacgagggaggtttagcctgtctgaattttggaatcaagtttggtgatgtgtgagctgtccccagaaagcaccagtataatgtagtggtcttaacctgcattctttaacgcttagccctgggctctataaccccacccccatgcccagcagcatcccagggtcctcttctggaatccaactagagttcctaagggaggaggatccccagagggagaaagagaaagtgtcagtggacagaaatatgatactgaaatagcagagttagtgtttgagtactgacttttcccgttgcacatggaagaaatttccatgccttgtctggatatctttagaattgctcctttcagtgttaagatggtttgttccactgtaaggactgtgccacatggcttggtggacttggagaggcggaggtggaaacgatgcgcaggagttggcttggggctttttgtttgcgtgtccctgtttacctattcataatcatggatcccctctgctttgtgatactgtgaaccacgcataacagcaattctttacaccaccgggttgagaagaaggcgcctgaggctgactttctggacctgccgtcacgcagtaaagatgtggttggtgtgtgtcaggatgagagggccacgactggacccacgtgtggctgcttcccgggtctgccatgtgctttgctagctgcaaagcgtttcctctagaacagctaatcctgcatgactgtctcctgcattttgctgtcagaacgtgcacgccgctttcataagaactaattgaagagggagctagtttgcatctcgttcttgcacaccctgagtcatgaaaaacattttyttttaagcaaaattgaaagaaagaaaagagagaaagagggccaaaaaaaaaaaaaaaaaaggttgccatccagtggaggaaggagtaattcccagcttcattcaggaaaaacgcaggctgaaatatgcttaactgttttaacttgactggggatttttaccaccatatgggttttttttcgtgacatccggagccaaacgggtgcagtgtgcctttaaraaaagaggtgcctcactaaacttcgctgtagttgtgtttcaccgtctcggtagggaaggaaagtgttaatttcttatttgtacactttttttccccgacttccttcctattcacttcattaaatctagaggcagttgagcatgggagccgtctgtatgttgaattagggctcgcactcttgcgcaacacgtcaccagtcggaaactgggggtttgcttctgtgatttatttcattattgtgctggtaaaaggtttggaagggaattctttttgggggtagtactttagcattgtgtagcaagttttsgggttttttttktgtgtgaccccccagcccccagcgctgagtttgagtcagttgagccagtttagtaaataattttttwaaataaaagaacagtttaaaatctccatgaataattttayttacatgcaggagtaatcttactctactctttatgtgcgaaaagcattgggaagtgtttagtgaattgatttccattagaaaaagacccttagaaatcacagaacataaagcactgcatatggatgtgtttggggtctttggggaggagggaagatgttttgtagctctctgcattcctgcataaaaccttagtttgaggggaataatggtcagtactttgtgtgtttccttgtaattccaaaacctaaatttaataagaatctgcacgtattagcagttgtaataaaaattgtttcagttgttctgtttgcaatttaatttgttttcgcttcttagctactcacagatttagagatttaaaagtccaaatatcacaagcttatgctttttccctcttttcaaaattaaggcggggtgagagtagaaatatcctttttacaactccccccaacttcatttatctcagtgagaagaaaaacaatgaaaaattttacagcatgaaactgaaagtgaagtgttacagttgttctgaattttctttaaagagcagaataacatattatgttaaaatatttgaatcttagaacatgtacattgcttttatttacatgcatttaattttcttaaaaaattgtcttctgttttaaaaatcatttagactgctccaaaccatgctgctattttttaaaaaataaggtacaaaataccaaaaaagcataccttgttttaattttttaaaataaatttgaatattaatttgttttcttactggcttaattgttaaaatgcgagcaagactcagaaaccatctgagctaaaatctctaattctgctgcctggaataataaggggaaaaaaatatgataagtagttgtcaatattaaaacaggctgaaggaggaagccttcgggccttgtagtaggtagcatgaaacagcagatttgagtatccacaatcctttcagtattaaattttcagtaaaataaaattacttgtatatgaaaacacagcctttccccagctctcttttttttcctgatcagctgatgaagagactagcagctcgctgctttgctggcttgttaattttatccccactaactgtgatttctgatagccggcctgctgatagtggtaaggtaaatatcctttttcgttgccgtcttgaagattcagtagaactacatcccaggcatgtgtaggtgtgtaacacatcaaaagccggtgttctccgtatttctgtgtgcaactgggtgcttgaggagagcaataccattaactgttgacagccttgcatgctgtatttattattagcatgttcagcctccaagatatgcgggacaatttccttttcttaatcttcgcttagctgcagtgtgtttagctgtatagtgggtgtcctgcttttaggcaaatgaatattaatgcaataatgtgaagctttttttttttttttccttttcctttttcctcataactcatcagatctcgcctccttcatagtggttatctgaacactgtaggatcgtgatggaaattgtcttttgattattaaggcctaggctcagactgtcccttaggaatctgtctgtgtgcatgttgcttctatggatttgcacattggaggatgcgtagaaaacatatttttttaaaaatcccactggcatttttaacatgccaggttgttttgtgttctgcaccaggttttcttcacaaaacctttctttttcaggaagcgttgtacataagtgaaagaaattatgtctgagctgtaatcactctttatattgattgttatactcacatgatcataaatattagccatgtttggtgctgtggagaaatgaaggtaattgccttatgattagagctctttcagctacgagaaaggattgattatcatttgcatactggaggcaatattgagaggcaggaggaacaaataacaacattagttattttgtgtgagagagcaatctcaaaacgtaatttaaagatcttttttttagaaaatttcttttctatgttcaaattttatgttctttttttttttcttccttggcagtatttttcccctttatttttcttcttttgagttttgagatttaccaggaaaaaaaaaaaaagtttaaacttctgggtctgtcacatggatcttttagccctttatgaacaggtttcttttatacctggttgtttttatagctattttattatctctctgcattagtgctgctggctctggtttaaagcaagcgtttgcaggtaattggaaaaaagtgtttattgtttgtgagtgtgtgtgttctttatcgaatgatttaagtgcgtttaccaaggaatgtggctttgtactttcccgtttccttgtttactaattgccacgttagaacaaaaatctagatggaattttgatttatattgttaatcatgaataaattgatgcaaaacctgaagaaaaggtcaaagcttatatgatcgtgtggatgtattcttagggattgttttttcataacccacccctcgttttgtttaccttttccttcccttacagtaatgagaacattagggtcttgttcttaaactgagctaaaatttcatctggattcagttatcatcaaacacttgaatttatagatcttttaatatttgtcatattctcctttactgtgagtgttttgggccttcagtgtgttttgctcatgaaacagacttgagttaaagatgcatttatccaatatggtagcattccttttttcttcttcctccactgattactgttaacttttacttttttttggttaatttctttcattttattctaattgttggagctatatataaatatacacatactttttttgtcttggttattctcttgtcttgaatttgtctcctttgtttccaacgaacaggccatcgaagacggcaatttggaggaaatggaagaggaagtacggcttaagaagcgaaaaagacgaagaaatgtggataaagatcctgcaaaagaagatgtggaaaamgctaagaagagaagaggccgccctcccgctgagaaactgtcaccaaatccccccaaactgacaaagcagatgaacgctatcatcgatactgtgataaactacaaagataggtgagtgtttggttccttcaccttgatcatctctcaccaasacgcygagtggcgctccctgaggagcaggagttgttaagttgtgcacttaggttttattaaggttctttctagtttgtgttttatggctttctctctttgtacctgtttaaaatggccactgttgctattttgtatgatgtytcatcaggtattatttaagatagttgaaaatttagtttagattacaaaatgtttaaaatatctaaattagaaaaggattcttaaggacctctgaaataccatctgaaaatgaagatatttcagatgaaagggattggaatgatggagtaatattattttttttaattgaattgttagagaaagaagaatcctaatatatttaaggtaaatatttcatgttaagactgtttaaagcaaaatagatgcttcatagtaaatacagtttctcctttccttccaacacttgaatttctgagcacttgaattatctctttcttcctaataccacatagcatggtctttcagcaaatttaccttttttatgggatttttggatacagactttgagaaagctgtgtgggacactcctcccaggccattttaaacartgaataattatttgaaaaccaaagacactgtagggtgtcagtcagatccatacagtagatgaactagttaggctacgttttggttagttgacttggtttccactttattatcacgtggtaatgtttttatttgaagatggcttctcgtttcagttgaaaaattgacaggaaacagacattttcactctctcagttgcatagtggtattaatcagttttaaattaccaattgaaaaaaattttttcttaagggggtgcatcattcctggaggtactgcagtaccaggtcgatgtgtggagtggatgaagcaagctcctcttctagctccctgcttccaaaatccacttaacatattgtcctcggatagaggaggaatcagatattaagcatgtaacaacagatactacacttggtcttagccaaaaggctgagaagcagttagttaccagaaatgtttgacattaactagtgttgctctgtgcacctgtaagtgtttaacatgaataactacgttgtgtttttagtttttcattatggctttgccgaatacmtcatagcaggaaggaaaaattattataaaaattaagtggtataaaaagcaagaaactttccaccatggggttttgctgttaagcctttcttatctgcaaggagttttcagaaatggggaaagaggagtaggtggagatgtttgtcaaaaggccagaaattcttgctccattttgcccaccaggtctctcagattttgtgctgttttccttttttcaaaaaataaattaagttcatcccctttaaggcttctgaagtggccagaatggcaaccccattctcttgggtttggaccaacggttcattaatgaaggggaatgacagcaatccaggaaggaaattttgaccgcaagtccatgctttgtccagagtgaacatgaaaacttccttgtaaaccatgaatcagtaactcttacgtttttactcacccccaagctccccttgtatatttgccacagaaagggacagtattctagaagccagcttggattattatgccgtattttctcagtccctggtttaaaacaaaatattactaagtagagagcatcactctgtatatacatcaaacttttttgcctttgtctcaggagagtgtaacgtctgtttctctgaccagatgggctgtgatgtgtgacaggcattttgttcattacttgctgagtgagtcaagggctgttataacactgagaagggccagsaaagtccttggaggttgagaagctaggcctttcmttctaaggtgatggctgtgtctttctctagtgacataaaagaagtcaccaacaggtggatgacatactgccaacagattcgtttggttttatgcttttttttgaggggtgggggtcagcaaatacataaacctggagagatttcttgcaaaaatttccctcccatcccccacccttttgaaaaaccagaaactctggcagcactttgcccagctctccctaaggtagcaatcagtaggcatgaagaagtggccatcctttcattggcagcatcgcgctctaggttgtcacaatccccgtcactctgtatcatctcttcagtatggagtgsgtcgccatttaccgtcatgctttttacgcccgactcacttcattcatttgtattacctgctggctccatagcctttgagtttatgacttcctggtatacatggctgtgggctgaccactttcctagaaaccatccagaaatacagattggtaggagattatatgccttaaacctcagctaagcattgcacagtggtttagagtacagactcttgtbttgatttaaccacctgcatttgaatcctgactctgacattcaccagctatgggacagtggagtaatttacttaatctccctgagcctcagtttccccatcccagaatcccagaaatgggattcattactgcgcctgcctctagagtccttatgtgtcatcagggatttaatgtaactcaggttctttgaacagtttcattattaataatcagcctttcagactttgaggctaatcaggtaggtgaatggacctctgagcaccagaaagaaagtgtccttgctgatgctgatttccatggttttatttctagaaacagaaaatgccgtttcagtggtactgtttattgagtatgtctttagttgtactgtaggtaaagggtatttgaatatttcagcatgcagatattgagtagctttttctttttaacttttccttgttttatttgcttacttacttttccttaaaaagtgtcctggtaagacacattctattagctcccacatttagatgctttctggggagtatgtactaaatttcccaccactgaatgtttcatatacatttcatgttggtaatcctctagaaaaagcactaactatttatattttgtatttctctttaacttggtactcaagtaggaggcactcaaattaggagagccttaattagatacagtatcatatttttggttggttttagaaaatgctgctgggagatgtacatttcactgtgttgagatttttgcaccattaaagtcagttatttaaatagtaactcaacccacctgtgaaagaaataccacctgtgctaacctccttcccatcactttggtcaaatgttagggctctgacagtcatgtagattaacagcatattaaataagaacagccatttatatttaactgatatataagaagaattaattagctctcatgagacagttgtttaaaagttcatgcatgattctggggcagatgtatcttgatattttcataaagaactaagatcatttatgtgtgtgttcgttgctttttagtcagtgataggacttgttttttaaaaaggagggtgcttctaaaaatctgacccttaagagccagatattgtgtgattcataagtgtaaaatccttctgcagtaactgctgtctattcagaggtagtactggtctgttgctactggcccccatcattttatttgcacaaatagaaaactttatatcaagtagtaccagaaggctttgttttgacttgttaagcatgctttgttttctgcttatttagaagcttttaaaaactcatattctcaatttatgtaatatttaacctaagactgttctttgagaagggattcatcctgtttgcatttgtacccttgaaaattgcccctgggatgagatgtagagttagayggtaaagagtagagtctgtggagctattccaactctagagacatggctttcagttacttggataaagaagagagagagattcctagaggcattattaacgttggaagggatgtttagctctgcctggcccaacttcccacaatacaagtaagtcccctgtaccacctctggcatgtggtcatccacctcyatgtggacactgcagtgtgagctccctgcttcagagcagttcttgacaccaaaggacagttctaaacacatcaccgtttcctacattaaaagggatgcagccatctgacccctagctatttgttctacttggaacctcagagaataaatctgctctcattctgagaaatatcctttaaaatgtatcaacaagcatatctacctcaggacattgtccttcaggtaggaacacttcactttgctctctgagtgatgcctagacattggccacattccagtctcctagtgtcccatttaaaacatggcgcccagaactccaatggggtattctgatcattaattacagggtggttagcttccttattctggacaccagaattctgttagcataactcaagggtgtgtttactttctccagcaaccttgacacagagttaactcattgaatatgtgacttcttgaaataacccccactccccaccccaraacacacatacactgctctgatttcacatgaatactgccaaggttagctttcagataagcataatttttttgaacctatgcctactgattgtattcttatccctgtgtagttccagccttactacttttcatcccatcatccttgcatgatgctgtacctctaaatttttatctatgcaaaaattatgtttactatgtttatgtatctaagttttttcatccaaagatttgatataagctattgcttagaaacttagacaaaggacaggtctctgtgacatacccctgaaaatcacttcaggttgacatgaatatattaaccagtaatccttaaggttggctacccatcagtgaactyatatagccatgctctcatgtcacccacatttatcctttctcagcattttcaagaaaggctaaaaccatgatacaccatggctagcctttccaatctatcaccctagaaaccctgccgaaaaagtgaaatgaggttagcttgccatggctttttctaagagacctcctgctggcacttaatgatgttatttatcttttctaaatagccctgtggcatctgaataatttcttctaaatttttaccaagggtcaacatgaagtgtaacagtctcaaattttctttctcatattgaaattgggacatttgcttatctctagtgttctgattccatttttgtgctctgtgatttcctaaatgttattagcagaagcaatctacatgcttttccaggatttaattagtttgcaactggacacttgaacttacttgaagtggcttgatatgctctttctatcaactctcttatcaggagcttttgttcaccatttattatgccttgcttttcaaatctgagcattgttctcattcctgaagaatctggaaacagaaagtgaatagggtgtcatcacctcctccctctctatcaattgctcgaagacaattctttcagaagcagtccacaggaagaccagccctgctgtctgtaaaagggtttggacatcaggtctagccttgaagatggatgcagcaaagtgatggaggaggcrggagatacctgcctggtcagtgcctggtcagtccaattggtgaacacagctccggggcacagaggggtggcagccacgtggctcctgcctccctgacactcttcagtctctgctgtcttcccctagctgggaatgtgttcttcttgcccctaaatttaataagccyttgtggtatctctgggaattgtggtaagactcagcttgtcctgaatttttagttctcacattggagaaaatcattcattctttttagaaatatttccttcattgtttgcttatttccaggactgtactcttgaatataattatagggtaaaaaattccaggtacttacccccactagctcatcatgcagtggaagagatagctttcctatgggatattactgaagaggtagctggcctggggaattcagggaagtaggggtcgtatgagccccattatctgaggatacaatgacattacctggtacttataatcaattcaggacattataataatatttacctggggaaatgagctttttttctttttcttttttttttttttttgagacagtttcgctcttgttgcccagctggagtgcagtggcaacatctgcctcccgggttcaagcaattctcctgcctcagcctccagagttgctgggattatgggcgtgcaccacgatgcctggctaattttgtatttttggtagagacagggttttgccatgttggtcaggctggtctcgaactcctgacctcaggtgatctgcctttctcagcctcccaaagtgctgggattacaggcgtgagccaccatgcccggcaaatgatctgatattttattacattatagcagctttccaagaatttggtaaactacaaacctgtggactaattgtagttaattcctatacacactgaaaagtaatttgcagcatttttctcattttgagtagggctgaaactctgctgaaggcctacatataatcagcccattctccagaagggcagggctcttatttcaaaatattgccttgttccaaggcttcctctgtctcggaagttctttatttgaagtgcgttaggtatttactgtgtcgaaggctttcccacactgattatcatctcaaggcttcatcaaaccaatggatctttacactggcattcatactgtctttctaaaataagttttcgtaacaaacattttaaaccaaatctatgtcattatgtagttattattttttgttgctttgttttagggttttaaaaatttgtatttttttttccccaagccaatcagatggctgacctgcatggactccttatcagaatgatttgaaattattctgctgggatctttggttgttcagaacccactgagttgtaatctgcgtcagtcttagatgacagagccatacctagcttctctgagttagttacaatctactctgtaaagcgttctaaggtagcacttgttgttttcaggttttcctcccgtcactcgtgcacattcggagatgacatggtctacttaagcttctgtgtctccttggtcagcaccatcattagcccaaggtcctaaaagtgaaataatgaagactttcccaattctgtgccttattgctgacactcagagtcccctcaacctgctcctaattgtccctacaagacacccgttcacctgcctcctcacmccctgtcttcctgaggcccttgcactgctggcctggcctggcaagctgcagggtggactgcgtgccctgcctccagtctcttcctgtcctggcttctttctgaggcacctaacttgtcatttcatattgtaactttagaactcttcacagcggccccgttgcctacccgatgatgaccagacttcttagcgtaggagaattgttatcttccacagtctgaaccttcggatcttcccaactttttttttccaacgcacccctcccagctctccttatatttcagacattccaaagaattctgtgtattttgaagcgagcacatgcgcttccacccctctgttgatttgtttatgggtttatgcttttccctctctgcaacaccscgaccccacactgactctagagcagaatggggcagtgactccgagaagggatttatacatggacaggcacaggctgtgaatcccaaagggtgctgtctacacctggagggagatctagagggtatggagggtcttcccaggatctgtgaaacctggcagctgcttccctgccaccacaaaaagggacaccaacctagcagtttcaaaaatcctcaactgaagaggcttttctagaggcttgtagaagtgcccaagacgccaggtggtggtttattttcatttcccactaaagatcatgaattcagtgatctctcgaaaaggaatagagctcttggragcagagctgactagttagatggtgttcagacccaaattggctgatgcttggaataccttctttgtgcaggctactgtaagaaagcactttatcctatttaatttttataactttctgaggtaagtatttcccccattttacaaatgaggggctaaactcagatagactagcactaccttcccaagatcacacgcacctctagccagtggctgcctgtctcccaccttctggaacagtgaatggaacatgtaagagggaacagggtaacaggaatttctgtgtgtgacggaagtaggaaaatcccagaaaggttaggaaatccacttcccccaccatttttagagaactatgttatttttccgaatgaggttccaaacataaccccgtgtaatcttcctaacaaggcaggttggtgaggagactgaggcttggccaggtcacccagcctaggaagaaggagccrggcggggacgagaacccaggtcttctgactctagtgttctttctactctaccgcaggtgtaacgtggagaaggtgcccagtaattctcagttggaaatagaagsaaacaggtcaggatctgtcttgtattcccctatctctaaatacagstatccctcgttacgtgaaacagattgaatcatatmatcggcctttggaagcaaatttcttcggtcacctcctgatcacccctacttggagagcgggatagaggcacagatactcttaaacagctgtcatggcttctgaagttgttggtgctgtattttaatctggctgtgccaattctrtacatgcactccttacaagggtattgggagctcctggaaagcccgccctaactgcagcatcttggagatgggtttctgttgcttccccctcccttccagcgcagcttctgttgtgtgttccttgggcctctttaactctgtgctgtcttggtttagaagcttaatgcgaagcacctgtagtgacttgatctcytgcgagacatgaagaagcgtgcatgttcacgctgtgtctgcattccagagttgatcatggcatgcagagggcaattgctgagttgtctcttgtttgtgtgatgggttgggtttcagggtgtgactcctgggcctacctgttgtgtgtagtcccaagcatctaaagccagtctctttcaacctctgtgtgcctttgcttctgttgggtagaaagcagaaatgcttttctcctagagatagtgtgaatattagatgacattggttgagctggagagatggatgtgcatgatacgccaaggctaggagctcttattaatataagagagataacatttctttctccatttcggtcaacctgtacttaaaaaaaaagttgatacagtgctttaccatccatatttcaattttttcagctgacccaataacatcctttacaacattttttccaccagcataggatccaatctaggactggagagagagaattgaggatgtatcgtgtatttcagaatgaacacagatcactggttgtggtattcttctttatataaggagattaaaaactagtggtgatttatacttayacttatccatttttgtgtggagatgaaactgtcgggcaagattgtcaatttttgatatttcttattgcagtccagtaaacaatgactaatcctggaaaccaggcacataaactataatgtccattgagaaacgtcaggaattttgttctgtatttgccattatgagaaagaactcagtctggattctgacttggagattgaaacaacgaatagttgacttcataagtttgggcagtttaaataatcaaccaacttgggtaaatatttccacccctaatacctagaaaggaggccttagggctaaatggcatgatgtaagctsaatgccctgcccaggaaacagggacaggcaggagctcctttccctctttgccctcttccatcaagatggtcatgtgaccacgaaaagtagatcaataactttaaaggctatttattkcaagtccccagtgccatgcccaggctttttgaggggagatgacatgacggtatatggttaggaactagataaattcattttcactaaagacacatttaaactgtaatttccagagacatagcagtgggcttggtgtttgcttcctcagggctctctggagtctgtcttgtcccttgctgtctgtcacacacacttcyttttcccataagcctgagctgacaacatggtgtttggagattgtattatgatgaattaaccctttcttcagaagagcttttaaaaaatctttgcttcagtggtcaaaagaggctctttgtaagtactgaaaatggaaaaaaaaaatgaattaaatggagttatttaaagcacaattggaaagagctatgtcaacaaataatgcaagtacctggtatgaatgacacatatacacagggtgggatgggaagggatggggcaggagtggagagcgcttctaactggctgtgagcagagtgggagtttctcaaacagacgggtgaagggaggatgggtgggggggcagagcttgtggtggtatgtgcgggaaggggggatgtagccatggaggcttggaaagcagtccccctctagagactacaccatctcagtgtgaccagctcattggagacraaggaagactgggacagcctggatgaggctggagaagcctgagaacagatcccggagggccttgaacaccaagctgaggaggaattttgatgtactcttctaggagtggggtcttgagggcaacctgtagtcatcgcagtgactgttacgagcactgtttcaaggaggccaacggagagcacacctgagttctgggcgtgagcgtgcagggaccagtgtgtgatgtctgtcatgtgggagaggggaggtgacacccagggagccgacatcagccctgcagtggaaagtagatagccaagagaggatcatggggatacagtgagatttgtgttcggaaatgtcactgatagtctgtgaaggatggatcgaaggaggcatacattaggagaatgttgtctggtagtggaggaagatagtccttaaaataaggaagtggcagtaggtaggaagacaagggaataaatattcagaggtaggattgacaagacttaggggcagtctggatgtgtgaggaggaggaggaagagaactcacatagctcttggatctctgccctgagtgatcagtgaacagcggtgccatttacagaaatgaaggtggcaggaaaattggtgtgtgtgaaggcacttgtatgtatgtgtgtgtgcacatgtgcatgtatgtagttacctggccctgcatacaccatcacaggacagctgaactctctacttggccattagcagcccttgatgttgtgatkatgttgttagtattgactgctctttcaggaccagccaacaggctcttgtaggcaaaatttatttttagtaccagacatcttgtattactgtaaatgagagcgagaggctgtaatgatagctctcaagcccaagcacctctgcatttagtggctctaatttcattatagagaaattaccatgaaatagcactgtgaccaattagatacacttctgggaaattttaggtgtaggtgaagcaccttttttcattcattctctgtttctgatagtttggacccagaatcaagctgacrgtttatcgtrtagagtagcagcctcctgaggtcagcgcctcatgcattgtctggtgcatgagcatttcatgatgcttcccagagtgagttcttccaactctagccttcctactccttcttggagattcccagtacagccagaggccctgggaagtcttgctrtaaagtcagctgtttaactgcttaacccagcatctcccaaacttatttgaccaaagaacccccttttcacgggacactgttactaayccattaagctagtgttctgtggagcacactttgggaaatgctgaattggagcccaaatattacattcagtgcagagagaatctgctcggagatgtggactccagtgctttattttgccctcattacaaatattgatactttaaatgtttgctgaaacaggctgctttgactcttggtgactcgatacttatttatggtgctcagccagttatgcccacgtacagcaggtgggcagcccacaaataaacttagtccktctgtttcccgagacacagaatgcttccccttatcttccagcattagcctggccctgaagcccctctttcgagggtctctgcctctcaagctccaggccaacaccagcataaaggacccctctctgaaggaagggaaggaggctcmgctggaaataasaaaatggattttcttacagggctgacacactgttttccaaaccactctataaatgttttgattaaaaagggattgctctgagagatcgcagttatttggatatatatatgtccttgtatattaatgggggaaaaaaatctgtctcactcctttagaatcacacctaatatgtcttccttgaggatttattacaacagccattgtaggaaaaagcagcactccggtgcctgccacgacccacccatttaacaaagcagcgtgtgggacttgggcacagatggagaggcatttgattttgtctgcagaagctttgtgctttttaatttggtcgcaattcagccaaaagctttgaagcattttaccattaagaaatggggaagcaaaggccaggcacagtggctcacacctgtaattcccagcactttgggaggccgaggcaagcggattgcttcagctcaggagtccgagaccaccctaggcaagatggtggaagcctgtctctacaaaaatgcaaaaatgagctgggtgtggtggcatactccagtagtcctggctacttaggaggctgagatgggaggattgcttgagcctgggaggtcgaggctacagtgcagtgagccctgatcgtgctactgcagtccagcctgggggacagagtgagaccctctctcaaaaaaaaaaaaaaaaaaaaaaaggaaatggagaggcaggaaaggatcaaaggacaggatattcagtggaagggaacgtgtgggttcttacattttgaaagacagggacgctttgagtcatgagcgcgtgtaacgtctacaaggtggggtgggaaaaactgtagaaatggccggctgaggaagctgcgggtcatccggtgtctgtctgtcatcacatttagtcagatgggcagtggagttctgtacctgcacccactgttatgaaacgtcaagtgagaaagagggcagaaaagtagccatcctaagacagtatttccaaaagctgagtgatagctgacaaatctactcaaaaacattttttgaaaatgcttgtccccgcccccccccaacaatacacacacaaaaacactctctggatcttacgtcctgtttcaagcacctttgctttgtagtaataaatgcaatgggagaatcctgaagaaatgcatagaaactgaaaagaagattctgatggttgcaacatacaacatattaaaacttttgtgtaatgattgtattcttttatttgtttggctttatgtgatagttaaaaagtgccagttggtaaaacgtgctgcttatggtgataaaaataaaggttggtcctatgatccttaaacgtaatttctttggaaaaataaaattagatatttgacttatggcatgttttcaatgaaggtaacccaattaaagtgtttgttgggacctactttatttatggataaaatggttctaaattacattcaatcataaatcttcattttggtgaataagagtaaattattatttttcattatgctttggcatatctccttctggtcgtttttcaatgccttttttaaatccttgttgaggttgaagttgtactgcactacaatttgatatcctctgtttttttgggttttttttgtttgtttgtttkttttttgagatgaagtttcgctcttgttgcccaagctggagtgcaaatggcacaatctcggctctctgcaacctccgtctcctgggttcaagcgattctcctgcctcagcctcctgagtagctgggattatagccatgcgccaccatactcggctaatttttttatttttggtaaagatgaggtttctccatgttggtcaggctggtcttgaactcctgacctcaggtgatccacctgcctcggcctcccaaagtgctgggattacaggcatgagccaccgcgcccggcctgtttttttttttttttttttttataatgacgtaacaagcatttttttctttaaaatacataattttagactctcttgcattctattacttgttctttccacaactgttaaacgttttggctgctttgaattatttattttaagtaatcctgtcatgaacatcttgatgattatctgtttcagcccagagtagattaccaaaagtaaaatcatgcatcagagtgtgattgtttttaagactctagacaaagtcttggtgcctttcttattgagctgagtgaacccttttcagtctcctaacagggaactttgtttgtcttggtaactcagggacattatttatctgtagtcctttatgactattagggtgatttttttggtggtgttgagacaacaaagtcagctctgttgaccaggctggactgcaggggcatgatctcagctcgctgcgacctctgcctcctgggctcaagcgatcctcccacctcagcctcccaagtagcttgggactacaggcacatgccaccacgcctggctaagttttgtatttttttttttgtagagatgaggtttctccatgttgtctgtgctggtcttgaattcctgagctcaagtgatcagcctgcctcagcctcccatagggcggggattgcaggtgtgagccactgtgccccaacattggggtgattttaacagctactgattccatgacccaaacaagtctactcccatcccaccctgttttgctcttgcttcaagggtctaggtgatgatatttccaaacttgttaggaattatcaccaatcaatactcaataaggctgagatgagagatctcagtagcaaatatggagtgcagatgcttgtaacacctgcttcatgactggctcaggtttctgcaggctctcttgataagtaggggcactaatgtggtctagtaaattcttcaatgatatatattaaacttcataggaacctgaacctgaaaagmagcagcacacttcacctactgccctgcagtgttgacccaatttttaaagttttcttcccaaacgactttgctatgtttgattcctttaggattgtgatagcttttctgtaaaatccttccaacctcaagtgagtattctaaatcatgacatcattttctaattgaagtaagatagtcacattttaacccttattaatataaacaatttatttcagctatgrttaagatttctttctcagcactatctattagstattctggtcaacagatcagcttgagcaggtaaaaaagaaaaaccataaaagaccctcactaattatcrattttcgcctggtcctggaaaaaaaaatcattaaaagacataaccagtattctagaagtagatttctttttttttttgaaactgagtttcgctctcgttgcccaggctggagtgcagtggcgcgatctcagctcaccacaacctccgcctcctgggttcaagcaattctcctgcctcagcctccctagtagccgggattacaggcatgcgccaccacacccagctaattttgtatttttagtagagagggggtttctccatgttggtcaggctggtctcgaactcctgacctcaggtgatcggcccgcctctgcctcccaaagtgctgggattacaggcatgagccaccgtgcccggccagaggtagatttcttaactagcatatcagccttcagcatgtctctaagcttaaaatataatcaaagctaaagctgacatttatgtaaagtttataatgtatgcagtcaccagtttagagtcatagtatagatgtggaattatacttttggtttgtggaggtaatgaggaaaaaaaaaaacggttcccagatgaagcataacaaattaaatctcagtagtgtgtgtatataagccatgcatacaggagttcaaactaccacttgcacagtggtatgtggctcttttccatctcgtactctatggtctcatggccacgtcgcggtgtctgttcacttccatgaagaggagaggttcttgtccaccaacacctgtgaaccgtaagaccagtgagtgcctttaaacttgtatttcaagttgtacccctcccccacttaccccatgtctcatcagagccatactttctagcctgaggtagatcattacgtaaaatccatccgatgtcacaggccatcagtggtcttggggagggggtctcatttttgtctgggaagtagtgtactttccaagtagcaatttatatttaggccttaaattgtgtaaaatgacataatggaaaacaccttgggataggataagcatttcaacagaaacagaacaccttctgtaaacaacattgtacaattagactattgttctgtacttaaaaaggaaaaaagcaactttctggccgggggcagggtggtgcatagaaaaccaccacatttcaaaaggtgtattaaaaaaaagccctcgctcagctcaaattagagaaagaaatgacaagaattcagaactgtcaggctgcttcacttccttttttgtttgtttgtttaatttttttttaacctgtaatttaggaaaaaaataaattactccagcaagtgttcgtgctacctcaaggtattctataggtaatgtggaagctaggtactgcccaggacctcctggctttgtctgccgaagctggccatccaatcccttgctctgggagggagggggatgagtttgatgtctgtaagagaaccccaccctgtagggaggagagaaacaataacacacatggaagaattaggttctgagcaatgaggggactgagagtaagtgtagttgatatttaggagaatttcctccatttttctggacaatgggttcttggtcctggagggataaggaaatacttggagaggagaaaaaaccacagagaactttccagctatggagtgagagctaggtcaggcctggagacctggaatgggtcataaagaggggattgcccatgaaagttgggggtacacagtagagactctcctgactagaagagaagtgtgttggtggtaccagttgggtttttagagaatgaggacatatcctggagggctttggaagccagactctgagatatttcagtgatgatggaaacaacatatcccaagaagtcttccatagataacttccaggtcctccttttgcctttgtcctttattcttaggagaggaaaaaagaaagtgggataggtatattaagtccagtgagcctttattttttaaacagaataaatgtgtttatttctcattttacagtattggccccaagtctcagagcattcagctctcttctttatgagcatagagaactctggacttgtctccttatggggtttagaatttttagggtcttactgaagacagagatgtcatacctagattgttttagccttaccccttagagctttgttgcactatcggtcacaaactgcttatttcttatttatttcaccagtagcacagttaaaattaagagtgtgtccatcacaggtgtacagagatgtgcctgtactccatcaatagaaacatgacaccatctgttggcaatgtagaagatgacaccatgaagatgtgtcattgagggagagtcaggtgttaaatccgcgattacaaagaggtctgacttttggggtgctgctagctgataaagaatgctcattaagcaagttgctctctacaaattactctcactgcatttcataggcaccttttcaaacagataaaatgtttgggtgtataaatctcagaatggtaggaaaagaacagaccagaaattgtggccctgtgttgaaggtgatggtaaataaaatagttcttgtcatatactatgtggcataagttagggaaggacgaacgcatttctcgaagagatgtgaggggtaggggtggttgagagggtgagagaacaccttggttcttgctgcagtgatccaraaatccaattcctgagtaaaatgcagtcttcttaaacctcttgcgttcacccctgattttcgtactcatgaggcccatatgtgcattaaaaaaataaaacaaaaacgatgacccagtgtagcagaaaaactagcccatctctttgacagaggattttcggttaatttatgcaggcctctttgcacttcagcattttttccactggttgctaagcaactgtttgagttactgcgcatgccttttttatgataactgtcattatgattactttttaattatacaactgggactgtggattaaaacagcatgttgtcactcatgctttgccactgccttctagtattctcacaagctcctagartcaccttctgaaatttttatggcagygatttatgattaatttttgatatttctggcttcacaaaggaagtagagatggcatcctaaggggagygagacttttgtgaaaaatgactgtatcacacaccacaagctgttattgatctgagtagaccaaatcagatattaggatcttgaacctaaattgtgaatctctttgtgcctttaaccacatctgcttccaacagtaagtgatgttaaaagctcatatgctttgtagcctgtgtttgaaaattacaaaaatgctaagcatttgttgctatwgaacctgctttcaaataaacttaccatgaatttgggggagggtacagcactaatcccagaaatgtgaagcatccacacttaagcttgtgaaacatgttcttctttcacccaaattgctctacacacacacaatggcagttaggcaagatgaaggggttcctctggcaagtaataataaaggtatgtgtggtttacagtatgtaaaataccctaaaggaataagaccaagaaaatagtcagccagtaggtacgtacgaaggcttttcacttgagtttccagagtatattctaacatattattttgagttactttctaaatacaatgtgaatttgaaaacaaaggagtatggaaatacaatgtttaaatatgtatatttttatatatatgtaygtgtatatatatwcatatatatttaccaattcatttaaaaatgaaatttttagctaacaaggatattttaaatatttctatcaaaataaagagatatatttgctctgaaagggaaatccacagtgtatttcccatattgtatgtgtgacagaagtggggaccaaattgtattttactgtgatcttaaaattatcacaagggacatcaatctccaatagagttgtgggatttttcctgacttaaaaagctccatatctatatgcgtggaatataatttactttgttgacatgttctgaaataaaaataaaacctttcctcagtaatgtttgatgtggcttgtttttgtttgtttcacccatcctacagttcagggcgacagctcagtgaagtcttcattcagttaccttcaaggaaagaattaccagaatactatgaattaattaggaagccagtggatttcaaaaaaataaaggtagatattttgtttaccaactttattcttcaagtaaataaaggagcagtgtaaagtcattgaaatggttgtagttggagctgaccgccactgatgggtacccagggctcgcgacaggaaaggttgggatgtccttgtgcttttccgtgagtgttacttaatcatgttgagagctcaygttatattgcattttattgaagagctttcaggctccctgctccccctgcccacattattgctcttctcatttcccatcatatgctcctccttggcaaaaggaatgacagtgggagtgggagggtggacttggtgaatggcgccccctggggttatgcagtcccagatccctggcagggctttatgctgtgaagacaaagggaaaatcrggctttgttaactaagtaatgatcgctgaattttcctctccctctttttttctccattttctscaaaatttccatcaggaaaggattcgtaatcataagtaccggagcctaggcgacctggagaaggatgtmatgcttctctgtcacaacgctcagacgttcaacctggagggatcccaggtctgtcttgttaagttgtctaaaagttcttaactgtaaatgtgcccrttgttctttttaagtagaatatttcattttctacctcttgaatcattgctactggcagaagaaaaataactaaaagcctatgttccttgctacctgtgtaagaaaatagaggctttggcatctgcagattacctttgtaccacagcygtgctagcgcctactcacacttcttttcaaagcttatagtctttttttttttttttttttttttccttttttgaggcagaatttcactgtctcccaggctggagtgcagtggtgccttctcggctcatggcaacctccgcctcccaggttcaagccattcttctgctctcagcctcccaagtacctgggattacaggcacccaccaccatgcctggctgatttttgtatttgtagtacagatggagtttcaccatgttggccaggctggtcttgaactcctgacctcaggtgatccgcctgcctcggcctcccaaagtgttgggattacaggcatgagccaccacacccggcctcaaagcatatatttttttttcgagatggagtctcgcccaggctggagtgcagtggcatgatctcggctcactgcaacttccacctccctggttcaagggattytcctgccttagcctcctgagtagctgggattacaggcatgygccaccacgccaggcaaatttttgtatttttagtagagacggggtttcaccatgttagccaggctggtcttgaactcctgacctcaggtgatctgcccacctcagcctcccaaagtgctgggattacaggtgtgcaccactgtgccaggcctcaaagcttatattctaattagaggagggattcaagtaaatcattgaaggtaatgctgaaaggctggcagtaccatttttgcttttttggagattgtatatttgattacatttacctttatttttctgattgtactcttggatcaggagctgaaactactagaatttaagacaaaacaaactataggaaaaaaagaaacactgcctctaattgctttttaatcctttttatcagcccaaytgcaattctctttttactccccttctccacagtcaacaattctaagagtatataaatgaactgaatttattaaaataaccaaggtgagggcactttcattttarttasacctcaattactgtcaccttatgtaggacttttttcctgtctgtatctctggcctgatgccttcagacccatgaagaagaaagaaaaagacaaagatgtacccctcaaccaatgcagtgtcaagccacctttaaattccttaagcctgtttcctgatcatacccttctgcctgcacatcaatttcagtcatcaaacaggagaatagagaaatcttcagaatgtgycttgaacagacttaaacatttccaagttaatagtagtagtatcttgaccaaaacaggaggtcttgaaagcaagccttctgttactcaagacactctccaaggaaaaagttaagcttgaagccaggacatagaaagtagaagaatcaacaaagaaggttttgtgaatgacagacagtttgttttagtctctggatagatatttggattctttatgtcaatatggcattaktatgatatacatccagtccttttttctacaaccttcctatctgttttcactctgactgtctcacaactgaaataaggtgtcaagtggcctcttgactggtttctcccccaggccatctggacactaatttgtctttctctagccaccttcctatcctgttcatttactgcctctcttcccaacctttgaggttcccctgcactgtctagaatgaatttcatctctgtagactgcttgctgaggtctaaggtaagtctttagcttcatctgctactcctcaacctaaacagcccatagtscattcggactgatactatgatcacctgcttccccagttacatttcttttactctttaagatcattckagactcacatgcagttgtaagatacagtacagagagattctgygtaccttttacttctcaagatggaaacatcttgcaaaacataggataatatcttttttttttttttttttgagatggagtctcactctgttgcccaggctggaatgcagtggtgccatctcggctcgctgcaaactctgcctcctgggttcaagcaattcttctgcctcaccctcccaagtagctgggattaaggcgtgcaccaccatgcccggctaatttttgtattttttttagtagagatggggtttcaccatgttggccgggctggtctcgaactcctgacctcgtgatctacccacctcagcctcctaaagtgctaggattacaggtgtgagtaccacacctggcccaagacaatatcttaagcagaaaattgacatcaatacaattcccagatgcatctcttttattcttgcctcctcatctttctcatttgttttcctttctaaaaagcccctcatttctcacygctgaaggaattcttctcacctttaagatccagctcaactctgatgtctctggaaaattctgccctgatggtcccatcctctctctctctctgcgcgggtcctttgttctgtcatactcatactcactgcctatattgttcatttggtgcaaaccgcaatttgcccagtcacttttttgaacgagtaggtcttctttacaataaaaggaatatgttcctaaagagcaggggttgttttattttcctttaaatttttaaaacattgtgattaagagacataacaaaatttatcataatttttcagtatacagttcagtagtgttaagtatattcactttgatgggcaacagatcttcagaactttttaatcttgcgactctgaaactgcgtgcctacgaacaactaactctcatctccttcccccagcccctggcacccaccatggcactttctgtttctatgaatttgccyattttagatacttcgtatgagtagaatcatagagttacttgtctttttgtgactggcttatgcacttatggacttagcgtaayaatcctccagttacaggatttccttcctttttaagactgaataatattccattaaatgtatagactatagttgcttatccactcatttgtcgatggacccttgggttgcttccacctcttggctattgtgaataatgctgctaggaacatgggtgtgccaatgtcttttcaagacgcctcttgtgattctttatatacccagaagtggggctgctggatcatatagtagttctattttcaattttttgaggaaaaggaccatttttgaacttatatctttcagcacctacccagggccatgctcagacatgtgtatccattaaaaatagagtgttgattggataagtgttggctgctactgataaactcagtaataaggaatagcccccacttgctaggggcactgcattttaaagaagattgctttaccacagtcttactacagcatttggtagaacaattcaaataagaaatgtagttttaaaaaataccatttttgttgtccaatatgaggatattttatctactattctcctccaagcatccatgcactttgaaataatttcaactgcatttggactttctgtatgaatgtgtatgtctgtatttgggcttggcgttttgctactgggttttcatgtgggcataamagctaacggtgacatttctactaaaattcatgtgaattaagctggtgtattgcataaggaagagttcactgccatggtaactcagcttgcagttttaacagatgcccctttgaccatttagatctatgaagactccatcgtcttacagtcagtgtttaagagtgcccggcagaaaattgccaaagaggaagagagtgaggatgaaagcaatgaagaggaggaagaggaagatgaagaagagtcagagtccgagggtaagcccagacattcgggtcctgtacatctttgcccctcctcacctgcatagctgtctccacagatgttcacagaagagactttagagtggggcagatctggattggagcccttattccactttgtccttgctgggcaaccggtggccatgtccttatccctgctcatgctcagttttctcatctataaaactgaggtcataaaaatgacctccaagcatgtaaaatgttyagcataggctgggctcctagcaaacactgttttatttcttttatttatttatttttgagacagggtctcactctgtcacccaggccggagtgcagtggcatgatcttagctcactgcaacctccacctcccagtagctcactgcaacctccacctcccaggttcaagtgattcacctgcctcagcctcccgagtagctggaattacaggcgtgtgccaccacgcccggctaatttttatatttttagtagagatggagtgtcaccatgttggcaaggctggtctcaaactcctggcctcacgtgatccacccgcctcggcctcccaaagtgctgggattataggcacaagccgccacayctgacctgcaaacactttctgaatgttgcctttgaatattagcctactacacattttctacaacactgctgctaatgccacctrtcttctcttctttaccacggtggttctcaaacctggagggcttgaagaatatgccagtgtttgatccagtagcctgttgtggggcctgagaatccgtatttctggcaaattcccagggggaactgatgatgttgggccaaggaccacaccttgagaatcacagctttagaaaataattgtcaractgagttggaactgtgaattttgcatagaattttttttttgccrggggaagaggggtgatgacagggtactgtctttatttaaaatgttgatagtttgtttatcatggatttggggggcattaatttgggtttttaaaatatttaccttttaggatattagttgatgactgggttttggtgcccccttaaattttacacccaaggtgcgtgcctccattgtttgaccctagttccagccgtgactgataacccaaatattccaaaggttaagggtgctgtcagaagttgaaaatttcttcttagtgaggcatgttggctcacaaatataatccgagcactctgggaggctgaggcagaaggatagcttgaggctaggagttcaagaccagcctggataacatagcaagaccctatctctacaaaaatgtttgtaaaaagaaatagccaagtgtggtggcacgtgtctatagtcccagctactcaggaagctgaggcaggaggattgcttagtctaggtgttcaaggctgcagtgagctatgatcataccgctgccctccagcctgggcaacagaacaaaactctatctaaaaaaaaaattttaaatataattaataaatattttaaaacataaaatttcttctttcctatgtgtgtcttcacygtatacctctcaaagtaaagtactaaaacctatgttttacagtataagccgagcccagtggctcatgcctgtaatcctagcactttgggaagctgaggtggctggatcacttgaagtcaccagtttgagacaagcctgatcaatatattcataataagtacaaaaatcatgccacaaaactgtgtgctatgtttttataaacaaatttatgtgtggaaaaaaaggtaacgtctcaaaatattacatgtatgtagagatatagaattacacgtttttttaccttttcaaatatattaaaagtatagacatgcttttaaaaaattattaggtttctaattacatgttaatacagatgatttggaaaatgtaatgatttttgtacttattatgaacactttccatggcaatgagggtttttctacagcaacatatattaatatgtataatayatattaacattcattaatgaatgtgaatgtactgtaacgtgttaattatactctgttaatcaggctgtttcccaataatgctgtcctgagcattttacccatagattattgaaaagatgtaaaatgtatgtgatgyatacacattgccacagagaatggagtttccattcttgccctcaacatrcataagcgactctttcccaacatcattttctattatctrtattctagttagtgattctgccttttatttgttatgaatttaaactgtcccaaattcatgtagttattcctttgttctagcatttgaatacatctgcatcatctattttagctatatatttcattattttagagccagatttctaatctgttttcaaagagctgctctcttcccccatccatcaatttagtttaatttctcaagccttggtatattaattttctattgctgctataacaaattaccacaaacttagtgactttaatacaacacaaacttattacctcttgtgggtcacaggttcagcatgagtctccctggactaagatcaatgtggcagcagcctgcattcctttctggatgctctagataggaatcccatttccttgttcatcctggttctcagcagagttcaatttcttgtgttcgtagaaacaaagttcccactttcttgctggctgccagtggaaggctgttcccaacagtgttctttggctcattgcctccccacccctaccccttgttccaactttaaagccagcaatgacaggtacagtccttctcatgttgtgtctccatgaatctctcttttgcgtcttcctcttccacgtttaaggatgcagatgattagaytgggcccacctggataatccactataatttccccatctcagggtcagacaattaacagtctaaaattccttttgccatgtaatataacatattcagaggttcttggattaggatatggacatcttgtgaggagatgatattctgtccaccacacttggtagctagaacttttcataggtgcatatggttgtatcataaaaccttaggaagctgtttatagggctcacctaatggtccagtttattagcctgcttgtccatagtctgtcaggtgggttttttggagagacatatccactgacgcgtgcctgacagcattagagtgcgccacactccaaggcacatttagattacgctctcaaggatacattttcttacccctattgcctgtcttctgcccattcatttcctatactcctgtgtcagggagagcccacacctgtataaatggacatatttcactttgtctttccacactgtttagaaatgcccattatgactggcttctttcatctatttctttcgacgtcctacatctttccgttttcattagtaggtaggccttttcatctccagtctcttcttcttctcctaagttactccacccaaagcaaagggccccaccttatagcttgtcaagcagcagacagtgggtataatagatagaagccttggctaggagtactattttgtgtattaggatttggaatggaggaaaggcaaatgctaccaccacacttgagttcataacagcacagctctcatctcttctgttagcttatgtttctgtgggagattttagttttggaaatattttgtgggtccctctacttcacaaaagaagtctgaaacaaacactctcatctccttctggagctaggattccctctatgacaacatctatttctagatgccttgagacccaccaaacatggtagtctagcaaagctagcttgaatgagagacccacattttcagtgccttcatcatcaaataccaaaaatggtattctgtggatacctatcccaaatagctaccatggagcagattgtctttgttctttgggatatgtacctatatttgtgatattgtaccttgaactcttccaagtgtttccattggtatccccagaatagtcctgtgaaggtggaaatgggtgcagtctttctgaaggctaatctgacagagcactgttagaaatttaccatatggacatgtccaccatacctccctcaaattctrccaagatacattgaaataggttcacagcagctttgtttatactagcaaaaaaagcagcaaacttcagccctcatcatatgagactgattaaataaattatagtataccatacgatggaaaattttcaggtatttaaaagaattaggcaggtatgtatgaggctttacctataaatatcccacatatgtgagtaaacagccaagtggagaatatggacatgtataaagatccctttgggataactacataaagaattcaagtatgtacgtgtgtatatatacttacttgaattctttatattctatagagagacttttatagaatatgtagaatcacacacacacacmtacacacagagagagagaaatggatgtacttgcaggtatggacataaacattttttttcctggaaataattagttatagggaaagagactaggaatgggggaaaggaagcattcaaaagtgttttctttttactttccattttgtacctttatgttaaaaatatgattgaactatttgaattttctttttaagtcaatggagttatctacatggtaaaattattggcctttaaactctttacatttatttatatttttaatgtaaaagttctattaaatgattgcccaacacctccacaagtagaaaacacttcccctcattatccttggtcagccaktgggagacaggtgaaggatccagccccactgtcctccatgagacctcggtccctcttgttgcctgtttagcgtgactacatcatttatcttccaaaagaagacaggttggcaagtgaaaggggtcgctgactagacagaaccacacagaacaggcataaaccgggaatgttctgggcactctgggatgtttgtgttgtctgtaggttkgtgatagtcttaccacctatacaaagatctccttgtgattactcactggtgtctrtytcatttgctttggttttagcaaaatcagtcaaggtgaaaattaagctcaataaaaaagatgasaaaggccgggacaaagggaaaggcaagaaaaggccaaatcgaggaaaagccaaacctgtagtgagcgattttgacagcratgaggagcaggatgaacgtgtaagtgtagccgactgggactgaaggcggagacgccctctcccctgcttgctggcctcttgcatttccatgccccttcagccttttcgctttattacccaggactggaaatgtcaggatttagtgagatttcattattgagggatgtgaacggagctgtatgatttagaacaaaggattgggggctttgtttattgcctttttaatagtcttcaaaaatgaaaaactaccaaatcaagcttccctttccccctttttaatcttcccacatgctttcttataaatatggttttccccgtagccagttaatattttayatgcatcacagccagcatggtgcctggtacataacagtagattagatggaagaatgagaaaaactgttatgacgtcagagttattggctcgagttgctacttaagggaccatgtaaaaactcaaaggactttttaagtacctaggggtgttatttttcatatttgaaaaattcagtgagcatctmttgagccaggccttgtaataggtaccyccctgtgtggtagcatattaaatactgatgtcggcatcgtgagatagatgtcactctcaaataacaygttatggaaatggttaggttatgggtgttttgctacagatcacgtcgcagaggtggaattcggacccgagtagcataactcagtctagtgtgctatgtctgactgggcagcaaggtagaagagtgggcagaagctcctaataccttgccttttgaaatacccttcatttcatccattcactttccagaggatggtttcctggcacccacattattttctttctggaaagataaatttcccttttcctagtttgattttccttcaacacattaccattttggtaaaatttcagaattatgatctcaccccagccttaacccttgatgcaagcattttcaaatacatttttctttaggagatgtcaaatgcagggtatttttttttctcccatgaattttctaaaacctggggctgaaaaagagaaaatattagccataaacctttcaagccaaagtgaaagggcacaaacaatagcttagagggtgggctttgctttggggtttttcagtaagaaaaacttctcagcttagagactgtcgatgcctctttaatgtgtttctgtyctcccacggaaagagatttggcgagttgtttccaaaatgtcattttttcctactggcctcttgatggtttgttgttatatcttctttttcttgcatgtgatgttacttcattttatcttcttatttttacttttaggaacagtcagaaggaagtgggacggatgatgagtgatcagtatggacctttttccttggtagaactgaattccttcctcccctgtctcatttctacccagtgagttcatttgtcatataggcactgggttgtttctatatcatcatcgtctataaactagctttaggatagtgycagacaaacatatgatatcatggtgtaaaaaacacacacatacacaaatatttgtaacatattgtgaccaaatgggcctcaaagattcagattgaaacaaacaaaaagcttttgatggaaaatatgtgggtggatagtatatttctatgggtgggtctaatttggtaacggtttgattgtgcctggttttatcacctgttcagatgagaagatttttgtcttttgtagcactgataaccaggagaagccattaaaagccactggttattttatttttcatcaggcaattttcgaggtttttatttgttcggtattgtttttttacactgtggtacatataagcaactttaataggtgataaatgtacagtagttagatttcacctgcatatacatttttccattttatgctctatgatctgaacaaaagctttttgaattgtataagatttatgtctactgtaaacattgcttaatttttttgctcttgatttaaaaaaaagttttgttgaaagcgctattgaatattgcaatctatatagtgtattggatggcttcttttgtcaccctgatctcctrtgttaccaatgtgtatcgtctccttctccctaaagtgtacttaatctttgctttctttgcacaatgtctttggttgcaagtcataagcctgaggcaaataaaattccagtaatttcgaagaatgtggtgttggtgctttcctaataaagaaataatttagcttgacaaatgcagcctctttctttgaattctagaggattgaaacccttgtgcctgaagtggcagtttcctgcagagggctgggcaggctcttgctactgaacactggatagggaaaaaaagggagaggtcgagagagccagtctccttgaagtggtccagctatgtccaccaggggagcctgttgcacccatgactttattaaacaaacagcagaagagatgctgccatgggccaagccatatgaagtccctgctcagccttaaattctgtttcttagttggaaaatctctctctattgctatttatgccttttgattttgaaagatttcaaaaatattccatcgaaagactggttcaatgaacacctatataccctccacctgagattcaacaatgattaatagttcatcccyaccccgttttattttaccaaaccattggaaaataaggtgccgtcagtcattacgatacttcgcacctagtatttcagcacaaatctaagaataagcgtatcttgtagccaaccacagtcctatatcataccaaaaggaattaactaacaatagttccctgatatctaagaaacaagccatagtcacattttcccaattgtcctaacatcatcttgtatttgtttagttttagccaggatcttttcaaggctcacactttttgtgtttgattgtaacatttgtctcaatatcttttttaaagttctcaaaaaaatagcacaaagatgggcaattttttttttttttttgagacggagtctcacactattgcccaggctggagtgcagtggcgcgatctcagctcactgcaagctctgcccacctcccccccacccgtttcacgccactctcctgcctcaacctcccaagtagctgggactacaggtgcccgccaccatgcccggctaatttattgtatttttagtagatacaaggtttcactgttagccaggatggtctcgatctcctgacctcgtgatctgcctgtctcggcctcccaaagtgctgggattacaggcgtgagccaccgtgcccggccgattctttcttaaggaactggtgatgtgatgatgataggatcaaaatgggagagttttccttcaacactgctgggttggtgaaagcttccttttttagaatgatctaaggagaactccaggatccttgcttttacatgtgaggatttgccaatgccgcatactgctgtgaatcctgaaggaaatttgatccacacagaatacagtcctgagaaacttctttgtctctctaaatgtcaactcgtttgttaatttccagtagtctgagagttcaggagaagtttcccttctcggttggtttctcggatttgctaactgcaataggattggagacctccatgaaacagtatacccatattagtttctcttactgagatgatttggtatcagttcaaagaaaacaatcatctttgcttgcttctatttctgtattttctgtattttttgtgctctttgcaatctctccttggcttcagaagcattgctgtttctaacgccctcaaaaccactgtctccatcgttcaggatttctattgtgtgaagaatgttctctaatccttcaaggagaatgtgttattctctttggctataatggaaatgagagccagggatgatcattgagaacaggagtctcttctccttcgggtgggactggtggtaaacagtccaggtgataattgaggtggcagcagagtgagcatgcactaacaagaagacgggccatcgcgagggctaaggatggggygggccatcccgagcatgtgcctatgcggacctgtttaccacgttgtggcagccttcttgttcagctctagttgctgagcccatcagcgtagttctttccaaggtcaaaggtgttttaggaacagaggaaggaatctaagagtatcaggctatgtactgattgcgttattttattcaattacaagaacgtgaggaaggcatagttcttgttcccatttgacaaataaagataatgcaaagaagagattgaagagcaaagagctgtgcaccaaaagttggaagttagatttgtttgattccagaccccatattccttggagcttccccacctcccctcagtgagtgaggcctggaactgatcttgttgataagcttcaggcacccatttacctggcacttgctgacacaattgggcttacagagaagtcctggctcaagtttctagttcccgtgagcctttccactgagacccagttttcttggctgggccctgctactctggctcttccttcacagtcctctgcaagggccagaatggggtccttaggtcccagctactgatggttcctaaaggctactgacttagatatcactactgccatcatccacccatcagatataatgccatatgtatacgtagtgaccaagttcatgtttgccccacacattgataagaccacgtgttttctgagaaagaggtttttacaccccatcatctccataggtgctggacagagtaggcttagcgtgcaattatatcttcaagtcctccagttccatatccaaccagactggaattcctaagcacttcccatgtggagagtctagagccaccaccagtgccacctgaaggaacagacgcctgactgcccccctatccaagcctggcctcttactctagtgtcagtctgctacgtggacccgagttggcacacatcacagctggatctgcctgagttatgccaccagaaacatgattctcagactattttcataggtcagacccttaaaatggggtgttttaaatatgaacctctcaatttcccattagagatattatatagccagaatatactggaaccagatgtactgtagcaggaatataaaggttttaaaagacctttttccctctaaggctgcttatttatctttaagtataattattcagatgagaaattaggatcatggcccttaattgggagtcaaatgtgtggrttattctggattttgccacagccttatttgagttttgatttcctctataaaacgtgaagaataagtgagtcgtcctgtaattgcaagctgtgtagttgagacatactgttgtgttgtcaaaggtttgcagtatgttagaaaaaattgcttgtaaattaaatgtcattaaaacatccagaaagattctcaaagtcaagaaatagactggagatggcttttaagggcccttcaatcattgacagttttgaaaccagtgtttctcagagtgtggtccccaaactagcagcatcagcatgacttggaaacattggaaatgcacattctcatgcctcatcccagacctgctgaatcagaaactctgagggtggggccccctaatagaacatacgctccagatgattctgatatatactcaagtttgagaaccactagtctattaggcttttaataatctctattatttcattcctgaggaacaatatgaggccatactggtcttgatttagatcatcggtacaggcatatacacccagcacgcaattgtcattcttctaaaaagaaagtcaccatcaatgggaataataggaaaagctgaatattttttttttctctctctgaaacggcttttctgtctcgtacattacaaggcagcaatcttcatttgtgcttgacttaaccttcattgagagtgatgtggtgtaatacttgggggaaatatctttggtttacttagcagaaaggtagagacatactctccctttatgaataaatgtttttcccacaagaattttaggagtcaatcttattcttgaagaaatgggcacatctaatccttttcttaaaatttactaagagcctgcatcaaactagataaagtacaatttctgttcttatttgtatatactgtcatatagtgtgtgaatctgttttgcctggggaggagtaatgaaaaatgatagagcatagggtcaggaataatgactgatagggctagaatcgctaaaccttggtccaggtgaactgtattcatccctggtgttgtttaggacattgagcttcatagaaggaaagtgacgtgttccaaatgcctgagccgctttatgcaagaaggtgtttgtgttctgcgtcactttccgtaagggctaagttgaataatacaaggcaactaagtctggcaactacagggaagcaagttttccgtttctaaacactaattttgctatacacaagaacgaggcctctttgtgaacccaaacgcagttatgaagcaaggctcactgtgggattataaacctcaaagtgaacagactcatagtccctcaagcaaatacatgtatttcttaattctcttgtaaaaattttaattaaattcctcttctaggattataaaatggacatgtatccaccacaaccagcgaaataatacaaagaaaattaatttagcattcacctcccccactaggcaatcagctttaatagtctgatgtggttacttctgcacctttcttcttgcacacattaacacatacaagcatagaggctatcaaatgccacttccccagttatctcaatacaacctgagactggtgcagtggctcatgcctgtaatcccagcattttgggacgccaaggcaggtggatcacttgaggtcaagagttaaagaccagcctggccaacacggtgaaacccccatctctactaaaaatacaaaaattagccaggcatgatggtgcacgcctgtaatcccagctacttgagaggctgaggcataagaattgctcgaacccaggatgcagaggttgcagtgagccaagatcataccactgtactccagccttggggacacagcgagactccatctcaacaaaaaaaaccaacaacatataacctgataataagattaagttgaatttattgtttactgtggtaagggaggccaccaccttgatggagtttggtagtttctttgaaggaggtcaagatcagattttattgaaatttaaagtgtgtcaatacagggatttggctagggcaggtcatgacacagtttaaaaattgtggaaatagcaaggtgagaattttgacaacaacttgcctaagtaagagtctcctggaatagtaaaatgataataaacacaatggaataggaaagccattttaatgtagccagtaagctttgcgagggtagatggctttaactctcagctctactttaaggatgtttcaaggttttattctttttttttggcgctatactattctctgcaacttgcctttctcgcttaacagtgcattgagtattttcctccaagtcaacagatagagattgaactcattgtttttatttttctctattttaaagaacactttaactttttaattataaaatggattgtagaaaagatggaaagtaaggaaagtacaaagaaaaaaatttactcataatattaccactcagaatcattcatactaccactcagagagaagagattgaaagtaagaaaagtacaaaggaaaaaaatactcataatattaccactcggagagaatcactggcgacttccagtttttggtacagcttgtatggaacttggaagttatctgtcacatacaacaagtacaaccagaaaaaagctgaacgaactgaaaattaacaactcttgtgagatttatcaaagaactgagttcatagggcaaaccactgcccccaaagcagaagagacagccaggcagtatattagtccattcctgcagtgctatgaagaactacctggaacggggtaatttataaagaaaaggggttgaaactgactcacagtttcacaggctgtacaggaagcatttctgaggaggcctcaggaaatgtataatcatggtggacagggaaggggaaacaggcacatcttacatggcagaaacaggaggaagagagcaaaggggaaggtgctaccttcccatactcttttaaacaaccagatcttgtgagaactcac

SEQ ID NO: 95379 - DNA, 128468 bp, Homo sapiens
  misc_feature (1)...(128468): n = A,T,C or G
tttcttatcctttctactcgattttctgtcattcttataggtaacagggccattgttatctgatttatccttcttgggttcgtttttgtaatgataagcaggtatttgtatatttaaaacatttcccattcttttcttacacaaaagatatcatactatatttacctattcatactttgtcttattgaaacctcctggaagttactccatatcagttcatagagatcttcctcattatcttttacacttacatagtactccattgtttattttactcaacctgtctcctattcagggtaatttttacccgaagtgccagtggaagagtttagcatgatgtggcggggctggaggaaggaaaagataagaaacaacatagtcatcatagaaaactcaaaaacattatgcttagtgaaaggccaagcacaaaagactgcatattatatgattttatttacatgaactatccaggaagggcccatttattgagatagaaagtaggtcagtggttgtccaggactgtggtgaaaatggggagtgactgcaaatgggcatgagggataatggaaatgttgtgtgattagactgtcacacaactctgtaaataaactgaagtcagtgaattgtacatttaaaacagttgaattttactgcatatcaatgacacctcagtaaaactgtaaaaaaaaatcagcatcaggtggcatgtatgacattcctaacagaatgtgattatttctgattcaaacataattggaagaattaaaccttcttagatgtcatacatacttggttgaaatcttgggaaccttcctccaaatgatatatagtaatcatatatgtgtatatatatccaaatgacatatactaatcatatatatgtatatatgtattatatatgtatattgccaagtgatatacacatatataacataaatgatattaatatgttacttcaaatccaaagtatgtattttttacaacattttctgcttgagggatttagtgaccttatagcccctaaggaaatttacttatattaaactgcttgtggcagaaaggattgactttaattattttaaaaaattgaattatttaataccctgtaggccaggtgcggtggctcacgcctgtaatcccagcactttgggaggccaaggcgggtggatcacgaggtcaggaggtcaagaccatactggctaacacggtgaaaccctgtctctactaaaaaatacaaaaaaaattggccgggcgtggtggcgtgtgcctgtagtcccagctactcgggaggctgaggcaggagaatggcgtgaacccgggaggcggagcttgcagtgagccgagatcacgccactgcactccagcctgggctacagagcgagactccgtctaaaaaaaaagaccttgtagaccacattattatgccttttcttttatcgatgggactctattaagagttttaaaactctagctatgtaataaagttaggaatatagtcttcgactcatctgttctgctctttaaatatttatgctactctgttaggcagccattaaaatgataattattaagactctgtagaaacatggaaagctgttataatacaaatgaaagaagcagagtgccaaatggcttaaatatcacaatttcaaccagtgcaacacatttttatacaagtgtgaaggtctagagcataacagatacaaacaatatttgtgctgtgtgatgggctggtagatgttgctgcattgtatccaaataaactttttttttttttttttagctatcttaagcgtaccataaaggagaatgtagaattaaagggatggtgaacatattggcagctgccagaatttgtaacctgcatttgcagacttttctcagagaaccttcaatactggaaatgtgtgtgatgaagttaaatcattctaagccactagaactcttcccttgtttacctgtggcaaagccattcttattctcttttatggaatctaccaatagagcatgggtggacaatgatttttaggggtggtaactgctgttaatcatttctgttggaggcagaataggaagaaagtggcttgtgctgacacgtaaatgatctagatgagactggaagaatattttgtatgtattgttggtgacttttgcccactggaatgagttgcaaagagttattgagggtgctaaccagttatctctggttagctttgtaattacaaggcattgtcaactatcttgtttgggaaagggaaaagtaagttagatgactctcaagatttcagtggacttgatttttcaatttacctctatccaaatggcttttctgtgtgatagggagcaatcaggtagaaagcataaagcagctacataaacaatttaagaagcctattgtttcagactcagggtctcatagaaatcatattatatgatttatatgattttatgctaaaacaatgtgcagatataccgttcctgttaaaatgttgagctgttatagccatggcagttccatttcagggaaaggaaaaggagctgagaaaggaaagaaagggattgtgaacaaaacagaggaccctgtgtcagatacataggcagtccttgctgttagatctctgatagtatagttaactcagttttccactctggcgtaaacaatttgttttcctgtgtcagatacataggcagtccttgctgttagatctctgataatatagttaactcggttttccactctggcttaaacaatttgttttattctctcttctcaaggaaacatcttcctaaattatattttttagccagccaatcctttgaacagatatatctagtgagcctctcattgctggtggatcaaagtcttaaccagcatccccagtccccccacaacctggttttatctagctcatggaatcatacattctgtcaattcccttttgagtcactcttccaaagatagaggctcatcttttctcttttcttctgatcattcttaactcataccctttcctatacccaagtcttcattgatggtgtcttattactacatttctccccattccagcctactctattctctttttctttggcctcccatagtatttctgtatttacttctgactgggcatttatttttaactatttcaataacaataaaactatagcagtgtcttagcttgaattactgtaacaaaatactatagactgggtagcttaaacaacagacatttattactcacaatgctggatgctgaaaagtctaagatcagagtcccaacagattcacttcctggtgaggactcttttcctggcttgaaaaaggtagatggctaccttcttgctgtatcttcatatggggaggggggcgggtggagagagaaagagagggaaagagagagagagagagagatcatggggccccacttgcatgacctcatctgtttctaattaccactcaaaagacccatctccaaatactatcacactgagggttaggtctttggggacgtaaatacacattcagtctgttacaaatagctaccatttttggtgtttcggatgtgccagctactgttttcagtactttacatgaattaactcattcaatccttacttcaattcaggaagtagataattattcccattttatagataaggaaatgagttactagctgtatgtagtcatacagttagtaagtggcagatctggaattctaccccaagctggaaacagactgtattcttcaccacagctctgaattgccattaataagtatcctgtatagatgttttgttctcttaaaatttacactctttaaggtcaaaggcaaagtctccttgttctttgcttcaccttatgaaatagtcttgtgcctggaacagggagtttgtctataaacatctgtttattgatatgatctattgtcagtggtcagtgaagttctaataggcttttctgggaattttggcttggttggtttgatttggtggttttgtcttgaacctttaattcctcgtgtgagatggttaatgtggctgtcaagaattcaactatgtagctttcattgcctaaaagagtgatgctcagtggtggccgaatatactaatttatatcaaactcaatctcaacttttgttctgtgctttaaagtgagcatttcaagtttgtgtgtttattttaagtaattttttttttttgaggcaaagttttgctcctgttgcccaggctggagtgcaatggcgtgatctcacctcactgcaacctccttctcccgggttcaagcaattctcctgccttaacctcccaaatacctgagattacaggtgcctgccaccacgcctggctaatttttgtatttttagtagagatggggtttcaccatgttggccaggctggtctcgagctcctgacctcaggtgatccacccgcctcggcctcccaaagtgctgggattacagtcatgagccaccgcgcccagccttcttaagtaatattttattatttgggaatttgatatgtcagataaaatgagtaaacgcaacctatacttcatcttctttgtagtattgaatcctgaaactatacttaattttttgcagttcctccttgatttctttgaggaaaggaaagacttcatggagtaaattgtgaacatttgttatgttgaagtgacctttaataggcaccctatgcatacaatgttaaggtgttggatgagattatctttcctagttaagataaaatatttagccaaaaaagcagaagtctaatgttgctgaggtttgtttattgtgtttcttttatctgttgtttctaacagcatactgcttgataaggtaggtactcagaactaggtattttgagtgctctaatggtttatacataagtctgtatattagttggtaatctttgtgaaataaaagctatttctggttgatataataaaaaaatatttggaagggtactggataacttgcagaatcaaggggaaaatgggatcatttgtcagtcttaggaagaataagaattatgacaactgtcacatcttagagtagccaactaggagtatctcagttgttgaatggttcagttctgttttcaagcaatgatatgctcaggatttatgttcttgggagggagtcagatttgctccaagcttaagtcaggtgtgtctactctttcactggggtgattggcaggccatcaaaggcacacaaaatggtagaggaatgtttctaaaggaaaagttggggcaccattaccaaacaaggggaaacaggcaaaaataacagattcctatatccagcaagatttgtctcaaagcagagtggatttaaatgacaactttaacttggactataagtgatttggatattacctggattcattcaacaagttattcttctagaagggttatcttagcagtttaatgcatcagcaagtgttttatgttcaactgtgaaaacttgatttttttctgattacatttacagaaatttatttagctattttcaaacatcacaaatatgtaacatgaattcatatgtaatcattatcccattttaacaacagtcagcattttgccaatcttgtttctgttgattgcatttaaagcattattataagatacttttataattggttctataaaaactcacaagacttatcatgtctgagaacttactttaagaacataaatccaagtatcaaatggtcttaagtctcataccaaaaaacagaacagaagatagccctatgaagtattgcattatttacctggaagtagatttttttttttttttttctgttagtaaggctttttactgacttaagcctgttgaatcaattccttaacaactcacttttcagattacctctaccaaatttgttctggtccttggagtctttgcaggtgaatcagaggttttatttgactctaaaacctggacaccagtatgcctgtgcattgtgtgatagctggatacactctaatttcttttgcagttgaaagatgcatgagtgtgatgcagtccgggacacagatgatcaagctgaaacgtggaaccaaagggcttgtccgcctcttttacctggatgagcaccggacacgcctccgatggcgaccctctaggaagagygagaaggcaaaaagtaaaacaaatctttgaattctttgcttggctggacatagtaacacacgggttatactgagtgggctcttgaagcttcagatctgtggaagttttatacttttataagtttggagatagttgattttggatattgagaggcagaataatgaccatctttggggaatttaaatccataaaagttttcttgtccatgaatgctgtaaatgctaatacttcccctgtgttggagacatgatatatatatatatatatttagttggaatatatggttttacagcctgagatgttttacattcctataaaaggtgagggacattataaagctaatgggctttaaaatgtattgtcatattctgaacactattaagtgattaatgaattaacaacaccatttaaatttatcaagtaaagtcattttgatgtgactcctacttaaagcttctttccctcacactatattagtcagctttccctagagaaacacaatcaataggatagatagatagatagatagatacatagatgtatgagagaggacttagtagaattggctcatgtgattatgaaggccaagaagtcacatgataggtcatctgcaagctggagaaccagggaagctgttggtgtagctcagtttgagtccaaaggcctgagaagcaggggagatgatggtataattccaagtccaaggttgaaggcctgagaacctgggggccactgatgcaagtcccagagtacaaaggtggcagaaccttgggctgagcataggctcatttccctgtgagtcatgtgggaaatgagttgataccagaagaaaattgggaccctgccattaaggcagaagtgaggggtagatggtgtatataaataatcaataggatatacaaacttctgattcctactgaaaaataaacaagcacacagaccaaaaataatttattagtctgaaattatccttcttgccctgtgcttcagtgatccaaaccttcatatttgctctgctaactaaataatgctaatctctgtgattccagccactccacaatctagccattgtctacctttccagttttatctcccattattctccctgttgagctttccaatccaccataagcggcctgctcagcatccctggaatgggccttatctttctatatctgtttctgcctctcctcaggtgtcagcttgttcctctccacttctccaagctctgctctgccttcaccaccttagccctatggcattttctctaggaatgccagttccatgtagctcagctatttgattgtcagaaattctttttcctttcagttttctaacgatcttcttatgcatgttgcaaaacaccaaagtccactctaggtctttgcatattttctacaaatatgtaaactacaaatttgacatagtcattgccaccttttctaccagtctttttgcttcaattgacatatctattttttttttactacaaatttcaacacgtcctgaattattgccttaggagaatgttgtcaagacagctcaggcagcacaagtgttatgcagagaaggtttctagtgggaaaaaacagggcctgggtttcacatttaacctgaaaccacaacttgcaggcagtgaattttttcatacttacttatttatttttttttggagatggaatcttgctctgtcacccaggctgttgtgcagtggcacgatcttggctcactgcaacctccgcctcccaggttcgagcaattctcctgcctcagcctcctgagtagctaggactacaggcacccgccaccgtgcccggccaattttttttttattttagcagagacggggtttcaccatgttgcccaggctggtctcgaactcctgagctcaggcaatctgtccacctcgacctcccaaactgctaggattacaagcgtgagcacccagcctcatacttatttttaatatttaaaatgattttgcttttcttgtttcttagtgcatgtaaagaagtatctttgcctgctgtataactgtgtgtatctcattttcctcacagtacttattgattccatttacaaagtgactgagggccggcagtctgaaatattccacagacaagctgaggggaacttcgaccccagctgctgcttcaccatctaccatggcaaccacatggagtccctggacctcatcacctccaaccccgaggaggcccgcacctggatcacaggcctcaagtacctgatggctggcatcagtgatgaagactcccttgccaaaaggcagaggacccatgaccaatatcctttctagaactttattttcagctctctcttgctctctgtgtatgcgtgtgtgcatttgtgaagtaaggattagactatgttttaatttttcccataattttcctttctctttctttacccctcacaccgtcttctcccctcctgactctcactccaaataaatgaacgcatgaaatgtatggacacttaagcttgtatgaactcaggagcaaaattctttaaagagaccgaatctrgctccacaatcagaggtctccaaatacagcctcaagtttcctaagagagggaaagtgcccattaagtatcattgcctcttttaaatcataggcatattcattaactgtaactgggaaaacactgatttggattagagaaaatcctactttgttataaagtcagtttagtttaacaaatactttgtgagttgcgattagatactgggcactgagctccttcctgctttttctctttctaacttacagtttggaaattgaactgattgataccaaaggggaagttattttttacttactaatatttaccctctcttaattgcttgagaaactggaatctaagtctcattcttgattaaacccatgcttgtggtcctgcagtgctgacaagataaatgattaatggagttggtctgcaggcatccttcttgctgggattgactgggcatatagcaaggcctttctggcctcagtttccttatctgtaaagtgagggtataaggctagttgactccyttgattcccttcttcaccttttgaatggccttaaaatacaggtgtctctgtccttgcagggagtagcgctactcccttgccgtcattagaatgtgtgccctaatttttttcgcaggggttggtgatatatttgtgctgctctggctataatccttcacccagagtattgctggaaaagaatggaaataattcagctcatgaaaggatcttgacagtgtgaaaagtctgagttgatgagccatgaggttttcatcaatattcacagcatgcagataaaggcaactgggatttagaaatgaacaaaacacaaacaggatttaactttctgtgcttaaatctgttggtttgatttctaactctttaacatttggtaaacaacaaccaaccaaaaatactgaatgttttctggtacaagtatcagaaaccgtactaacagtgccttaaacaataaagaatattaattttctcataarcaagagacctgagatggggcagttccaggggcagctacttcactggttcagtgatgtcatcagagacccaggtcctgccattctcaccgtgttggcttcgtcttgcagccgactgccctttggtcagagagaactgctgcagctttaggcagtatctctaaacacagccctaaacagaggtagtagagtttcttctcacaattttttttttttttttttggagayggagtgatggagtcttgctctgtcgtccaggctggagtgcagtggcacaatctcggctcactgcaacctctgcctcctgggttcaagcaattctcctgcctcagcctcctgagtagctgggattacaggtgcctgccaccatgccccgctaattttttttttttttttttgtatttttagtagagcagcatttcaccctgttagccaggatggtcttgatctcctgacctcgtgatctgctcacctcagcctcccaaagtgctgggattacaggcgtaagccaccaggcttggccacgaatctttttttttttttttttttttaaaagagaaaagaaaaacttcccagaaatcccccaaaagacaacttctcatcatttcccaaaattactattgctgcctcattcctaaaccaatctcttgcaggagaaattaactgacataattaaactttgatctctctctttttttcactcttaaaaactgaagacttaggctgggtgcatggctcctggctggaatcacagcactttaggaggctgagggggaaggatcacttgaggccaggagtttgagaccagtctcggcaaaatagtgagaccccatctttacaaacaattaaaaagattagccaggtgtggtgacacatgcctgtagtgccggctactcaggtggctgaggtgggaagattgcctaagcccaggagttggaggcagcggtgagctaccaagaccctgtctcaaaaacaaaaaactaacaaaaaaaccctgaagattctaaagagcttttgtttatgtgggacctatttattgatacttgtcatattagagattaaatgtgagacataaaaatgtgtttatttataataataataaactctgttgcatgttaatatttttataacaagtattttttcaaagcaaaacacgttagaaaaacagtattgcttcactgttttacaaatctctttaatgtctggcaatagaacacatgggttctcttatctgcttctgcattcagtctgttgcgatacgttgttttgattgaagtacacgaagaaaatctggcctcacacagacatgtagttggaaaaggggggaacctcatgtttatggggacctccaggactatactttgaggacagttgcatcaaaccaagatttacacccccgcccccatccagttcccactcatcattaaagtacatggcttttgggtacctgaacaaaatcaaggttgtgtagcaaagaaggaagagcagtggccatggggaagcaaccaaatccagaagcttctagcctcatccagttaactaggacaagttcacagcattccatagctgcaagtcacttatagaagtctctctcataatccttgaaagagatgagttagagatgggcataaatcatctttttkctttgttggttaaaagttttcgaacctgattgtccacgtttactggcacttgaaagttttcatagtctatgggatccgtattctgaaaatatactgtccagaaagcaggtgtactgtggcactacacagagaaacaattttataagamatatagaagcagttgatttttgtgtcagtgaaggaataaaagagaaataataaattgatgaatagtaaagagaaagctgaagtgaaaaatgagaaaggttattttgagtcagggaatcattttcatacatatttgtcagaatttaatagggttttagataattttgtttgtttgtttgtttgtttgaggcggagtctcgctctgtcacccaggctggagtgcagtggtgtgatcttggctcactgcaagctccgcctcctgggttcacgccattctcctgcctcaggctcctgagtagctgggactacaggtgcccgccaccacgccaggctaattttttgtatttttttttttttttgagatggagtctggctctgtcgcccaggctggagtgcagtggcaggatctcggctcactgcaagctccacctcatctgtttacgccattctcctgcctcagcctcccgagtagctgggactacaggcgcccgccaccacgcccggctaattttttgtatttttagtagagacggggtttcaccgtgttagctaggatggtctcyatctcctgacctcgtgatcctcccacctcggcctcccaaagtgctgggattacaggcgtgagccacygcacctggcctagatagtatcttaataatgggatcacatccttaatttgataaacatgtaactacattaatgaagagaacagatttgggatgttcattattagatttcacttaggactgaaaatttcaactgtgaatgaaaaatgagaataatgaaattaaatggctgcatgagaaaatccatccagtctagagcgtaacttatttctgcagtatggccatgctgagtgatggccatgatgcagtactcatacttactagaagaaatccagtgtcattagggatcagaccctggtgctgcactgcctgcggtccagcccccactctgcctgtgctatgcaaatttggatgaattacttatgttcttttgccttcaagtcttttatctgcaacatggtgatgatgataatgacagtgtctgccatatagaggtgtgttaagatcagttgattatatatagtccttagaacactgcctagcacttaataagcagtttacaagtaataggtactgctgtcattgctaaaaagaggtaaagagtggcaaatctttagctttcctattcagataaatgaaagtctgaatactcagcagatctgtatgcaaagatgatggttctggcacttaggctcagcatttttctctatcagaccattctccttcatgttttccccaccttatctcttgaccccatgagggaaattattacttccagaaggctttaggccacctgttatgtatgttataaatccagaccttattcttcccccgtcaaactgctgggcaaatctggcccactccsaatccaggaggatttttgcgtggactcctgagctaagaatgggttttaaatggttaaaaaaaatcaaaagaaaaacattttgtgacctgtgaaaattacttgaaattagaatttcagggttctgaaattttaataaaggttttattggaatttctgaaattccaataaaggtttattggaacacaaccgtgttcattcatttatatctgtatggctgctttctcataacagtgacagagtggaatagttgcagctgagagcaaatgtcctgcaaaacttaaaatattcactatcaggccctttacagaaaagtttgccctcccctgtrctagataggatcattcaatgctttgcatgctcctacagtctcttgatagaaaatcctagatcattacttcacattcagtctcacccagattttctctgaggaatgactgtttctctttttaaaattattatggtgtggctataaattattaattcagggctttattggacactcatatcttaattrtgaagaacatctttaagatatcaggacatttttacctggagttgtatactatgtggaccgttactggaaagaatggttttttcatttatggaatcttagagttggaagggatttcaaggttaaaagttgtgctccttgatattgtaggtgaagaaatggaggctccaggaggtgatatgagtaacccactgtcacaaggccaagtaagcagtagaattaggactactgtacatttcttggtttgattctgcctctgtttttactttaccagttccctaaaccaataatcaaggccgatttccgtgttggtgctaaaggctttgcagacagacacaggcttatcctaaatgtttgtatctgcagaatacacacatgcttagggtttggctgtccctgcctcttctctggagaagactttgagaggcttcgataaagaattatatttgataaagaattatagagtaaaaggataaaaatattactgccgtcagactccttttgtcacttctttgaactccagccatgtactttgtggggcatagagtagtgtccatagttgaaagcccgaagtgggtgctgcgtgccttgaaaacagaagaaaatgagactcaggcacttattagtgattgggccaaatgtttcacccttttggttcttcggttactttccccccagatctggacctcccttaacttccaggggtcatataaaatgaggtcctgacaagtctataaggaaaaattgaactagaaagagctgggctagttattttaaaagttttaaagggaaaaaatatgaaataaggtatttacaaaatatgaagtaaggcgatctgaaaatatcctctacttaattttagaagacataataccttacctttctagttgtttttactttctgaggtataatcttctacagtcataatttgaatcrcatagaaatggaaatatgctgtaccctctcctctgatatacattcattctcccatttcttggtttttaaaactatacctttagcttactttgattctctggtttctttctatctatcaccttattcttttcctctccattacccttcaatattgaagtttaattggttttctaaatatgcacgcagtacttgccttttgtaacctacccctcaacaactatgaatcatccatttgaaaaaatcctttgctaaaagttaactgggaattttcaattcctgtgttaccatttcatctgcattctcactatgtaamgcaacccaaggctcctcccactgaggatcttttaaaatttcagttcacatgatgtaaaccttttgtatctaaactcagcttctaattctcagtcacttaatctcatacctgagctttgagggcacctcctagcacattatgtttgtacttcacattacctgcccgtgatttagaaatttgggccaattaagtgagaaccatcaaagccagtaataggaagagaagcgtggtgtagagacagaccttatgtgtagaagagtgtgctaaatcaggtacaaaagacctgggttgagacctggttctcatactaatttttatcagatttctctctctcctctcattttatgtccttatctgaacaatgatgagattgaactagatggtctaatttgctaaatgtctgagtgggacagagaaaagagaattgaaaagatcatgtaccatggggtattgtgaaggtaaaaagatagtaggtaaaagggcataggagaagataagccctatatttatgatatttggggtttcatcataaagagattcttaaacagaaagtgtcagagagatgtaatactgggccattcctgctacatgccatctgtatgcctcataaacgaagaactctaaccttgtgaatgagaactaatagggacacaagatttgtgttatgaacatggcagcataactgagaaaaactggtcagaaaatgaaaagcaaaaagggataacgtttaaagtcatatagaaatatttatgtttatggagtttgctattggaggtgtgaattaaggtgtcattttcttgctagagtgaaattagaaccagtaatgtagcttttagtatccatgaggttttagtatccatgaggattaggagggtaattcactccttccatttaggatagtgatatagtgttttgcaataatagatttgatatttaatttggataagattgaataagaatgtctgaattaaagatgctcaaaataatttggtttaactctcatttcgcaatggagggaaccaccccccgccccttttttttcttttgagacagagtttcattcttgtcacccaggctggagagcaatcttggctcactgcaacctccacctcccgggttcaagcagttctcctgcctcagcctcacaagttgctgggattacaggcgcctgccaccatgcctagctaatttttgtatttttagtagagacagggtttcaccatgttggccaggctggtctcaaactcctgacctcaggtgatccacctgcctcagcctcacaaagtgttgagattataggcatgagccactgcacccagccgggaacccccttaccccctttatgtgtttcccttccattcctggtttgttgttgtcattgttattgtcatcattattagtagctcatcagagcctatggattgcaggggctcctcaaaataatttcttctcaagttctgtgttactgataaatgtctttgcgagtattctgtgagagagcagttttwaattttgatgagagcacaggtgttttctttgacctttctgcacatgggtgaagcagacctttgaggaagctgataagaatggtgacggcttgctgaatattgaagagatacatcagctgatgcataaactgaatgttaatctgccccgaagaaaagtcagacaaatgtttcaggtaagttttcacaatttcactggccttatataaaatacacagaggttattaacatacttaggtatattaaaaagstattttgttttgttggaagctaatatatgtgctctgtactgttttatttttctttgatgaagaaatgattttgtttcaagtaaaaagactttataaatttaacattcgtccaaaatttcacttcctaaaacgcttttttgttatcgttgctgttttcctgacaaataatggaggaaacttgctccagtccctttgagaggacagtaatacctcatttgcctacttcgcagggctcttgtgaggatcagaataaagactaagtaacatgacaaaaaatagcccttgtctaaaacctcaagagctctgtattttgtttctgaggagttcaggatttagtatccatgaggattaggagggcaattcactcctgccatttagggagctctccagaatttcattcaactccttgttggttagatgaaaggctctttccctgttgatgagtcattgagaaaaattcttgggcccagacttattctgtggcatccagctaggactgcatttaatccttacctgagtaccgaagtgagctctcttaagtttaagtcagggcaaagacaatgttaggctattagaaattactagagtattaatttgtaacaggctattatttgaagataagttgcgtgcataatccatgttttgcaatgattttctaggtgatactttgtacatgtaaaaataagcataggagggcaatatgatgtttaatgtttgtacttgttcttagaggtggtaagagcagagacaacatggggtatgtgttgcaacaataaatggaagacagaggctggctctgttctgtgacccttttaagggtggccctgttcttggttggagatggtttgcattgtgggaaactgagtcccattgcactggagaacagcatgagagaatgggaagaggaggaaggaatgagatttgctgtatagggaacctgagagatggagtgagggactttggagggcaaatgaattatctttaaacatatgggaaggtttgccatgtttctggtattccgtgtcatctcacttttgccctgctgtgagccccacctcctgtctgttcatttgcacaggagctgatcacagcrttgaagaggtagctgctgattcaatgtaagaggccaatcctaaaggggggggacaaagtctgtacctatacaaatcatgatttcttgggtaattattgaaagtaaaatttggaagcatttgttcataattgacccaaagttagcaaaattttaaaaagattttaatgaccactttgactttcaaagctttgtttaataccatataacagttgagtgtacttcacaaattctatgcatttcaaaatgccgttcattccctgtctgtttttgtttacttagaattgtgttcacttagaatgaagaagagcacataagtgggtcagttgcttattatttatccccaatagttttatggttttatgaataattcagccaacctgtaagtaaggcatatgatggaagcttcatgctcaataattactagaaacaattttaacaagaaatcaatccagatggattgtttagacttttctacggagggaaagcagggagttaccaaggatgcccatggctttaagagcatcaactctatctttggagaattaagagagattctctcataggtaaaaattacatttgattggattacagttcagaaaccaatgagagactgttatttttctcaagtgttaaatatatcttctttcttttgttcttgattagtctttttcaagatttctcatttttattggttctttagaaatcgggctttggttttctttctcacgtgtatgttacagctgtttgttttctattttattactttttgcttttgtttataatttattttcctcgcttaattttgtttcacattttttgagttgaattattaacttctttttaaaatctttgctctctagtaatttaagacttcaagtttctaatgttattttataagttttaatatgtagtgtatttttcacttccatatgttttatttcctatctagaattgtattgtttctacaggtttttttttttttaaggtttctttgttgatttataaatttacagtggtcagaacaattggtttgtgtgaggttgattccttataatttgttgaaactttctggccaaatatgtggttgctttataatgttccatgtgtgcttgaagagaatgtgtgctcgaagagaatgtgtgctcacctcttgggatttgtgtactagctcttttatagtaaatattatttcccagtactgaatttcctatttctaactttcatattactttattttctctatgcccttttcaggaagccgacacagatgagaatcagggaactttgacatttgaagagttctgtgttttttacaaaatgatgtctttgagacgagacctttatttgttacttttgagctacagtgacaagaaagatcacctaactgtggaagaactggctcagtttttgaaggtggagcaaaaggtatcattagactgttaaaatgaaagtttacttaaaagtactcatgaaagatatgtctttcttttggggttaaatataggtatactttgaattttgcaaaggtggtaaatatcactagttcacaaaaatcttatctatgagtcatttaaaacagtttctagcagcttttaagacaggaagtgataacttgaacactgggttatataattcttaatcttaaatgtattgagtacagatatgcctattttcccacaaagaaatgaatgttaatattttaatacaatggtaatactttctttatactaatactatgatgtattaatattagtttaaatttatactatatattagtataaattcatattagtataaatttagtcaaatttatttattttaaatataaatttatatttatactaataaaatagctagatatttaactatggcataattcttaactactattgtggtaggtcattggtaattctgatagtaaattgccatttgatcatgtgaaaaggctaagtaaattaggtcctgattagcaaagagaatctctaagtatgtttaaaataaggtgttttaatcttaatattatataggctgaattatggtcagcaaagctaacttctcagtctgctttttaaatatctcctcaaagtctgtttctcactaaagtasaggaataaatgaatgttttattcaaattttttaaccttttatattagacttcttgagaggaggctttggttttgtgcagttgatgaggtttacttttaattctcttaatggaccaatcgtcttaatataaagagctgcttaactcctttgttcattttaagtcagcggcatttagctctgttgaaattgtaaaaaatcatcaaatatttggactatatagtacaataatcagtagaaataattctttctacagtactcacacaaataatcagccagcttgtgcttgaacactttccaattttttaataaaggctttattgagatattattcacataccataaaattcaccatttttaaagtatacatttaagtgttttttagtgtatcaacagagttgtgcaactattggccaggcacggtgtctcatgcctgtaatcccagcactttgggaggctgaggcgggtggatcacctgaggtcaggagtttgagacaagcctagccaacatggcgaaacccagtctctactaaaaatacaaaaattagcwggctgtggtggcgaacccctgtaatctcagctacttgggagtctgaggcagggagaattgcttgaacccaggaggtggaggttgtagtgagctgagattgagcccctgcactccagcctgggcggcagagcgagactccmcctcaaaaaaaaaaaaaaaaaaaaaaagaaagaaaagaaaaagaaaaaaaaaaagggctgggcacggtggcttacacctgtaatcccagcactttgggagactgaggcgggcagatcacctgtggtcgggagttctgaccagcctgaccaacatggagaaacccggtctctactaaaaatacaaaattagccaggtgkggtggcacatgcctataatcccagctattcgggaggctgagacgggagaatgcttgaacgaacccaagaggcggaggttgtggtgagccgagatagcgtcattgcactgcagcctgtgtgacaaaagtgaaactccgtctcaaaaaaaaaaaaaaggaaaaaagagttgtgcaactataaccactatctaatttcagaacattttcggcaccccaagaagaaaccccaaacctattagcaattattctccatttctctcttccaagcatgctgtggcaactaatatttctgtctctattgatttgtctgttatctgttctggacatttcatataaagggaatcatatatgtgacctttgtgactggcttctttcatttggcgtaatgttttcaagattcattcatgttgtagcattatcagtatttcatttcttcttattgccaaataatatatcgttgtatgactataccacattttgtttatatattcatcagttgatggaaatttgggtcatttgctttttgggggctgttacgaataacgctgctgtgaacattcatgtacaggtttttgtgtggacatacgttgtcaagtctgttgaatatatatctgagtggaaaagtngggtcacctaatttgatcccttctttcagtctggatctggatattgcaaggactttatgtgaaccaggataaaattctaccacagaaccccagtgaattaaacattggattaatatctgaatatcagagaganaaatttccactagctcttaagaagtatagctgaccaaagatgtgctggatgactttgacaattgtgttttcttccttgaaggtgttaacaaggatttgagacgctattaatgagattgaaatatgggtgggtgcttggattagtaacatttcagattaattcatttccttgtatgaatagatactatatttcctaggtattgtgctaagtttttgtagtggacaaaacctaccctcagaaagctcaaaataaagacctttttttgatactttatgattttgagagtctatgataaaaggaaagagaatgtgaagaagtaaaacaacatgctttttaacgtttgctggatttttcctttttgaggtagaataaaatttattacaattatcgtgccgtattttttttctggaaatgttacttctttagaagaagtacctttgtaaagatactaaaaatattaattagtaatacattgttaatatacatgaaatcatgctcacttagttttagtgctaatttgaattaaattgaatttgtgaagtgattttcatttgagagtcaattcttttaactttctttaattttctcctacataacctggaaaattatgttactcttggtgtagtctaaaaactatttgacattcataatttgagctagtaaatgctgcttatagattcataaatggcaaaaagtctcactgattcaaaatctacccttatttrtattaacattttatagcatttaaatgccatatttgaattttttaaatgtgagattaatttggtgatcagagtcttcaatgttttgctttagcaagaatgaaaaaagtacaaagtatttggtgaacaaaatccatgtatatgttttttctgaattatttacttattattgagccattggataaaatattttcatggcttttgaaacatatctccataatgctatataaaagatttgtttcagtttataattaacaaaacagtgaayaaatgattagttattaaatggatcacttttagtgctaatatggtagctatagaatgataagttaatgttggtttgattaacattttttgatagcagggatgaatgtttttccatgtttgtttttgaattgtattttttgaactttgaaatgctctttaaaatacagaaaaatctgtatgaattctgtcctgtttttctgttgtttattgcctctgcatgtgtgtgtatgtgtctgtgtgtgtgtgagagagagagagagagaaagagagacagacagacagagacagacacagacagacagacagagacagagactgacaggcagacagactggttttccctcagtaattccaggtggatatctattctatttaaatgccactaaagaaccaaccactagcaccacactattagcttttatttgagaggtagcaggcaatacccaagtaggaaccagttttaatgcctttcttgatgtctctttcaaactcccaaagttaaatgcattaaacatgttttctgataatgtgtttctcttatcgtcttcatcagtaatgctaatcacctcttttcaagcagattaacacttcatttggcatggaagttttaaaaattactagactgtgtggtggaataggagtgagcaggactggatacacaaccttgcttaccttgcaacttgatcacattaacttttcatccttgactttgtgacttataaaatggttttgatagtaatattgcccttgcaagagtagagtgagaattaaatgagatgtggatgtaacttcctagtgcattgcctggtttattagctgcacagatctagccatttccaaggagcaatgtgagattcctagtgggcaagtatccgcacatatacttgactgtaaaattccataggtgaggggaagtgtcttttccacacccatcgctagggcatggcagaggcacttawaacaaaagaccgattaacaagagaaaaacatacaaatttatctaataagtttttaataacacagaggagactttataaggcactgaagacccagagagttaggcaaacctgtgtatttcttatgctagtttgatgaagagtggacagtcatggagaaatatgtttagaggacaaggttatgatctaatggcagtaaatggggaatttagtaaggcgtgtttgttcacacttttcttggcacctctgtgtcttttgctcctttcctctgggtattgggaaggtgctgatggtcactttaatgagggtcgtatggtctgcttcaggggaagctcagaaaattcttcctaggttttatgggtggaagggctggggggaaggccggagatacctttccttttctgctgttttccacaaatgctagggtgcaatattttaggataccgtgtactaaactgcatcaaatctgtacatggttagaattttcttccaaattacttctcttataccctcccactccaagtctgtcatagtgtgatataataaaacatacatttggtctttgttccagttcctggcacagagctcctaaactcttagaatttcctgagaagtatctttgattatttataatgaaccccttttcatcatatctgagttcatgctaatgaggtaactattgttgggcccctggatagtttcaggataggggctggtagccagcaaccaaccatgtgattagataactttctaatacctacttaatattttactttaccttagtatcataatcacatatgttttagaaataacagattcacttttatgaattttgttgttgctttcttaagaattaaacagwtagtgttattagcaaaatgctttgtcaaaattagttattttaagtagtttgatagtttggcaaaggcagagattctttattaacaatgttagccgtaagacaggtagaaaaagggaattgggtaatagaaatgtctatattttcccttagaggatacatcctttctacatctttactcctctgtggagtctgttatataactacttctccatccttacttgcagaactctcatagtgtactggaaagaacattagaccaggagtccaaaacacctgcattccacacactgcaagctttagtggttggagaatcaatcatgattgtttctgagccttggtttcctgatccatgcaaagggagatgatacctgcctttcctatctcacagtgtcaaattgaacattgcaatgatgaacaggaaagtcctttgcccaagatattcagaagtgtggcaatgtgaggaattaaagttaaaaggtataaactactgacttcaaattcattcaggctagtggaattaccccagttcatttgaatagcaatactggatgtcacttgctaaggrgcatgtgtttcttctctcattttagttttgttgacattctgccagtaaattttagttagggaaaacagaagccagaattctgtgacatttgttcctggcagatgattaactgtatatagtttaattttctaaattagcttgaagctacttacatatgagcatgactcaaaagaaatctataaaattataaaaaaagtgatcatacatcaagaggtaaaaatcacaaaggaaaattttaatgtactgaaactttgtttatatgtggtccactttattaagcaccacaaaattaaagggcagagtaggaaaatatttgtaacatacaaaagagagaaatagtgaatttccttaatgtggcaagtactttcctagaccattgaggaaaaaaaaaacaatggaaaaatgagtaaaacacttgaaacctwtacaaaatcatacaaagtcaataaacctatgaaaatgttcaccctttattagtaattcaaaaatctgaaataaaaccaagttatttattttttagagacagggtctctgtcacccaggctggagtgcagtgggtgcgatcatggatcgtataaactccaactcctgagctcaagcaatcttcctgcctcagcctcctgagtagttgggactacaggtgtgtatcatcacacccagctaatttttaataatctgttttagagacagggtctcaccatgctatctaggctaggagacaatttctttcccatcgtattagtaaagattaaaaaatatgccaccaaacgtagtgtccatctcttctatttctggtgaaattatagaatgatactggagtagttttacaatctataacatttaatataattgataaaactttggccaaaccattttactttaataattcatcctaagaaaatagctctgtatttaaaaattgttgtaaagttgtgcatttcaacattctttaaaatagtgttaagatttattttattagattggacacaatctaactgtgtagaaagagtcgttagtcaagagtttcgtggggttttgagtttcaaaactggattttcacaatggcacaaatttgaggcaatttgatgatgtgtgtcacagtaattcattagcttctgataacataagattggtgcagacaccaggatattcaacttttataggtttactcagttgtgaaatgaaatatcactgctggccacatatgctgtcaagggttttatgaaatcaaatattggcctgtgggtcagatttttattttactgaagctctcagaagattgaatttatgcctttgacaggtccaattgctgtttgattaggactttcattcttaaaacacggctgtgccaagggaattctcactatcttttataaccatgaggaagtgccagtatagccagaaattacctggctgagatttctctttcttctcttcctttcatctacagataaaggatcacagatatccactaatctgtggttccgaagtatttactagagttgattgagagtttttgttttgttttgttttgttttgctttgtttcattccccacccaccccaacctcatatttgccaaacaaccacctacatctcctccagagttcctatccatttcttggcactggagctgagtgttttttttgttccatcctttttagtgttttggttctggagtgacaatttgatttcattttcccatccccttggcaacctttcttagcaagcccctatgttctttatatttttttgtttcttatggattgaggaagaaggaagagaaggcaggaacattgaagcgcctttatatagttggaaaatcctcctagccaggcccagtggtttgcccctgtaatcccagctacgggggcaggcaggaggatcacttgagccctggagttcaagatcagtctgaacaatatagtgagaccccttctcttaaacaaaaattagttgggtgtggtggtgcttgcccttagtcccagctacttgcggggtggaggtgggaggactgcttgagcctgggagttccaggctgcagtgagctatgattgtgcctgggccacagagcaagactctgtctctaaaatgaaataacttaaaaaatttaaaattttctgctagctgttatctaagagcaaaggctacctttattgtaagtcaaaagtaggtttctgtttatataaatgtttcatctgaaatatgcatgtggatagttaattccaagaggattttcagagatttcctgtttccctgctacagggccatctccttattgtaatctgatatagatctatacattacccgtgtagtagctctgaaaattgcayctttagcccctttattctttctggtaaaatgtttctttgatcattctgatccaattataggaatcatatgtgccctctcccttccttacccttcattgaatccagaatggtttggtaagagttatggtcattctaatcattctaatcttctctctcatgagaaataattatagtctcttttgcttgtaactatcccattctggtgataatgtatctttatcttttttgcaccttcctcatataaaagcattcctttgaggtgttttcctgaatttctgtatcatttttctttttatttatttattttttttttagatggggtcttgctctgtcacacaggctggagtgcagtggtgctgtctcggctcactgcaacctctgactgctgggttcaagcgattctcctgcctcagtctcccaagaagctgggattgtaggtgcccgccaccatacctggctgatttttgtgtttttagtagagatggggtttcaccacgttggcaaggctggcctcgaactcctgacctcaagtgatccgcccaccttggcctcccaaagtgctgggaatacaggcatgagccaccatgcctggctgatttttcttaattattcacaattaaagcagttgagagatcactcagagtaattatatcttgcaatatttttgctgcattggctatatttcccagataacattttctgtgaaatcgtctattcaaatgctgtgaaatgtgtggtttcgttttaggatgaattagaggtagctagtttgaggaggttaatagttaccgtggttgtcttattcagttgaatatgaactgaccattcatttagaggtgtttcttcactccctcttgaaattaccccaaaatacagtaaagacaatccccctctgtaaaaccacagatacaaagagaacaggagaggagcaacaaaattttaaaacttgtctgatttaaaggagaccccagagcactgaaattcaatctcatagagtgagaagcctcgaagcaactccatttgcccaggggaagcccctgataagctcaaaaattgatgttagttacatgatattcctgaaaagaggaaaagaggggttgaaaacaagcattggttgaaagtctgtttaaratatggttagggcttcagattttctcctccaacccttgtagcagggcaactgtcccttctctaccctggcataaaactgtatgtaagaggtaaggggggctgggtatggtggcttactcctgtaatcccagtactttgggaggccgaggcaggcagatcacttgaggtcaggagtttgagaccagcctggccaatatggtgaaaccccgtctccactaaaaatgcaaaaaattatctgggcgtggtgatgcatgcttgtagtcccagctactcgggaggctgaggcaggagaatcgcttgaaccctggaggtggaggttgcatttggctgagattgtgccactgcactccagcctgggcaacagagtgagactctatctaaaaaaaaagaggtaagaggatttgactaagtgatgccacacacggctgagtgtgggtactatatggaaaacatggggattatgaagatggctataataactgccatattcctgtacatatgtgtctttgcaatgcacctttgccactccttccaccaagaattgaattctattttcctgcttcttcaatctgtgccagtttaatgacttgctttgattaataaattgtggtaggactgatgtacaggttctggagcctaggcctcagggagtcttgaagatttcatcctcaccctgttggaactgtgggactatcatgtgaggaaaccaggtgagtttccttggggatgagagactacatagagaaagaggcccagccaacagccagcaccaaccacagacatgtgggtgaggccatcttgtaccatctggcaagtaaccagatgcctgtagtcacatgaagaactctaaatgagaacagcagaataaccatccaactgaacccagtctgacttgccaccctacacaattgttatcaaataaacagtcgttgttttaagtttctargttatggggtggtttgtttcacagaagtagagaatgaatgcaagggttagtgaccatctatgcattgagatgtgaaaaccatagccctcttccaatactcagttcccaggttattggttttaaataaccaaggcttaccaatgtttgaggaaatcctctgctataaagaacagagactactaaagcaaataaatagagacaataaacttggaggaaacagaggtaatgcaaggaggaggaaactttaaaaattattgttaatgttatcagaatgattcaaatattgttgccataaagcaagagcaagatgctatgacagattgggcacagtggctcttgcttaaaattccagcacattgggaggccaaggtgggaagattgcttgaggccaggagttcgagaccagcctgggcaacatagctacaccctgtctctacaaaataaaaataagaataaaaataaaaataaaaaaatcagccaggtgcagtggtgtgtggctgtagtccccactacatgggatgctgaggaaggaggatcacttgattccaggatttggaggctgcagtgcgccatgactgtgccactgcactccagtctgggtgacagaatgaggacctgtctcttaagaaataaaaggatgccacgagaaaagaagattcagagaaaaaaaaaatctcttggaaattaaaagcatgagaagaacaaacaaaaaagaaatagaaaaaaataagagaaaatagaagggagaaacttatcaaataaataatacaaaaaatttattagcatggaaaggtaagattctctagactgacaaacccaaacgagggccaacctcagtataaagatccacaaagaggcaaatcagagtgaaatttcacagtgccaaggataaagtggaaccctgagtgcttgtaaaaagagaaaactaaactaaactaattagcaaacaacaactggtcctgtgaaaaggactggaatcagaatggcatcagatttctcaacagcagttctggaagccaaaaatcgtgagagcaatgattcaacctagaattttctgccaaaaactgtcaaacaaatgtgtgtgtggaataaaagacaaatacaccagagcacacacaaaaacacatgagggaaataaataatttacttcctgagagctctttcacaagagtgacagagtaaagtcagagcaaaagctgaatacagttccagaacccaaccagaaggaaagaaggagaacttttgtagggagaaaaaaagcacaattcatggattatctgttgcctttgattatgtggaacttgagagaccattagagtcattgggaagaatttgtgataggtacattaaaagttaaccaaatgagtaggaatgtcagcaagtaatcataaaaaatgttctgtgagaaaggaaacacaatcacagtgtacaacggattcagcattgttcaacattcgcatacttggaataatttaaacaccatatatttcataaaaactggatgatataattatgctgagaggacaggcagagaggcagatctgcagatccagaagatcttattattatgttaaagatctaacttaatatctaacacagtaagaagtcaataatttttaaagtgtacaatatagcattataaatmcaataattaggaatagaaagatggccgggtgcggtggctcacacctgtaatcccagtactttgggaggccgaggtgggcagatcacctgaggtcaggagttcgagaccaacctggccaacatggtgaaaccctgtttctactaaaatacaaaatgagcagggcatggtggcgtgtgccagtaatcccagctacatgggaggctgaggcaggagaattgcttgaacgcggtaagcagaggttgcagtgaggtccctgctccccagcctgggtgacagggcaagactccatctccaaatatatatataaagaccgatttcaaaagaaatatctagaaatattggcattattgactttggggagtgattctgggtataggcgggggacttctggttttagttataaagatcttagttttgacttatttagttacaaatataaccctttgataaaaataagctagtaaggtttagcaatattagaatttttgcaaatgatacattgattttacacttggtgttgttgagaatcatagccataagaaatataattgtttaccccttctgactttgttttaaattttcattcacagggaaagttttgctaaaaaacttacaggaagtctgaggataaataggtagtgtcagaatatgggtattttatagatctatgactagtttctacaacttgtttatctgaaattagttgtcctttaatgtgaggaccagtgagtcttttctcttctggatgagactaaagaactacagtaaataaaggaaaagagaatggagtctaatcttgaataataaaataagttaaattgtaataattgatttgaagtaaagaaatgatttaggagtttcagttatattgaaattaaaaacacctatcagttttaaaagtaagcattttaatttttcaatagaaataaagaaaaatgcccagagaatagttatacaagaaagtgctttggacttgaagtcaagaaggtccaaatttgatctttggttctgcctcttacagttttgtgactttgatggtgatgtttaattaacctctctcaacattaatttttctatctacaaggcagggataaaaacactaaatttacaagactattgtaagaattatttaagattgtgtgtgtaaaagctctttactgcacattgacagcattatataaatgtagagtcattattaaaataatcacattttatcttaagttcttcttttagcaccagttgcctgtagaaagaacaatattcagtattggagacagcaagtgactcagatgttcaatgacaaacaaaactgtcaagtgaactccataggaaacagggttagagtagggagaaattcctatttctctctatcagctctgtcaaataggaagcaaaacagggtgaagaaggacagtaaagagcattaacctatgttgaaccttcagtcatacaataaacttataacttaaatgaagtcttaaaaaactcaattacgtaaaatgcaggattttgctgttgggagattaattaaatgagatcaggggatggggaaggttgggagtcgattgactcttacatttcaattctcattattatggggttttactgtattttgcaaagagtcaatccttaatacctcaattttggtagaaagtagattattttttcccattaattcttctacggtggccagaaatttgtgaacttcacagaatgcttactaatatttttgctaattcaatgaatattttcaaatatgatgtttttggttataaaagtcttcactgtatcctgaattagtaacatattctctgctcacctgcagttagctccatcatctcagtgaattagttgttttgttgtttcttcattgcttttgttaagattcatgggcttctggtagtctacctgagtccagtttaagacctctacatttctgaacaaatgggcttataaacaaaataattgcaaagtgaacttagtcttcacacggcatgtaaaattgttatcaatttggttcattttattttgtgaaaaattatttatctttagactgcatgtgccaaatctctctagctcacagcagacaaattaatgagctgctcaaagcctgcctgggtcagtagagttccttggaggtattgcagtttcatttatttataatactttcaggtggtttctggtaatatgggcccctaaatagaataagaattataaaatttactcaaaggatgcatcagccaccatgctagtttgaaaagaaagaaatcattgtgtgttcttttgaactgacaaaaaacagccatacagcagtgcttcacccccagtttaaatagactgtttagaaaaactagattttattaaaatgtaagtattaaacctaaacaaaaatggaatatttgagaaaatataattaaaatatgaaatactagctcacaaaattagcttcctctataattattcattaatattttaaaatgtcaatgttagattgtgggactaaatggatttttgatcaaaatatcacattcttaatgttgctgtttaattaaagaaattatttctgaagagtttacctttcccagtgacactcagcatatattgttcatgtagcaaatttgagactgactcaataatattaatattaataaatagcatatactgcctttttggtgccacacaatgtttttgcaaatatcaattcatttaatccttatcactccactatcaggtagccacagaaaaggtaagtaacctcttcaatgtcacactattaataatataaactaggtgatttgaacgcaagcagtctagctccagagttgttatgctagctacctcacctagcttttcatttttatttcctcttgctaacctttgtgttcctgwattaccatggcagactgctctgctcagtggatggttgtatggatacaaacacacacacacacacacacacacacacagaggtacatttacytagaaacattctgttttggtagggaatcattctttttctacatatatttatgatcagcaaactttagtgcttgtgtaggaaacgttaatttttgcagatagctgctagcttatagtgagtgtatttttggcaatggattcacattgataactgattttatttcatttcttcacagagaacatttgtctaatagttgaagggctatttttgctgattcaatctaaaaaatgcataggaagattgaatcatggtcattctccaaagataaaatagctgtgacactaataaccccaaacaatgctcatttaggtactttgtacggtgtgaagaatgcaaaatcagtaaatgtctttctactgtggaggaacatagtttatgaaattgcaggtactctactagtattctgtttttcttagatgaataatgtgacaacggactattgtcttgacatcataaagaagtttgaagtttcagaagaaaataaggtgaaaaatgttcttggcatagaaggtaaaataaccaatattctttatttctcatttcttgattcagcctgttaagttaaattccagcaaaagtttttaggaaaagaaatcaggacatatccatgggattatattaataaataattcaaacaaaatctacaacacacatatattttcctgcaaagcraagaccatgatgttgctatttstcttacttttgcaatgcccataagcattttccacttcaagcaagtctacctggtaccaccacgtgtgatggatgccatgacatatttgggcttttctcaactggctaatttttggaaattagyctgataatttcatgaagggaaattcagtcctaaaataagttatccctgagactagtgacttgccatgtttcctttaaaatggtagcaactgactgtatttcctaattggtagctttgcagaagctgttggaaccacaaatctcattaatacaatgacttcattttttagttgaggaagtgaggctcaaataagttaaataatttgcccacagttatatacccagaatctagctcctgaaatgttagacgtaaataatatggcagaaatatagctacatgtatgtatatgtatttaaaatatgtaaagaaatactatgtaggctgccacccaagaggaggatctttcaggcagagcagatgatctttaatgaaagaccagctgcctrtaagagcatgcaaagccatggtttatctcaccaattttgaccgttggccccctcatttcttctgctcccagatcagtgtgaacaaggggggtttaataccatctatttacttcctgtggtggtaggtaattaaagtgaagaggaataatttaaaatcttagatcattagccgggtgtggtggctcacacctgtaatcagcactttgggaggctgagggagggggatcacttgaggccaggagtttgagaccagcctggccaacatggtgaaaccccatctctactaaaaatacaaaaattagctgggcatggtggcgcatgcctgtaatcccagctactcaggaaactgaggcacgagagtcccttgagcctgggaggtggaggttgcagtgagccgagaccgtgccactgcatttcaacctgggtgacagartgagactctgtctcaaaaaataaaataataaaataaaataaaatcttatatcattaaaaactgttttaaaaacaaccagagatgataaactaacttgggccttttctgtgctaagaaatgaatcttttctttggtgaggcctgaaaagatggaattaaacctggtttcctaagttatggacataaaagttggcatgaagaaattaagtctctgaggatatttacaaatataattataccaaatgatttttgaaaacttgaaataatttaccctaataattattctatttaggtacttgtgagtcatccatgtatttatttgttatattagtgaaaacctctttgacccaggcattatattttgaaagattgtaaaaaaactgatagggttttctaaataatcttaaaggactatttcaaagttataaaatgtgccagccattagcagcatttttttcaaaccaatttggttgtcaatcacaccctgaatttagacagtgtttaacttttggcttactaccttaactatggcactgactttactgtttttcagatgaacgtaataacctatcaattgctggttgttcagggtacctcttggtatcactatggttttaacatggcatcagtcacactgcataagcatarcttgagttcagtcatcactaaacagcttggcccctcctctacctagtcaaaattcttaaaaagtcaacatatatatacacacatatatatatgtgtgtatatatacacgtatatatatgtatatatacgtgtatatatacgtatatatatgtatatatatgtgtatatatacgtatatatatgtatatatatgtgtatatatatgtgtatatacgtgtatatatgtatgtgtatatatgtatatatacatatatatgtatatatacatatatatgtatatatacatatatatatgtatatatatattaggttatatttaaaaggctattcctaaaagtcacatttcattttttgacactgtctatttgactgtattaggctgttcttgtgttgccattaggaaatacctggccgggcacagtggctcacgcctgtaatctcagcactttgggaagccgaggcgggcagatcacatgaggtcaggaattcaagaccagcctggccaacatggtgaaaccccatctctactaaaaatgcaaaaaaattagctacacgcagtggcgcatgcctgtagtcccagctactcagaaggctgaggctggagaatctcttgaacctgggaggcggaggttgcagtgagccaagatcgtgccattgcactccagcctgggcgacaaagcaagactccatctcaaaaaaaaaaaaataaataaaataaaataaagaaggaaagaaagaaagaaatacccgaggctaggtaatttataaagaagagttttaattggctcacattctacaggttgtaccagaagcatggtgccagcatctgcttggcttctctggggaggctggagggagcttttactcatggtagaaggtgaagtgggaggaaacaggtcacgtggcttgagctggagcaggagagagagtggagtggagagagccatatacttttaaacaaacagatctcaggagaactcatgcgctactgcaaagacagcaccaagccttgagggrtccacccccatgatccatacacctcccaccagggcccacctccaacataggggattatatttcaacatgagatttgggtggaacaaatatctaaaccatactattgacctcaagcaaatctctcattgctccagttttccccacaaatgccatcctgagggtaaataagataatcattatgaacattttttgaccccttttgcccctcttagagccattaagtatatatgctttgaaagctgtagtaagtcactctctttcttccaaaggcttcacgaacttcatgcgtagtcctgcctgtgacatatttaacccattgcaccatgaagtgtaccaagacatggatcagcccctctgcaactactacattgcttcctctcacaatacatacctgactggagaccagctcctttctcagtccaaagtggatatgtatgcacgggtgctgcaagagggctgtcgctgtgtggaaggtacgtgcactttttctgagctccggtgtgtatgggtgaccctgtcctttaatcagtctgtcgagtctagtataaagaatggagacctaaaacacactctcacactaattagtactacttttctgctcattgtwaagtcaatcttaactcataattctctctggctccttattgttcaattgggagaaagagatctgtgttagcagttgtgaagcataccgttagttgctgagaaattatgatgaaaattaaagtcttcctagaaagatatntttaattatacaattgcaaaaatagttcaggagagctctttgtttttattttttaattttttaattttttattttttttgagatggagtctcgctctgtcaccaggatggagtgtagtggcacgatctaggctcagtgcaatctccacctcccaggttcaagcgattctccttcctcagcctcccaagtagctgggattacaggtgcacaccaccacacccaactaattttttttgtatttttagtagagacggggtttcaccatgttggccaggatggcctcgatctctgacctcatgatccacccacctcagcctcccgaagtgctgggattacaggtgtgagcccccgcgcctggccaagctctttgtttttaggatacttcatggtctatcaattagccaacatttattaaacttctagtgggttccaggtggtgagtatacaggagtaagtaaaatatgaattctgtcttcagggagttcacagtctagtagaagggatgaacattttttttataaaataatataaaccaggcatggtattgtacacctatagttttagctacctgggaggctgaggtgggaggattgcttgggaccaggagttcaaagctgcagtgtgctgtgattgtgcctgtgaatagctattgcattccagtctgagcaacacagtgagaccccacctgtgagagagagagagagacagagagagagaaacaatgtgaaaatttcaccggttggttgatatacaatggtatagaagtggtggtatagagaatgaagtgcgaggtaaaatgtgatgagaaatcagttaggctaggaagggagctgagggtcagctgtaaagggttttgagtgctatggtgaggaatttcattttagtttttggtaatgaggggccagtgaaaggttttaatatctatagtgatatgatcagatttgcagttgagaaagattatttgggcaacagtgtgaaaggataattttaaaagtttttttttttttttgacatgtgtgtttgtggagggagaagggaggtgaaactggaagcaggaagttggtgggaaggctatcacagtgaatccaagggaggattccaaaatcttggactaagtgagaaagagatgatgttaaggatgcagtattgaagaggtaaacttagtggaaactggtgagagaaaagaataaaaggaacgaaggggagagctagaaggtggatggtgccactccatactatagggaatctgagaacaagagtctaaatgagtccagttttccatctgctgaatttagattgattttgtaacatgtatgtggacatctttatcagtcatttggataacaatgtctgaacttaatgaagagtctgggcaagataaggattccaaaatgctgaacttggtatgtggtagttaaaatcatggaagtgtacaagatcacttacagagagaaggggaaaagaggaagaggcctgaggacttcagcaatacaacgattaggagtagggagcacaaggggagccagcaaggccagtgcagagaacaggagtacttggatctaaaggatgaaagggttagaaaggaatagccagaaatgccacagggaacagaaaaataaaataaaactaagtatccaatttagttgtatttgacagcagggaattgttggtggcctttgctatgtaggttggtgatatgttagtgggcagttggttacctgctgtcgattggtgactgggcatttttctgcatccaaatgtttgatgatataggctggggggcaactttgagacttggaagtgggggaaataatataggtttgttttcaggtggaataaaggggacaagagatttttgaaagggcgcatgcctgttttctcagagaagtaggagagaacatcatccactcagtataaagtgagtggagattggccacagggcttaaaatcagcaaattgttaaagaagtcatcagagaatgggaaaggaattgacaaggtaagtcagggaagcccaagctgatttcaaaaacagtctttactgattcaaaatctggatgcttagactccctttgatcccatccccagcagtactcatctgcttagagaagtagtgaagacagattatggaattgatccaagtctcgggatttctagatcatattaaatatcttcaaggtattggtgagagctcttataagtaactgacaggggctccatggttctaggaaaggaagcgaagtggatagggggccataaaataagattaagagactagaagactcaaataaatagaaaaatgtggaaagttgtcatcacactttaagaaaatgagaacagagctgtcattgcaatgggatttagtcacaggtgacaatttccagattgtgtcatgggtgagcatcatggaaacagagtgaagcaagggattattggcctggaggaggtcagtgctaagggattaaatagawggctacatggtgttttaatttacaaagtatgcagacaggagcagattggagattaaaactataaaccagacacttaagtataaaaacaatgtggccaggcgcagtggctcatgcctgtaatcccagcactttaggaggctgagacaggctgaggcttgaggtcaggagtttgagaccagcctggccaacatggtgaaaccgcatctctactaaaactgcaagaattatccgggcatggtggcatgcacctgtagtcccagctgctcaggaggctgaggcaggagaatcacttgaacccaggaggcagaggttgcagtgagccgagatcatgcctttgcactccagcctgggcaacagaatgagattccatcaaaaaaaaagtactggagaggatgtggagaaataggaacacttttacactgttggtgggactgtaaactagttcaaccattgtggaagtcagtgtggcgattcctcagggatctagaactagaaataccatttgacccagccatcccattactgggtatatgcccaaaggactataaatcatgctgctataaagacacatgcacacgtatgtttattgcggcattattcacaatagcaaaggcttggaaccaacccaaatgtccaacaatgatagactggattaagaaaatgtggcacatatacaccatggaatactatgcagccataaaaaatgatgagttcatgtcctttgtagggacatggatgaaattggaaatcatcattctcaggaaactatcgcaagaacaaaaaaccaaactccgcatattctcactcataggtgggaattgaacaatgagagcacatggacacaggaaggggaacatcacactctggggactgttgtggggtggggggaggggggagggatagcattgggagatatacctaatgctagatgacgagttagtgggtgcagcgcaccagcatggcacatgtatacatatgtaactaacctgcacaatgtgcacatgccaccctaaaacttaaagtataataataataagaaataataattaaaaaaaaaagaaaaggtgattagaagatgccagaaaggtatagctggatagaataagcttcaaaagaggagagattttttaatgagtgtagaagaacaatcatttaaaagtagcagtaaaggcatagataatgccttttggtttatatctaaatcttctgtgatttatacaaaagagcatccttggagaaaggaagtagtgccctcgaaggtaagctggtgcttagccagggtaaggaggttgaggagaattccaaagggagtctgaagataaaagggagttggtttatgattgaatggagatgccatgagtcacagggaattgtcttttgattttggtggggaatgtgctgggagtcagcagtgggatgactggttttcctaggcatggtggaaagtgcagggcaatgaataaagcagtaggacaatgagataagactgcttaactggaagggcctttctttgtcagatagtttctagcttgaattttctgctacaaaagtgacagtaatgttattaaggtaaatcaacatgcttaaaaaatgggcaggtattaaaaactacctgcatacagaaacattaggatgactacaaattgaatgctctgtaaatttagtcgttcaatagtatttttgcaatagttgcagagagtacataccagcaatagtgattaacaattgagtagcttaaacaactgaataatgaagatgctataaaatattaagaggaagaaaatcctttcaagcagtaagakgtctcaaggtgacattctgctctcagccattattcagccctttgtttgcttagcactcaacaagttttcatgtctggcatgcatagagatgccctgagcacacagcctcattggattcacactgatggttgcctatcattgtaaatagtgacattttcttggaggttcaagtacagaaaatgacttttagtgactccatgaagtgacagtcaactctagacaattttacaactttgttaattctgtctcttctgctctatttcttttgcttttcagttctttcagatacctaggcttctctttttggtttacctgtccaaaatcagtatcctacccaagcctaaccatgtttctgtcattaattccttataccgactcaaaacttctaaacctccagctttgtttggggtattaagaaggaaagttatctgattaagataattcatgataaagtacacatgatttttagttgttgcttttccagtagtcttttaattctaaaatgggagcttttggaaattgtgtgcagtagatgacattgaacaagagccttctcttgtaccttcttacttcctgttttccagtcgctgctgtaatataaagaagctacttggctctgtatgtccaaaaggttaccttctccagatacttgtacaaacgaggctatgcacagctatggtataattttraaggatatgyaattttttatatgctcccaaatatcttcctcaccagcttgcatcagtaaattctttccctagtatttggcttaaagttcttattattagaataatctataactggacaatagaagttgaactactatttctggaatgtttttcttgaggagaataattatatttatctcagagacttggccagctttgcatttgacctatttctttgtatttgtttgttcattttgtttttgtgtgtttgacctatttcttattggaaatagtggttgtcaccttggatttgaatgtattgtaggaaggaaaagaggacctactatgattttagcaactttagtggaccaggtcctggctaagtgttttccgtgcattctcatttaattcttataacaccaccaagaaagagggaataatctcttcttaagagattcaactcatagttaaataaatggcttaagttcccgaggttaggaagcttggaagctgggatttgaactcaggttggtctgactsttgaattgcactgttctccagaaagtctgtgtgtttttggaggagcaagcattgaatgacatgaccagccctaaggaattgaatgaggctgtcakgtcatataaggatggccagagaaagtgaggagcacaacatagaggrgaggttggcattaaaaggaggaatttgcttcatttgtgattaggcctaccacctaaatatttagatgttcctgaaggcttagcatttggtgacatgatctctgtggtcctcctaacaatatctgtcagtcctgtgatttgaagaccttagtccacatttgaagcttgggcacagagacaccagtgtgtgtatagtagtctcctcttatctgcggtttcattttccatggtttcagttagccatggtcagctgcaccccgaaaatattaaatagaaattccagagagaaacaacatataagttttaagttgtgtaccattctaagtagtgtgatgaaatctcacaccgtcctactctgtcccttcttcaccacaagaggaaaggtgatacagtaaaatatcttgagagagaaaccacattcacataacttttattgcagtataattgttctgttttactattagttattgtgaatatcttactgacctaatctataaactaaactttattataggtatgtatatgtaggaaaaaaacaagggtgtatgtataaggttcagtactttgcagtttcaggcatctaccgggagccttagaatttatctcccgaggataaaggggtactgctgtatacctagtggcattttatctgccatgtggccagatgaaggtatttttattcttaaacagctgcagttagaatttaaagaacacaatttatagaatgtagccggtcatgggttgaaaatttcaggtcccacagctgttttctgaagcagcttttgctaagtgtagcacttgagagatggagaagaatgattctacagtattttcacactattgtgacctggaggttctctctactttcaagcttctattttggtaatgttatgttttccatctccattagttcagctgcaataatgtccttagtcaggatatgtacacagtgtcttgaggaagagcaataagtctttttggtgaggtgggcttgtcagcaaatcaaatggataacatttttacatggccttttattcgcttgattttcagcctgagttgcttaataaatatggatgttctgtccaggggattttcattctcattatgggactgatgttgcattgctgttgtaatcggtttatgacttctccagttatctctgggagtgctatcagggtggaacgtctttaagctccattatgaaaagctgtcatgttagctatttggccttcagaatggctaaatctttgttggagttgctttgcttttggggttccatagtgtgtaacctgattgaaaaatgggccccggctcttttatgagcaggggaattggacagaggatttctaccttgccaacattcccatttacagcattagcacttacaggaaacttcactgccatttgaacctggccacgaatgccacatattaagatgccagtaccatttgggaatgttgttatcttcatctcacagacaagtgatggaattagatataaaaattgaacattaggagaacctcctatcctcagttatgaatattctgcctatgttgtaaatactagccaaagagtgccttctttcatgactcgtgtagttttaatttttgatgtagacaccataagcaagtcgggcaaggtattgctttgtcgcctttgcattcttttggaaaagctattagttcctttatgaagaatcctgttatgctctttcttctccaagaagggaccacaaaacagggtaaaaattgttaaaattatatattatttgaaacacctgttaagttttttccataattatttccagagacaaattaaagactgtcaagtacatggaaaaatatggatgacgcttctcttgtgagaagatgttgttgatacatatgacctcatttgcaggccccaaggaatagtagacactctctgatagtatctcagaacctttggttttcttaacagcattttatccttaaacattgtttttagcattcctgtggtatcaactgtgaatgttttttcttcttttattttttctatttttttcccatagggatatttgaayagccagtgtttagtggattaatatagatagctgtattagtcggggttctgcagagaaacagaaccaataagatatgtagagaaagcaagagattgagattcgttgtctgatttttaaggaattgactctcatgcttgtgggtgttggcaaatctgaaatctgtagagctggccagcaggctggaattcaggcagtttctgtgttgcagtgttgagaatttatccttgaagggtaacctcagtctttgctcttaaggctctcagctgactgggcgaggcccactcacattgtggagcataatcggctttacccaaagcctactgatttaaatgttaatcctatttttaaaatatcttcacagaacatatagactggtgtttgaccaaataactgaacatsatagccaagcctcattgacatgaaaaattaaccattacaatcacattgtaattatggtgagcattttgaatattttaaaagaaaaacagagatatctcctggggtaatacacaaaacacacatataggggaaggtgctactaaaatagagaacatatgtggttcacaactgtgtggtcctaattaaaggcagagtttcttttattttgagacggagtttcactcttgttgcccaggctggagttgcaatgtcacgagctcgactcactgcatcctccacctcccgggttcaagcgattctcctgcctcagcctcctgagtagctgggattacaggcatccgccaccacacacagctaatttttgtatttttagcggagaaggggtttcaccatgttggccaggccggtctcgaactctaaaggcagactttcaatcagcattccattatgcaaattcagcttgcagaaatgtttatgtttgacccatattgtagttttaaaaatggattaattgccagtatttaaaaattgggaaaattcacagcaataaaatctagacattttagtttcctcagaagttctggcaaccaaggttctcattcctacttagtaatgattaacagtaagtagttatctcattcaggcacacatttcccattgagccgctgcacttatttatattaactgctaggcttttggtggtgtttgagatgatgacctcttgccataaggaaaagagagatcctgtgggctagcgaggttctgtgggggatcctagttttgccttgattaggatttaggtaagcaaaatgagaaggggatatgtcagttgactttaaagaaagaagaaaagacacatggaggtgggaatgtgtgtgagaaaatttgcctaaccagaagaacaagcctgtgagcttgggtgtaggagaaagtaagattgaattgtcagacaggagctagcatggtaattaaggcaacattgtccttttaacaatraaacttcaaatttcctgtgccttaaaacaactgaagtttatttcttgattatgtcaagttcaaaataggtgttcctagtgggtgaatctctcaagcagttttgtctttttccatcttgtggctgtgccatcttcaccacttctaaagtcacagcagaagaggaaagaagacgaatgattatgtaaggcagcaggtttctgtcaaccatacctggaagtggtgcacatactttctgcccacatttcactggccacatcctcctgcaaaggaaggctaggaaatagagtccagctgtgttccctcgataaaagaagaaacagggttagtgaatgattarccaggctctagcacaagagacaggggcgttggaggtaagcacgcaagagctattgtatgaggtaagatatttattaatccatttagcatatatttacagactacttacttctctgtgttggatgctgtgctatgcaccaagtaggcttttgagcaaaggagcaatgaggtgaaagtagtgttttgaggaattagcctgggggcaaaatataaaaacaagagaaagcaaattcttagtcagaggggsatggtgaaaaacctactgtctttctccagctgagagctaatgagattgtgtgggtagagagcaatattaatagtatcaataacaatcatagttactatatgccatgcagtgttacaagctactttacatatatttaactgtcactcaaatttatgatgtaagtgctattactctccttttctagatggggaaaacaagtcttcaaatgattaagttatttgcccaaattcacataaatcttggcagcgctcgaggatttgaacttaggaagttgatgttattttataactactgtagtattaatgaaatgaaaatcaatctaatgaaaacattgtgagcctaagtgaacaataatgaaaactatattattgatttgggaaggacactgtgactttctaaaagaccttcataacctraagaagaagaagaagaagtgaaattgggtaaatgacctttcaagaaatctccctatccttgggcacacttgactggatttagataagttctaatgagtttttggtgaattctgagctgtttaagaatatgacatctttttaaccacactyaaaaccaaatcattgtgtcttgaggaaaagcaattctttaattccttgttctgataaatatgccagaacaccgatttctgtgtctgtgtcacgtctttgtcaggattgaaatgggtataatttcagataatggacttaatatgtgtctggtatttccagaaatattaataaacaccagagactttgggttgttgatataaagttctgtttttggcagttgactgttgggatggcccagatggagagccagtagtacatcatggttacactctcacttcaaaaattctcttcagagatgttgtggagaccatcaacaagcatgcctttgtgaagaatgagtaagtaaagcagcacctgtgagctaagcggtagcctccygcatggagcattgcctgatgtaacgtagctacaaaaccacatcctcttccttggactctacactgccctctttgctagactagttttctccctccttctcagcaaaacattgtgaacaaataatgtggccttcccgtttgtactttctcatgctgcatttattccttgtcccattctttctcaatatgcctccttaaagacattcttgcaaatagtgacctctaaatttctaaatccagggtgtagagtgtccataaaatctggaaacataggttactgtgtacataattagtgggttctgatcatgatggatgtcttatctatacactgaggtgtctggagtccttatgttacttgaccctctccttgtcatttgacagtgttgaatatttcctccccactacttgccttttttggtttccattatatcattctcccctccattgctctcrttgcttctcaatctcttttttttgtactgcagtcttctgttaatctatttcctcattcctctaatggttaactgttttctaaggttttgccctagatcactttctggatatttatcaaattctatgtccagaactttcccctcaagttctaggcccatgttgaarcatactcagtgaggccgggcacggtggctcctgtagcactttgggaggctgaggagggtggatcacgtgaggccaggagtttgagaccagcctggtcaacatggcgaagccctgtctctactaaaaaaatacaagtattaggtggatgtagtggtacacatctgtaatcccagctacttgggaggctgaggcatgagatttgcttgaacccagaaggtggaggttgtagtgagctgagattgcaccactgcactccagcctgggtgacagagtgagactccatctcagaaaaataaaaataaaaataaaaatcctcagtgaatattcatctgagtatcccataggtgtggggagccacaacagtgagcagaagataagactcctgccattaaggagcttactccccaaggggaactcagcatctcattctgccaaacttcctcttgattctcgctccatttcctcttattaatagttaggggcagcactggcctcagccagaaactgggagtcattctagactcaaccaattcttggcaattctacttcccaagttatcttttgactccattgcctcctgttcatttttatttcccctttggttcatcctcaacactggtgctataattttctttctgaaatatgagcatggtgwttcaattcttgtcttaaagcctgtcagaagctctctcaatacacaggcatgtcttcatatcccttaaggtctggcatctcccttgtcttccactatcatcttccaccattattccacagagatttaggattctgccttcaatgactgtctttcagcttccctattgagcctggctctttctcaactccccactcttacgtatgctgttctctctgcctggaacamccttcccygttagtctatctgattaattsttgcttattctacaaggcygtttaagtattgtccctccaacaagttactaataccaccagctgatttaaatcttctttttctccatattttctctgtatttagcaccctgcacatatttctgtcatatcatatagcaccctcttgcaattggttggttacttgccttcttttacatctgtaagactgtgaactcactgaaaatatgagcaatctcttattattttgtattcatttttgttgcctagcaggtaccttcagtataccagctattcaagaaaggatttttgaattaaaggaaacaaattaaaattacaattgtgtaaaattaattttttagaagttagtagcctttaaaatttccaatatttggtcttctcattaattaaacatgaggttaaaaatgcttttctaataagacacacttgctgtatagcagatttagtttatgatgcctcccacgtggaagaatcttgaacactgcattctaatgggtcttyacaaccctgatttctacaggtcctagccaaatgggtgaagtaattttgcctttatttcccaatgtatgaagtagggtgttgagaaggcctgccacctatgtatcttggaagatcctctggtgatttgacaatttacttcaagtttgggaactcttagaagaaaagcacttcaaattaaaagagttaataaacttgtttagtacattttaaaagttcagccttttcctctcctttcttaactttggttgcatctttatatcagggtttctcaaccttggcactaatgacattgtgtactgataatttttttttttttttttttttttggtagagagctgtcctgtgcagcgtagggtggaaagcaacatcctcagcttctattcattatgtgccaatagcacccctgaagtgtgaccaccaaaaatgtcttcagatattgacaagcgtctcctgtactggggggaataattgcctcgttccctgttgagaagcacagctttacactaaacatcatcaagcactaattaggcttttttttttttttttttttttttctgaggcagccttgctctgtcgcccatgctggagtgcagtggcatgatctcagctcactgcaacctccgcctcctgggttcaagcgattctcttgcctcagcctcctgagtatctgggattaccggcacgtgccacaatgcctggctaatttttgtatttttagtagagacagtgtttcactatattgcccaggctggtctcgaactcctggcctcaagtgatctgcctgcttcggcctcccaaagtgctgggattacaggcatgagccaccactccctgccactaatagattttttgtaaatgaattgacaatgtgaaaattccttgttaaaactccctgatgtgactgcaggacaactcagggttgtcagtttgttgtygctgttgcttttccctcttctagcactttagggtaaaacctatgtgaagaaatgaatagcaaacagattgtagtcgagtaaggaaacctacctcagccacaaaggctcatctgtaagatggcccacagcatcaggttttactaatgaggagagaaggtaggtctggcggtcatagcccgtattgtggaacttgtgcttgtcatgaaagcctggaaaaagtttttctgcacattgatatattaggtgatttaaatattggtatatrttgatatattaggtgatttaaatatattgcctattatgtctgaagacatgtaacggaaaactagaaaaaagtcaatgaacctgaatttgaaataatttcttattctgaggaaaaaataaggttgagagaggagtaaaatcatgtaatcagccctgatctcctttctgccttagccaccaactcctttaggtaattatttacatggatctcatgttttctgtgcagaaacctgagtgctggtgtagaatgaatgcttggctggtttttatttttattttttgacaaagactagtatataattctatcaaagtgattttgaaatgtgcgacgtaggatgctataaaacacagaattcccttatgttattttatcctcaatcataattttcaaggtgggggttaattatatattttagagtcaatagcttcatttaatgacattcartggtctcttagaagctkttagacttttgaataaataagacaaaattacattatatgagtttactttctttagacttctcatctcttttaaaattttctcttcttttaaaagaaacataatatatctaccattgtttcctgatgcaaaatattagaaaagccatcccatgtggattggtattttgttcatccattatgcttagcaaagtatatttgctcagaggaattttttaaatgcatttctaatctttctcattttagaagcattttaaccatcatcagtatcgcaaatactgtcactaggattgtaacaacacagtgaatactgaatcattttcaaaagtccctgtgagttgcctgcacctgacgcctctggactgtgttgctcttttctcaggtttcctgttatattgtctatcgagaatcactgcagtatccagcagcaaaggaagattgctcagtacctgaaaggaatattcggagacaaactggacctgtcatctgttgatacaggggagtgcaagcagcttccaagccctcaaagtttgaaaggcaaaattctagtgaaggtaattacttcaagtaatgcaataaaagacattcattatcagctaagcctgccctcccttaaagaataaaaatgggtttcaagggagaataataattagaatcaatatatgaaggwttgtctagatctatgtatgngccttattccaatttttttatagtcgtgtcttcagaagaagcttattgttgagtgagcacatattctgagatttgtacttatgaagtggaaacatcaatactgtaagccaaatgtttgatattttagtctgtaatagttcacactagagagaaatgtgtgtgtaggagcgtgaggttcaggaaaggagaaggctccttgtatccatatctgaaagcagttctttcagactttttctcccatttcaagctccaataactgtctgtcaaaaaaaccaaaaaaaacaaaaagcttcatggttgatcagtcttggttatgcaagtgagaagagctcacttcaaagaggaacacaggcacagacataataatgccccacaggactcatgtacgtgtgaaagagcagtaggtgaacagaatgacatttcataaacagattttctgagagaggaagcttactacaataaatattattcatgcaaagaatagccagaaagacagttctttcagttttcagatcactgactttgtggttttacttatttccagtgaattttgtgtgtttgtactaaaaccamcttgggtggccacatcattttgtgattaaaaatgtaaaggaaagcaatagggtattaaaattcaaactgggttatattttacttaaaagaggtgtgtatgaaaaaacaaatatataggaggagcaggaaagtcaaggaggcaatgtaatttcatggcaggacttcaactggggctttaagggagagcagcacatggaaaagatggaacatattcattcttagaattggtcaaaacctgttttctaccaattaaataaaattatagattctgaatacatcaaaaaggtgttgctaggcatttatatgcataaaggtattttgaataaaagctccacataatgcaagagataacatgaaggccaatttgcccaagtcttgctaaagcaaacttttatagtaaaaattgatttgtgggttagaaaatgaaatgtcatctttataaccttgtaaatgtttctacttcctaaatattctttagtcagcagtcaggatgttaaatgcagaataaattcatttgattgaaatctttctcctttggacagtggaactcacagtggatatttaatgtggactaattgagtctcctttgcataactgggctttgagttatttgacacagaatatcccagggcttatggcatcaggatgaatcagaggcagaaagtctgaggcactcatgggaaagggtggcaacaatgtgaactgcaagtatttcaagagcatctgagatccatttgctagtagtaatgttgtttagacattraggagctgcctggatctgcggaccagcgcaaccccatttaaagcaaaaacaaggcaactgatttattgtgttcctttactatcagagcaatctctgattgaaaaggcaggatgtctatgactacttaccactttggagattgacaagttgtttattattacaactgttacacacatatgttccaatcatgcatgcatacacatttatatatgtgtaaattttctgataaaatacaggcaaagttcattttttaaatttatttttattttattattattatactttaagttttagggtatatgtccacaatgtgcaggttagttacatatgtatacatgtgccatgctggtgtgctgcacccattaactcgtcatttagcattaggtatatctcctaaagctatccctcccccctccccccaccccacaacagtccccagagtgtgatgtccccttcctgtgtccatgtgttctcgttgttcaattcccacctatgagtgagaatatgcggtgtttggttttttgttcttgcgatagtttactgagaatgatgatttccaatttcatccatgtccctacaaaggacatgaactcatcattttttatggctgcatagtattctatgttgtatatgtgccacattttcttaatccagtctattattgttggacatttgagttggttccaagcctttgctattgtgaataatgccacagtaaacatacatgtgcatgtgtctttatagcagcatgatttatagtcgtttgggtatatacccagtaatgggattgctgggtcaaatggtatttctagttctagatccctgaggaatcgccacactgacttccacaatggttgaactagtttacagtcccaccaacagtgtaaagtgttcctatttctccacatcctctccagcacctgttgtttcctgactttttaatgattgccattctaactggtgtgagatggtatctcactgtggttttgatttgcatttctctgatggctagtgatggtgagcattttttcatgtgctttttggctgcataaatgtcttcttttgagaagtgtctgttcatgtccttcacccactttttgatggggttgtttgtttttttcttgtaaatttgtttgagttcattgtagattctggatattagccctttgtcagatgagtaggttgcaaaacttttctcccattttgtaggttgcctgttcactctgatggtagtttcttttgctgtgcagaagctctttagtttaattagatcccatttgtcaattttggcttttgttgccactgcttttggtgttttagacatgaagtccttgcccatgcctatgtcctgaatggtaatgcctaggttttcttctagggtttttatggttttaggtctaacgtttaaatctttaatccatcttgaattgatttttgtataaggtgtaaggaagggatccagtttcagctttcttcatatggctagccagttttcccagcaccatttattaaatagggaatcctttccccattgcttgtttttctcaggtttgtcaaagatcagatagttgtagacatgcggcgttatttctgagggctctgttctgttcaattgatctatatctctgttttggtaccagtaccatgctgttttggttactgtagccttgtagtatagtttgaagtcaggcagcgtgatgcctccagccttgttcttttggcttaggattgacttggcgttgcaggctcttttttggttccatatgaactttaaagtagttttttccaattctgtgaagaaagtcattggtagcttgatggggatggcattgaatctrtaaattaccttgggcagtatggccattttyaygatattgattcttcctacccatgagcatggaatgttcttccatttgtttgtatyctctttaatttccttgagcagtggtttgtagttcttcttgaagaggtctttcatgtcccttgtaagttggattcctaggtattttattctctttgaagcaattgtgaatgggaggtcactcatgatttggctctctgtttgtctgttattggtgtataggaatgcttgtgatttttgtacattgattttgtatcctgagactttgctgaagttgcttatcagcttaaggagattttgggctgagacaatggggttttctagatatacaaacatgtcatctgcaaacagggaccatttgacttcctcttttcctaattgaataccctttatttccttcttctgcctaattgccctggccagaacttccaacactatgttgaataggagtggtgagagagggcatccctgtcttgtgccagttttcaaagggaatgcttccagtttttgcccattcagtatgatattggctgtgggtttgtcatagatagctgttattattttgagatatgtcccatcaatacctactttattgagagtttttagcatgaagcttgttgaattttgtcaaaggccttttctgcrtctattgagataatcatgtggtttttgtctttggttctgtttatatgctggattacatttattgatttgcatatattgaaccagycttgcatcccagggatgaagcccacttgatcatggtggataagctttttgatgtgctgctggattcggtttgccagtattttattgagaatttttgcattgatgttcatcaaggatattggtctaaaattctcttttttggttttgtctctgcccggctttggtatcaggatgatgctggcctcataaaatgagttagggaggattccctctttttctattgattggaatagtttcagaaggaatrgtaccagttcctccttgtacctctggtagaattcggctttgaatccatctggtcctggactctttttggttggtaagctattgattattgacacaatttcagagcctgttattggtctattcagagagtcaacttcttcctggtttagtcttgggagggtgtatgtgtcgaggaatttatccatttcttctagattttctagtttatttgcgtagaggtgtttrtagtattctctgatggtagtttgtatttctgtgggatcagtggtgatatcccctttatcattttttattgcgtctatttgattcttctctcttttcttctttattagtcttgctagcggtctatcaattttgttgatcttttcaaaaaaccagctcctggattcattaattttttgaagggttttttgtgtctctatttccttcagttctgctctgattttagttatttcttgccttctgctagcttttgaatgtgtttgctcttgcttttctagttcttttaattgtgatgttagggtgtcaattttggatctttcctgctttctcttatgggcatttagtgctataaatttccctctacacactgctttgaatgygtcccagagattctggtatgttgtgtctttattctcgttggtttcaaagaacatctttatttctgccttcatatcgttatrtacccagtagtcattcaggagcaggttgttcagtttccatgtagttgagtggttttgagtgagtttcttaatcctgagttctagtttgattgcactgtggtctgagagacagtttgttataatttctgatcttttacatttgctgaggagagctttacttccaagtatgtggtcaattttggaataggtgtggtgtggtgctgaaaaaaatttatattctgttgatttgaggtggagagttctgtagatgtctattaggtccgcttggtgcagagctgagttcaattcctggatatccttgttaactttctgtctcgttgatctgtctaatgttgacagtggggtgttaaagtctcccaatgttaatgtgtgggagtctaagtctctttgtaggtcactcaggacttgctttatgaatctgggtgctcctgtattgggtgcatatatatttaggatagttagctcttcttgttgaattggtccctttaccattatgtaatggccttctttgtctcttttgatctttgttggtttaaaatctgttttatcagacactaggattgcaacctctgcctttttttgttttccatttgcttggtagatcttcctccaaccttttattttgagcctatgtgtgtgtctgcacgtgagatgggtttcctgaatacagcacactgatgggtcttgactgtttatccaatttgccagtctgtgtcttttaattggagcatttagtccatttacatttaaagttaatattgttatgtgtgaatttgatcctgtcattatgatgttagctggttatttgctcgttagttgatgcagtttcttcctagcctcgatggtctttacaatttggcatgattttgcagtggctggtactggttgttcctttccatgtttagcgcttccttcagkagctcttttagggcaggcctggtggtgacaaaatctctcagcatttgcttgtctgtaaagtattttatttctccttcacttatgaagcttagtttggctggatatgaaattctgggttgaaaattcttttctttaagaatgttgaatattggcccccactctcttctggcttgtagagtttctgccgagagatccgctgttagtctgatgggcttccctttgtgggtaacccgacctttctctctggctgcccttaacattttttccgtcatttcaactttggtgaatctgacaattatgtgtcttgtagttgcttttcttgaggagtatctttatggcgttctctgtatttcctgaatctgaatgttggcctgccttgctagactggggaagttctcctggataatatcctgcagagtgttttccaacttggttccattctccccgtcactttcaggtacaccaatcagacgtagatttggtcttttcacatagtcccatatttcttggaggctttgttcatttctttttattctttttcctctaaacttcccttctcgcttcatttcattcatttcatcttctgtcactgataccctttcttcaaattgattgcatcggctcctgaggcttctgcattcttcatgtagttcttgagccttggctttcagctccatcggctcctttaagtacttctctgtattggttcttctagttatacattcgtctaaatttttttcaaagttttcaacttctttgcctttggtttgaatttcctcctgtagcttggagtagtttgatcatctgaagccttgttctctcaactcsgcaaagtcattgtccatccagctttgttccgttgctggtgaggagctgcgttcctttggaggaggaaaggtgctctgctttttagagtttccagtttttctgctctgttttttccccatctttgtggttttatctacttttggtctttgatgatggtgatgtacagatgggtttttggtgtggatgtcctttctgtttgttagtttttcttctaacagacaggaccctcagctgcaggtctgttggagtttgctagaggtccactccagaccctgtttgcctgggtaccagcagcagtggctgcagaacagcagattttcgtgaaccgcaaatgctgctgtctggttgtttctctggaagttttgtctcagaggagtacccggctgtgtgaggtgtcagtctgcccctactgggggrtgcctcccagttaggctgcttgggggtcaggggtcagggacccacttgaggagacagtctgccygttctcagatctccagctgcatgctgggagaaccactgctctcttcaaagctgtcagacggggacatttaagtctgcagaggttactgctgtctttttgtttgtctgtgccctgcccccagaggtggagcctacagaggcaggcaggccttcttaagctgtggtgggctccacccagttcgagcttcccggctgctttgtttacctaagcaagcctgggcaatgrcgggctcccctcccccagcctcgctgctgccttgcagtttgatctcagactgctgtgctagcaatcggcgagactccatgggcgtaggaccctccgagccaggtgcgggatataatctcctggtgcgccgttttttaagcccgtcggaaaagcgcagtattggggtgggagtgacccgattttccaggtgccgtctgtcacccctttctttgactgggaaagggaactccctgaccccttgcgcttcccgattgaggcaatgccttgccctgcttcggctcgcgcgtggtgcactgcacccactgtcctgcgcccactgtctggcactccctagtgagatgaacccggtacctcagatggaagtgcagaaatcaccrgtcttctgcgttgctcatgctgggagctgtagacccggagctgttcctattcggccatcttggctcccccaccagcaaagttcattttattgtattttaytttattgcatttcacagacactgcattttgtgtgwgtgtgtgtgtgtgtgtracaaattgaaggtttgtggcaactctatgtcaagcaagtctttcggcactgtttttccaaaagtatgggctcactttgtgtctctgtgtcacattttggtaattcttgctctatttaaaactttttcattattattgtatctgttgtggtgatctgtgatcggtgatctttaatgctactattgcaattgttcttgggaggcataatccctgcctatataagatggcaaacttaattgataagtgttgtgtgtgtactaactgctccatgaaccacctgattccccatctctctcccactcctcagttctccctgtttcctaagacataacagtatggaaattaagccagttgataaccctacaatggcctccaagtgtccaagtgaaaggcaactcacaygtctcttactttttaaaaaatatttattaatttcagtaggttttgtgggaacaggtagtgtttggttacatggataagttttttagtggtgatttctgagattttggtgcacctgtcacctcagcaatgtacactgtacccagtgagcagtcttttatcccttgccccctcccactctttcacccgagtccccaaagtctattatatcattcttgtgcctttgtgccctcatagcttagctcccacttataagtgagaacatatgttttgttttccattcctgagttacttcacttagaataatggtctccagytccatctaggttgctgcaaatgccatatttcattctttttatggctgagtagtattccacggtgtatatatgtataccacattttctttatccactcgttgattgatgggcatttgggctgtttccatatctttgcaattgtgacttgtgctgctaaaaatatgtgtacaagtgtctttctcatataatgacttctttgcctcttggtagagatgcaggagtggtatctaccaagaggaaaatatttacttttagttctttaaggaatctccactgttttccataatggttgtactagtttccattccctccagcagtgtaaaagtgttctgttttcaccacatctatgccaacatctgttattttttgattttttgattatggccattcttgcaggagtaagttggtattgcattgtggttttgatttgcatttccctgattattagtgatgttgagcattttttcatatgtttgttgaccatttgtatatctttttttgagaattgtctattcatgtccttagcctactttttgatggtattatttgtctttttcttcctgatttgtttgagttccttgtagattgtagatattagtcctttgtcagatacatagtttgtgaagattctctcccactctgtgagttgtctgtttactccactgattatttcttttgctatgcagaagctttttagtttaattaagtcccatctctttatctttgtttttgttacattcactcttgggttcttagtcatgaagtctttgcctcagccaatgtctagaaggggtttttccagtgttaacttttagaatgtatatggtttcaggtgttatatttaagtctcagatccatcttgagttgatttttgtagaaggtgagagatgaggatccagtttcattcttctacatgtgctttgccaatattccagtactatttgttgaatatggtgtcctttctccactttatgtttttgtttgctttgtcaaagatcagttcactgtaagtatttggctttctttctgggttctctattctgttccattggtctatgtgcctatttttataccagtaccatgctgttttggtgactatggtcttatattatactttgaagtcaggtaatgttatgcgtccaaatttgttctttttgcttagtcttgccttgggtatgcgggccctcttttagttccatatgaattttaggattttttttccagttttgtgaggaatgatgatggtattttgatagggattacatagaatttatagattgcttttggcagtatggttattttcacaatattgattctacccatccttgagcatggaatgtgtttccatttgtttgtgtcatctatgatttctttcagcagtgttttgtagttttccttgtagatatctttcacctctttgtttaggtatcttcctaagtattttgttttattttttgcagctattgtaaaaggggttgagcttggttgttgttggtatatagcagtgctattgatttgtgtatgttgatcttgtatcctgaaactttactgaattcatttatcagatctaggagctttttggatgagcctttagggttttctaggtatacaaccatatcatcagcgaacagcaacaatttgacttcctctttacacatttggaagccctttatttctttcgcttgtctgattgccttggctaggatttccagtactatgttgaacagaagtggtgaaagtgggcatccttgtcttgttctagttctcagggggaatgctttcagcttttccctgttcagtataatgttggctgtgggtttgtcatagatggcttttattaccttaaggtatgtcccttctatgccgattttgctgagggttttaatcrtaaagagatgctggattttgttaaatgctttttctgcatctattgagatgatcatgtgatttttgtttttgattctgtttatgtggtatatcacatttattgacttgtacatgtgaaaccatccctgcatccttggtatgaaacccactcgatcacggtggattatctttttgatatgctgttggattcaattagctagtatttggttgaggatttttgcgtctatgttcattagcgatattggtctgtaattttctttttttttttgttatgtccttttctggttttggtgttagggtgatactggcttcatagcatgatttaggggggattctttctttctcatcttttggaatagtttcaatagatttggtaccagttctttgcatgtctgatagaattaagccgtgaatccatctggtcctggacattttttgttgttgttggcaattttttttattagcatttcagtcggactgcttgttgttggtttgttcagagtttctgtttcttcctggtttaacctccgaggattgtatatttccaggaacttacccatctcctctaggttttctagtttgtgcatgtaaaggtgttcatagtatccttgaatgaacttttgtatttctgtgatatcggttgtaatatctctcattttgtttctaattgagcttatttggatcttctctcttcttttgttggttaatcttgcaaatggtctatcaattttgtttatcttttcaaagaaccaggtttttgtttcatttatcttttgtattttttgttgttgtttcaatttcatttagttctgctctgatctttgttatttcttttcttctgctgaatttggggttggcttgtttttgtttctctagttccttgaggtgtgacctaagattatctgtttgtcctctttcagacttttgacataggcatttaatgctatgaactttcctcttagcatcactttgctgtatcccagagattttgaaaggttgtgtcactattatcgttcagttcaaggaatttttaagtttccgtcttgatttcattgttgacgcaacaattattcaggagcagattatttaatttatatgtatttgcacgttttgtggggttccttttggagtccatttccaattttattccaccgtgatcctagagagtacttgctataattatgattttcttaaattcgttgagacttgttttgtggcctgtcatatggtctgtcttggagaatgtttcctgtcctaattaatagaatatatattctgcagttgttgggtagaatattctgtaaatatctgctaagtctatttgttctagggtatagtttaagtccattgtttctttgttgactttctgtcttgatgacctgtctagtgctgttagtggagtattgaattctctcactattattgtgttgctgtctacattatttcttaggtctagtagtaactgttttataaatttgggagctccagtgttaggtgaatatatatttaggattgtgatattttcctgctggactagttcttttatcatggtatagtgtccctctttgttttttttaactgctgttgctttaaagtttgttttgtctgatataaggatagctgctcctgcccactttttttgtccatttgcatgaaatatcttcttctacccctttactttaagtttatgagtccttatatcttatgtgagttttttgaagacagcagatatttggttggtgaattcttattcattctgccattctgtgccttttaagtggagcatttagaccatctacattcaaaatttgttttgagagataaggtactattagattcattttgctagttttttttgcctgaatacttttttttttcttcattgtattgttttataggccctgtgggacttatgctttatggaggttttatttcggtgtattttgaggttttctttcaagatttagcactccttttaggggttttttttttttttttttttttttttttgggttttttttttttttgtagtgctagcttggtagtggcgaattctctcagcatttttgttgcctatgatctgaaattggattattgcgtgtgtctgaaaaggactttatctttcccttatttatcaagcctagttttgctggacacaagatttcttggctgataattattttaaggaggctgaagataggaccccattcctttctagcttgtaggattttggctgagaaatctgcttttaatcttayaggtttttctttatagactacctaatgcttttgcctcacagctgttaagattctttccttcatcttgactttagataacctgatgactatgtgtctaggtgatgatctttttgtgatgaattttctaggtgttctttgagcttcttgtatttggatgtatagatctccagcaaagccagggaaattttcctcaattattccctcaaataggttttccacactgtgagatttctcttcttcctggggaacaccaagtattcttaggtttgttcatttaacataatcccaaacttcttccaggctttgttcttttttaaattcttttttctttgtctttgtcagattgggttaattcaaaagccttgtcttcaagctctgaagttctttcttctacttgtttgattcttttgttgaaactttccagtgtattttgcatttctctaagagtatcttttatttttagaagttgtgattgttttgtattgatgccgtctatttctctggatattttttcatccatagtctgcattacttttgaatttctttaaattgttttccacctgtctctggtgcatccttgagtagcttaattatcaaccttctgaatgcttttgctggcaagtcagggatttcttcttggtttggatcctttcttggtgagatattgtgatcttttgagggtgttaaagaaacttgctttttcatattgccagaattgtttttctggttccttttcatttgggtagactacgtcagagggaakatctggtattcaaaggctgctgttcagattcttttgtcccacagggtggtcttcttatgtggtgccctcccacttcctctaggcatgggacttcctgatagctggactgtagtgattgttattgcttgtctgggtctagccacccagtggggctaccaggctccagcctggtactcaggaatatctgcaaagagtcctgttaagtgatctgtcttcaggtctctcagccatggagacctgttctggtggaggtagcaggggagtgaagtagactctgtgagggtccttggttgttttgtttagtgtgctggttttctcgaatgctggttgtgctagttgttggttatcctccagccagaaggtagcacttttaagagatcatcagctgatacaagcttgccctaaggtcacctggatacatatttgggtttctcagccaatgggcagggccatagagctcccaagagattatgtcttttgtcttcagctaccacggtgggtagagaaagaccatcagttggatgcagggtcaggcgtgtctaagctcagactcttcttgagcagggtttgctgtcgctgctgtaggggctgggagtgtggttctcagtccaatggagttatgttcccagggggattatggctgcctctgctgcatcatacaggtcaccagggaagtggggaaagctggcagtgacaggcctcacctagttcccactcagccagcaaggccagtctcattcccaccaccagcaccgagtttatatccaggcagctcatgagtagggctgagatcttgccccaggctacaagcctccccactgagaaagcaagctggcctttcaggccccacctctccccacctgccatggcctctgtgctcctatctgcacttcctgtttgctcccgtcactgcccccagattctgcccataaatgtttacgcttggttgtaattattacaaagttcatctcaaagtttccttctccctgtattctttccccagttctactggtagcctccccaaaggcccctgtgagacagtcagaagtggtttccctgggtactgggtgtgcccacagggctcttcctgctgtttcttctacctttatattttgctcagctctctaaatttgtttcagctcttsgtaaggccaaatccttctctcattttattagtctgttgtcatactgctataaagaaatacctgacacagagaaattataaaaagaggtttaattgactcacagtttcacaggcttaacaggaagcatgtctaggaagcctcatgaaacttacaatcatggcagagggcaaaraggaagcaggcaccttcttcacaaggtggcaggagagagaagggtgaacagtgaagggagaagagcctgttataaaaccatcagatctcataagaactcactatcatgagaacagcatggggaaactgcccccatgatccaattacctcccaccaggtctctcccaagaaatgtgggtattatgaggattatgattcaagatgatatttgggtgggaacacagccaaaccatatcattctgctcctggctgctcccacatctcatgtcctcacatttcaaaacacartcatgtctttccaacagtcccccaaagtcttaactctttccaggcttaacccaaaagtccaagtccaaagtctcatctgagacgagggaagtcccttctgcctaggagcctgtaaaatcaaaagcaagttcgttacttcaaagatmcaatgggggtacaggcattggataaatgctcccattccaaaaaggagacatcggccaaaacaaaggagrtacaggctccatgcaagtccaaaatccaacagggcactcattaaatcttaaagctccaatataatctcctttgattctatgtctcagatccaggtcatgctgatgcaagaggtgagctcctatggtcttgggtggctccactcctgtggctttgcagggtacaacacccctcccagctgctttcacaggctggcattgagtgtcttcatcctttccaggcacacagtgcaagctgtcagtggatctatcattctggggtctggaggacggtggccctcttttcacagctttactacacagtggtccagtggggattttgtatggggsctccaactccacatttctcttccatactgccttgagggctccacccctgtagcatacttctgcctaggcatccaggtgtttccatacatcctttgaaatctaggcagaggttcccaaacctcagttcttgacttctgtgcacctgcaggctcaacaccatgtggaaacttccaaggcttggagcttacaccctctgaagcaatggcctgwgctgaatgttggccccttttagccatggctaggttgtagagtaccaagtcccaaggctgcacagagcagtagcagggccctgggcttggcccatgaaagcattttttctacctaggcctctgggtctgtgatgggaggggctgccatgaaggttactgacatgtcctgtagacattttccccattgtcttggtgactaacattcagctccattttacttatgcaaatttctgcagctagcttgaatttctccccagaaaatgggtttttcttttctttcttttttattttgagatggagtttcactcttgttgcccaggctggaatgcagtggcatgatctcagcttactgcaacctccgcctcctgagttcaagcaattctcctgcctcagcctcccaagtagctgggattacaggcatgtgccaccatgcctggctaattttgtacttttagtagaracggggtttcaccatgttggtcaggctggtctcaaactcctgaccccaggtgacccacctgccttggcctcccaaagtgctgggattacaggcatgagccaccatgcccagctggatttttcttttctatcacatcatcaggctgcaaattttccaaacttttatgctctgcttcccttttaaacataagttccaatttcagatcatctctctcaagttgaaagttgcacagatctctagggcaggggcaaaatgccaccagtctctttgctaaagcatagcaagactgatctttgctccagttcccaaaaagttcctcatctccatctgagaccacctcaacctggacttctttgttcacatcaccatcagcattttggtcaaaaccattcaacaagttctaggaagccccaaaccttcccatatcttcctatcttcttctgagccctccaaactgttccaacctctgtctgttacctagttccaaagtcaattccacagtttcaagtatctgtatagcagtacccgactctctgcagtaccaatctactgtattagtcagttttcacactgctataaagaaatacctgagactgggtaattatagaggaaagaggtttaattgactcacagtttctcaggcttagcaggaagcatggctaggaggcttcatgaaacttacaatcatggcagaaggtgaagaggaaacagtcaccttcttcagaagatggcaggagagagaagagtgagtgtgaagtgggaagagccctttataaagtcatcagatcctgtgagaactcattcactatcacaaaaacagcatggggtatctgcccccatagtccaatcacctccccccagatttctccctagtcacgtgggtattatggggattacagttcaagatgagatttgggtggggacacagccaaaccatatcacctgtgatctagaatttcagattccccagtgaggatgtgttttcgagggtggatcttccctcctcacactttggccactcacagtttttcagctgtctcacagagcttggaacagcagtctgcttccttcaaagggtctgtgaattcttttggttttcctggtatgttcctgcagtagttcttgtagcacaagttcacgatgcgagtcttcacatgctcttccattgtccgagtgggagctgcaagttagtcctgcctcctggatgccattttcctctggcatctccacatttctctcactttcaatcaaaaactacaaatgattaagcttagtgaggaagatgtgttaaaagacaagacaggctgaaagctgggcctcttgtgcccaagagttagccattttgtgaatgcaaaagaaaaattcttgaagaaaattaaaagtgctacttcagtaaacacacaatgataggaaagcaaaatagccttaacttattgctgatagagagaaagtttgagtggtctggataaatgatcaaaccagctacaacattccgttaagccaaagcccaatccagagcaactctcttaaattttgtgaaggctgagagaggtgaggaagctgcagaagaaaagtctggagctagcagagtttggtatatgaagtttaaggcaagaatccatctccataacataaaagtgcaaggtgaagcagcaagtgttggtggagaagctgcagcaagggatctagaaggtttagctaagataattgatgaaggtggctacactaaacaacagatttctttttggttttggagatggagtatcactctgtcacccaggttggagtgcagtggcgccatcttgggtcactacaacttctacctcctgggttcaagtgattctcctgcctcagcttcccaagtagstgggattacaggcacgtgccaccaygcccagctaatttttgtatttttagtagacatggggtttcatcatgttggccaggctggtctygaactcctggcctcaggtgatttgcctgccttggcctcccaaagtgctgggattacaggcgtgagccactgtgcccagcctaaacaacagattttcaatgtaaacaaaacagccttatattgggagatgatgccatctgggactttaatagctgcagaggagtcattgcctgccttcaaagcgtcaagaacaggctgagtctcttgttagagactaatgcagctaatgactttaagttgaagccagtgctcatttttcatcccctaggctcttaagaattatgctaaatctactctgcctgcactgtgtaaatggaataacaaagcctggatgacagcacatatttttacagcrtggtttactgaatattttaagcccactattgagacctactgctcaggaaaaaagattcctttcaaaatattactgctcattgacaatgcacctggtcacccaagaactctaatgagatgtataagtagattaatgttgttttcatgcctgctacacaacatctattctgtagctcgttgttctatgtataattttgactttcaagtcttattatttaagaaatatactttgtaagcctataactgccataaatagtgattcctttgataagtctgggtaaactaaattgaaaaccttctagaaaggattcaccattctaaatgccattaagaacatttgcgattttttttgaggaggtcaacagattattagcaggagtttagaagaagatgattccaatcctgatggatgacgttgaggggttcaagacttcagtggagaaagtcactgtagatgtgttagaaataacaagagaactagaattagaagtggagcctgtgggagaccgaggtgggcagatcatgaggtcaggagatggagaccagcctggctaacacagtgaaaccccgtctctactaaaaatacaaaaaaattagccaggtgtggtggcaggcacctgtagtcccagctactcaggaggctgaggcaggagaatggtgtgaacccgggaggcggagcttgcagatcgcaccactgcactccagcctgggcgacagagcgagactccatctcaaaaaaaaaaaaaagaagtggagcctgaagattgctgcaatctcatgattaaacttaaatagatgaggaattacttatatgaataagcaaagcaagtgggttcttgaggtgtacaaaaccttagttgataaagcattaggaaggattgagagcatttactccaattttgccagaagttctactgtaggtaaaatgctgttaaacagcatcacatgctgcagagaaatcttttgtgaaaggaagagtcaatcaatggagcaaacttagtttttgtcctatttaagaaattgctggccaggtgtggtggctaatgccttgggaggccaaggcgggtggatcacttgaggtcaggagttcaagaccagcctgaccaacatggtaaaaccccatctctactaaaaaatacaaaattagctgggcatggtggtgcatgcctgtaatcccagctacttgggaggctgaggcaggagaatcgcttgaacccggggggcggaggttgcagtgagccgaggtcgtgccattgcactccagcctgggcaacaagagcaaaactgcatctcaaaacaaaacaaaacaaaacaaaacaaaacaaaaaagaagcaaattgccacagtcacctaaccttcagcaaccaccaccctgatcagtcagcagctatccacatcgaaacaagaccctccgccagcaaaatgattacaatttgccaaaggttcagatgatcattagctttttatagcattaaatattttaaattaaygtatgtactttttttagacgtaatactattgcacacttaataggctacagtatagcacaattgtaacttttatattcactgggagaccaaaaaatccgtgtgcctctctttattgtgatattcattttattgcagtgatctgaaaccacactcataataattctaaggtatgcctgtaaataaaacgttgcttatgaaaaaaaaaacaaatagtaattttcgatagactctttttgctgaaataactttagctgtgtggttcaaggttcctgcttttacagatgtgaatcgcggagttgtttgcattctcctggggctgtgcagccagatatcttgaagctgagaagtgaccatgcttccagtccagtctctagcaatatttccatataccatagacaaattaattctagagtgtaacttctgcatgaaatatatgtagatcagaaagggacctctggaagacacctggatcattcttcatttacatcaacattggaccacagttaaattagttagccatataaagtgctatctaaatttattttataattttcctttggagtaacaccattgaaaagaggccttgaaaaacagtgttcatttgcattgtttttctccctatctgcctgtataaaatatttgccagcctggaaaaagctgaccaaaaatagggctctgataatgccaggtcttttaattagatttttaaaggactgaaaattaacctgtcttatgaatactctgagaggcagcttcttctttttgttccctcacctcatgccaccctcagatgaaggggaattgaagcttagttctgtgtccttacctgctcagcaccacctgctcatcacagttacactttcctttctagtcagtggtatcagtgatgcatatcagttgaggattattattattcttttcttggtgatgttatttttcatatttatttctattctgtagaacatttaaaaacatatgttggtttttatkctattttatgctgtttcaaaagagggaattgctatcactacattttaaatgtcttgtgtacagtttcatcttgctgtctgccatggtacctaaaacaaagcagattctgaataagtgaagaaagttgatatcttgatagcttgtttctgagtatgtctgatcacctcttaattgagtaccttatttctggtgctgccatattataactactctacaaatgttcctaaaataaagaaaaatagaaaaactgatttttaggagctttctatatcaataggacctaaaataatatacagaaataaatgctttgattctgagctgccttgttattaatgatacacaaattagatcccaacttttttttttttttttttggtggggagacggagtctcgctctgtcgcccaggctggagtacaatggtgcaacctcractcactgcaacctccgcctcctgggttcaagcaattctcctgcctcagcctcctgaatagctgggattacaggtgcctgccaccatgcctggctaatttttgtatttttagtayagatgaggtttcaccatgttgcccagactggtcttgaactcctgatgtcaggtgatctgtcctccttggcctcccaaagttctgggattacaggcaggagccactgtgcctggccccaacwttttttttttttttttgaaacggagtgtcactctgtcacccagrctggagtgcagtgggacgatcttggctcactgcaacttctgcctcccaggttcaagcgattctcctgcctcagcctcccgagtagctgggattacaagtgcttaccaccaygcctggctaatttttgtatttttagtagagacggggtttcaccatgttgcccaggctggccttgaactcgtgacctcaggtgatccaccaatctccctcggcctcccaaagggctggggttacaggtgtgagccaccrtgcccagctggccccaactttttaatcttacaaattcccttctgtaagttgaagaaaatatttgcctaaatcccaattgtttagattcttaatgtagattatgctttcattatataaatgatttacccagctttgaaattgtcactagtgataaggactcaaggtcaagagctttgggtatcaaggaaggtgtaggaaaactgagaaagacatttctccgaaaatmtgactaagctggtagccctatggagggaggaagcgggtaaggggggatccagaattctgaaaggggtaatagtgctgtgcagagcaggaatacttaaagtcattgaagcttgagtttagagatcagcctgggatgatatttagaaatttatcattattttggctgtcaggcatgtgaacatccttccatgtttaaggaagtctccatccctwtgttttaagagatccccttagaggagctcaaagtttgcttttgcagcctttcttagaactgggatatgggccscccatctagaagccaccaatcaagtgaacctgtcccagacattgaagcagaaactacagtaggaaagtgggaccaagttgaacccrtcctggtgggtggagggagtagggtggacatgctggcagctacctttagggcccatgacagcacttctggcagtagttcctgatgtccattgcrtggatgatggagtgaaagccactatctctgtgcttagttgtgttggaaatggtatcttcagtggatttgttctgccccatgattttggttggtgcttacgttaggtatctattgctgcatagcaaattaccccaacatttgacagcttaaaacaaacattgaatattccacagtccctgtaggtcaggaacctgggtgtggcttagctgggtcctctgctcagggtctctcttgaggctgtaattaaggtgtcctctggggctgcagtcatctcacagctgaactgagggaagctctgcttccgagattcctttagtggttgttgttggcacatttcagttcctttcaggctgttggctactgaggcctctctcacctccctgccatgtgggtctctccatagcacagctcacgacaccagtgtgtgtgtgtgtgtgtgtgtgtgtgtgtgtgtgtgtgtgtgtgtgtgtgtgtatgagagagaaagaagagagaaagagagaagagagagagaaaaagagagagagagagagacagaagagagagagagaaagagagagagagaaagaagagagagagagagagagagctccaggaaaggagagaagtttggagaagcaagcaagcaagaaggtatagtgtttctataacctgatctgataagtaacctcccatcacttttgctgtactcagttcattagatgtcgggcactaggtccaggccacgctcaaagggaggggattgcagaagggcgtgaatactgagacaggagacattggtactattatttagaggctgcctactgcagtcgccttggcctcttagcctcagagcctggttttgttccacctcccaccctctgattctggaagcaattcaatattttggtaataaatattcctttctgcctgtagtaaaaagccttgctaatacagatagctgccctcgaagcctttctcagacccctgggccttaccccctgctgtcctttttagtttacatttactgtttttgaatataatttgggaaatgcaggaaaggagaatgtaaatttccctcatagtactgttataaagagataattacccttaacaattgaccatatttatttttagacttttttgctgttttttaatcactgagataatattatatatataattctataacttaactgtcttaatatcttataagaatgttccctgtcaaaaagcccctcatttttaaagtgtgttgttaggtaagtcaagagtggcctggtcctgggggaggtgctcaagctgggcaggagtctcgctgcattgtctgtgaaagaggggcttgcgaaatgcaaagtgaggcataagtgttaaggacacatgtaacctgcttaggtgaataagctgctctgagggatattagcatgcttgttgttgtcttagttcctttgagctgctataacaaaaccaccttggactgggcaacttgtaaacaacagaattcattgctcgtggatctagatgctgggaagtccaagattaaggtgatggcagatttggcgtctggtgagggcctgtttctcatagatagtacctactatttgtcctcacgtgacagaaggggcaagggagctcgttggagccctcatgacttaatcacttcccaaatgcctcacctcttaatactatcatatgggtgaggtattaggttctaatacatggattttgggggacaccagcattcacaccatagcagttgtacataatgggatggaatggtagtttgttgtgaagagtcatctattctttcactttttaataaaaatagaaatggggtcttactatgttgcccaggctgttctcaaactcttagcctcaagcaatcctcctgccttggcctcctggagtgttgggattacagggatgagcttttgtgcccagccaagtcatcttgttttttggtggagggggattctcactttgtcacccaggctggagtgcagtggtacaaacatgattcactgcagcctcaacctcctggactcaagtcatcctcctgcctcaacctcctgtgtagctgggatcataggcacatgctaccatgcctagcaaatttttttattttttgtagagacagaggcttatttttttgcctaggctggtcttgaaatcctagggtcaagtgatcttcccatctcagcctcccaaagtgctgggattacaggtgtgagccactgggcctggctccaggttccaagtcatctatttttgaatagaagcctggtttgattttttaaactatagtatctctaattaattctacttaattgaaagtaataagacttcccttttttgaaagtctccactcccccttattttgcccctaattcagactgtctgctttctagtcagtctgaagtaatgattagcttaatgatacaacattttattttcagtttttacttttcaaaaatgatttttaattgtagtaaaatacatgtgacctaaaatctacctaacatcttaactatttttaaatgtatacaataaaccctttttaaagtgtgttcagtagtattaaatacattcccattgtgtgcagccaatctccaaaactcttcatcttgtaaaactgaaactctatacccattcagcaacaactcccgataccctcctaccttcagccctttgccatcaccattttactttctgtctctatgaatttgatataaatggaatcatacaatacactttcttttatgtctagcttatttcaatcagcataataccttcaaggttccttcattttgtaatatgtatcagaatttccttcttcttaaaggctaagattccattgtatgtacatacaygttttgtttatcctytcatccatcaatggatgcttgggttacttccaccttttggctattgtgaatttattctcatttttaaatgggatgttttgttccatttcagggtaagaagttgccttatcaccttggggatgatgcagaggaaggggaagtttcygatgaggacagtgcagatgaaattgaagacgagtgcaaattcaagctccattatgtaagttgcaggcatgaccatattttttatccttgatatgctgtattaaaatggagttccaagttgctactgtgttggaggcctcacaattayggtggctgtggtgtagaaaggatattcattgaaaattactttatttgctggcacatagacattcaaatgtttgttgaatgaatgagtcaaggattcttgtgtctgagtgttggaaggaattttagtgattaattcattcaaccctctctccagggataaatttcctattacaaattcaaaaatcaaattgtagttggaaatgttactgtctttgataataaaagctggctttacttttagcattgccttccctacctcrtgctagcagccccccatgctccctgtcaaggctggctggaggaaccccacctgcacgtggacctgcttctctgggatgcccatgccctctttaagaaaatgtaccttggaccagagggatttccaagcccttccagacatggacctcttggctaaatctttaatttgtcaagtcttcaataaagtggcatggaatagtttgttactcacttggtgtgtcagcccccttttctagatgaaggagcctcctttgtagaaaagcatcatttaggcctggcgcggtggctcacgcctgtaatcccagcactttgggaggccgaggcgggcagatcacgaggtcaggagatcgagaccatcctggctaacatggtgaaaccccgtctctactaaaaatacaaaaaaaattagccgggcgtggtggtgggcgcctgtagtcctagctactccggaggctgaggcgggaaaatggcgtgaacctgggaggcggagcttgcagtgagccgagatcgcgccactgaactccagcctgggcgacagagcgagactccgtccccacctccaaccccacaccccaccccccccgcaaaaaaagaaaagcatcatttagccaggtgatccaagggaaatacaaacctgagggaaatataagacttaaaaagatgcctcatcgcttctttctgtaactctataactcatgtgattgctagagtaacacagcaacctgagaggagcacacagggatgatagtttggtatagaattttatttctacagaaaaggttagtcctctagacatcaggactatgattctaccctctaaaaaaaaaaaaaaaaaagagagagaaattttgtataaattcttgtaatttacaccattgccctgaattcagttattacattgttaacaacagtccactctcagataattctgtgttggctttcctgtagttgtgaaaatgagctggcattattttcaaaggggacaagagcttaatgagagctgatgtctcagtagacacttctttcttggctttaatgccctttaaatgggccaaatggagaagattcagcttgaagtgaaaaggaaaagttactatctgtattcttctcttgccttttaatagtttatgttagcaaaattaaataccattaattaatagggctatggttacagaaaatctaaatagagttacatgattgaaaactatgcttgaggtgtcattatacagttaatattttaaatagttgcttttttctcctctaggtatttattttttataattaattatgattatggataatttagctttttttttagcattactttataaaccagatttttgtctctgattttttatcattttgcatcttgttttctagatctcttggttgccagccatagtgtagatctatcattattcactcagctatttcatttttcttctgatgccagtgagctctccaacttcctaagttaaatatatgtagttatgcaaaaaatagtaagctgtagtcttatgggaacaaattggagtatccaactggattcctcttttctttactaagagtagttgatttctggaaacccacatcaggagatggtttggaacatgattccatggagttagatatgatctttcatttggattctttggtttggccctaagtgaaagtagagcaccttaactgtaaatgtttataggcatctctttgttatattttggaagagaaaagaagtaaatcaacattggagaaatatttcaaattgttttttgctatttttgagcttttctgagaaaaggcaatgccgtgtttagaaaggcaaagtattatcttgtaatcagaccatttatagtcctattgttggcagagggctcaaatgccctgactggtgaatttataataaattccctgagaaactgaatatctgatcatatttctgcaaaagagggtgtactttggatagtttatatgaaccaataattatcttagaggaagctcttaacctcagttttaagttgagagaatgtggttagatttatatctgaattattgcaataaatacacattttaactttgcattcatttacactggaacaccaactctcatgaggtcatgtaagattcatttgtacattcaataaacttttattaaacatctcctgttggacatgtgctcatcattgttgtaggtattggaggatatatcagtaacaaaatagacaaaaatcattgcctttgtgaagtttacacatcaatgggagaagaggaggatagacaagaaataagacaaataagtaaaatatatagtgtactagacagtgatcagtgctaaaggaaaaaagtgtgtgtgtgtctgtgtgcatgtgtgcacacttatgcatgtgtatatgtaagggatctattgaaattttagatgggatgtcaaygaaaggcctcacagggaagatgcatttgaacaaaggcctgaaagaagtgaagagttagccatgctgatacctgaggaggaatgttccaggcagaaagaaccccaagcgcaaaggccagaagcgggatttgaggctctcccggcaccaccctggagttagatgcagagcaggaggacaagactcctgttacttttaagcwagcggtttaagccatactgttaagtttttttcttatgtaataaatgcttctgttgttgaattaactgaatcttttaagcttctaccacatattattttgtggctccagccatagagaaaatctggctcacaatgggtaagccacaaggtaaagccagtgtgttcagtgacccaagaatcatacaactcagagacacagaggacaagttcctttcaaccacagagtagtaatctaacagatttgattctgtgaggcgaagtcaccattattcatctttatgggtcttctaatgtcagtgtgctctacacactttccacctctgtattttaacttcattaatttttttctgcttctgctgagttatgcagtgtcttttatcttgtgctctctaaatctgttttgccagcttcttgggcataaacattagctctgtatctcctacgtaaagctgatcccataaacaccaagccttccagcaagttctaaaggagtcctggtgcagtgacatgtagcaatttttgtcttatattctaaaaccattatccagtctgcatgtgtatatctctcactaaacactttaataattttcctccctcatcttttttcctatcattccttttatgctttgagctatcctaaaaaggattatgaatcttgttcgtttaaaacataccagcactcaaagacagcatgagttacctcttgaggttacaaggtcttgctgttgaaagcattcattgagtcaaaaagcccaggtgctgggcatgctagtacatcctggcgacaaggggtagagaatgataaaggtgacttggaatctccctggaagattctagttgtttctaatacatggatatgactggtccttgaacagaagaatatgttgttaagtgagctaaaggagcaggcaggagatggtagaggacaggagtaaacacacaggcttgaatggctgagaagcagctgttcttcagccaagaccttcaggtcttacagcttggaaagcagtaaggcactcagaaagggcagcaatatattattcttcccatctttggactttagccaaaggaaaaaaaaattggggggatgttgaaatacttcagtttttagttttttgccttttttttttttttttttaaagcaaaggtcctcaacttttttgcctttttttttttaatgcaaagttcctcaactctggccacatattggaatgatgggtagctttcaaaaaccgcagtgtctgggtcttggcccagagattctgatacatgggtctggggcatggcctgggatttctgagcactctgctggtgattgcaatgtgtagtgcaggtagagcccactgtttggaaggttcctttcaaggagcagcacccaatttctcccctttcctggatcttcccagtctggaatgatggttgtggtttggggcatccttctgcatattcagcgatgatttagcttcatgctggagacaaaatgagaatatgtttaatttatttacttgtggtagagggattcctagatcagatttatctctcaaaaaagggaattgagaaccctgattacttctctggtggaaactacccaccatatgaaatgactgctctcccccagcccccagctgcagcgtcctttctcacccattggcccagagaacaaaagagcaagatacatatggctttcagctgtggtccctgctgcaggtgcatggtgcctgataggtctcgaggtcaagtgtctgtcttagcttcctttcagtagtgctattggattccagggctgaatgataatatattaatgaaacctcagccacacatttatttgttcttcacagctgccaattttcttgtgcagtaaatcacagagcagaaaaagatcaacaggcagagatatcattcctttagcagctcccagtatttggaggatgtgaagtgaataattatagcttttgtgttaagcattctttattttaccagctctggatcggctctggctttgtattttgagcctttccttgctgacagtgaaagtgacttggtgtyatggccacagatcttctccttacttgaagtctctgcctctttgtgaggccctgagtgagagaaggaaatggatgctcatttggagcattctgtgtgatactggataccctaggtgctcttaaatgctttctttttttttgtcctcgcagcaaatgcacactcctttgggccctgggtcttgatcaaatgcgttgggggttagagacgtggagttcttttcttggatttgcttctgaccttaagtgaaattgtttttcccagagggattgtgatgatgtatttccctggttccatgatagaaataatggctttttaaaatatgaacctgtgcatggttactttgactcaagaatttctcttttctctttttctgtaacaatataagagggatggctgctgcattgtatggaaaaatagccacagtcttgaatgggaagtcttaggaggttcaagctgcaattcagccattttcataggcmtgtgtgtttggttgagtggctgaacctttctgcctgtgtcattatgagaaaaaattggctagccctagtgtttgccttaaacagggttcagcagctcaaatgaagtatctttacatgacagtgctttgggagccttagtacaatacagtctcccccttatttgtgggtttgcttcctgcagtcaatcatggcccaaaatattgattgaaaaattctataataaacaatttgtaagttgtgaattgtgcaccattctgagaagtgtgatgaaatcttgcactgtctactccaccccacgtgggatgtgaatcatccctttgtccagtgtatccacccattactatatgggaaaaaacacagcatacataggggtcaggactatccatggttttcagcatccaatgaggattttttgatgtatctcccatgcataaagggggactactgtgtacaatcttagttgctttttctgtatttccctgtggctcatttctccttgctcatatgattactggttcttttgatactttttgttttctccatgcttttcctcacattgaaatgctgtccccctactctttgccagatgatcagctgttagtcattacagtgggttcatttgtggccactgaaagataggttcaagtcttaatccgtggtacttatgtatgtgagcttatttggaaaaagggtctttgcggatgtaattaagttaaggacttcaagataatataatcctgggttaaccacgtgggccctaaatccaatgacaatgtcctcataagaagagaagacacaaacagatgggtgagacatgcatgagaagaccatataaagacagagacagaaattggagtgatgctgccacaagccaaggaatacatagggccaccataagctggaagaggcaaggaaggatcctcccctagagctttcagagggagtgtagccctgccaacacctagacttcatacttttggcctccagacgtgtgagaaaataagtacatttctattgttttaagatatcaggtttgtagcaatttgttawattggtcacaggaaactttattttattattattttttagagacagggcttcgctctgtggctcaggctggagtgatgtggcatgatcatagctcactgcagcctcaaactcttgggctcatgggatccttccacctcagcctcccaagtagctagggctacaggtgcrtgccaccatgcccagctaattttgtaaatttttgtagagacagggtctcattatgttgcccaggctgatatcaaactcctggactcaagcgatcctcccagtttggcctcccaaagtgctgggattacagacatgagccatggcacctggccaagtcacaggaaactaatatacttatcttttaaggcttgactcaggtttcttatgytcctggaattgtcccccgattccccaaggctggacaagttgcgcctcctctgtgtgcatatgctacccctctctacttgttcctgcttgtgtaattatccagggatgtgttggccttctcaatgacactgagggctctgtgacagtggggggtattcctctttaatacttctcacctggcacagcagaaacacaatacatggttttttttttaatacaaaatgagttttgttcccaaactatctctcaactttattaactacccccagcacattggcctaggcacttagtacctgcactggggcccagtgtgcctgatgtttcatctgcagacacacttcctcttttggcatacgctgccagattaatactgtttctagagttgctacccaaggacttgttcactcaaagactctcttagcagctccatacctcttgctttcaagtccctccgctctccaaagttctttatctgccactaccctactccatgaactctaggaaaactcatgtgttctttgcatttacagaacattcttaattcatgtaaatcctttgctagaactgtggttggcaggaaagcccttctttccatcactgttgaaatctcagttacaatgagttacaatcacttcccacctcttttgtggggccttctcagtcactcaggtagtaatgccgtgttccttatcagaaactctgttgtattggttgtctgtgcttttgtgggcatctctgatgaccagggtagaatatttggggacatgccttttctagcatgacaggarggtgttcccttctgatgttaagagccaactcttttttcatccttgcatctccttctggacctggaggtctccagggaagtggagtgcctcattaattgggcatgttaaagatattaatgcatgtgatagtgatacagggaaattcaataacctatcctggtatagatttttgaaatttttccttagggcatttataattgctttgctcttacaggattttgtgaaaatgaatgcattattggaaagctacccattatgcagagtccacatataatgacctcttagaaatagatttgcaaatggaagaacagccttaaacttttcgtgaagaatgtgggaattgctcttgtgaaggagtatccctttcctccctttggggggttggtctttagcaagtggttgaagaatttatggaaaggtattggaaacagggagaggtaggtgcactggaagagcagaagagctatgaacggaggctggggccattggtttcaagcagaacaaatggccgaaaagctgtgctaagcaggactttgagagaatctatatcccatgatcacctcaaaattctgtgagtcatcatctggacaggtcatagctctgatatccaaaccccttgaaatttgttgtgatcttaaagtaattgtaatgacaaatcatggctgaggtaataattggggttccccctaactatacaatgggattggaaatagtaaggaaatatatctcacaataatcctcaactcctgaaatttccatagcattcttttctcctcagtgaaaaaagtagttttattttaatagcatatttttgttctaatttatttatgtaggtttagaaaacttagtttccaaaaactttccctggccttttatctgttaaaagcatcaaatagcataagcatagggggaagggctttggagtcctgagtttgaatcctgcttcagttatttgctagctatgtamccaggaacaacttacttgatttctctctaagcatcagattctatatcactgaaatggaaatgataataatacttataaggttcctgaggactgaatgcagtcacatgaagagtagctggcagagaattagttcttaataaatagtaatccttattattaaaggatttgtggaggagggaagactgagatggtacaatgaacttgagcttaatttcttacaagtaattgagagaagtgaaattatagaagcaattgtggcttgatcaaagggtatattctaattcggtgtgtttcttaaggaaatcatttgtgttacttaattctttgcagagtaatgggaccactgagcatcaggtggaatctttcataaggaaaaaactggagtcactgttaaaagaatctcaaattcgagataaagaagatcctgatagtttcacagtgcgggcactactgaaggccacgcatgaaggcttaaatgcacacctgaagcaggtatctgattccctcttgtacttatccttcaacaggaaaaaaaaagcatctcatactttgtttctaatcatttgtgaaatgctcctccaacttcttctatttctgtcctcattttgcttgagaaatgaaaatctcttattgcaaaatgatatgagaaatagttaaaagtggattgggtggaggtagaaatgactcaaatactgctccacttggaccctcaggacaaagcccagtgtttccagactcatcttcctaatgcatgctcaggtgagggaagaagtttcagcccactgtgtcccttacactcccacctctccacattcattagatgtctgccttccctgctacttaccacctgtttttcagggctgagggctcttcaggcagaaggaagatcatatgggggtgaccgcccttggatcctaagtgatcactctgcattgatggttgccctctggaccctatacaagtctagccatccaactgccaggctgttcctcaggcccatttagtttctaaacttagaaatcctaatacaaaatggcttcaatgatgaagaagatgttggtaagcggcaaatttatttgtagaatggcctatggggtggatttaatcccaaggctcagtggtgtcattgtagctctatttttttgctctacctatcatgccatcagtgtcatctcaagtctggttctcctgtctatgatggttgcgagataactgccaatagccccatgagttacatgtttcttggtccatatccagagagattgagacagcatatttgccccaactaacaaacgagagttttgttaacctagttcatgtgcctacccccaagctaatcatagtggccatgggtaagtgtccttcctgaaacagtacttggccagagtataggataatattggcttgctaatgccagtgagaacttacctctgaagctcttgtcaaggttagctcctctcaaactgcatgttagaggggcagatggaatactggggagacaaccaaaaggtcaatgacagcattactgcccttatagtttaccatgtaattctggattttcttaataatttctatgaatagtaacaatctttccaccctcctcgcctccagccatttattttcaacaccacaagtgcctgtaagatcagacttgtttagcccatcttgattctgcttcttgtccttggtgaactctcattggcttatctgggccagttacttcccttatgcgtttggagaagtctttgccccatcctagattattctcattggaaatgcaaccataaggcttggatattttggaagaaacaaattaagcccttctatcttttgctttcactgaagagatcctaatgacaatttctccatcaggtaaagtggtaagagaaccaaaaatttttgagaggtagtgtagcaaaactcatctcctttttacttatttttgaggtttttaacactgctatgttttaaaaatatggttttggttcactgggcaagcaaaggcaagttactgttgagacgaggccctctgtgccagatacatatgtcggtttaaatccaaagctgagaatgtgctgagtatggctctgggcagcacgtcactccagcttctacttttctggaccgtcaattaacagtgcaggactggtttctacttgtcctgtctttttcctgcggagctctgaagaaaagtaaaaatgaaatttgccttcaggctggaagaacttagtagtcacaggaaatggttcttaagagttctggaatctgctgctttctttatatctgaactgctgctgcctgaataaccttaacaagttcctaagctctcagctgccctgcttaatgtctcattcacaccactgccatagtgatagttcagaaatgtgcatctggtcatgtcactctcctgtcttcaaccatctcagggctcctcatagtttggaggataaagctcaaattcagagataatagcccataagatccttcctttctgttctggctcctagcggtgacacccacagagtgtgcatgtgtaggagtccacacgtgcacacctccactttcttcatttcctggtaccgtgctcttaccacatggctttcatattggctgttttcttggccatagtacacttcgtcttccccatttcacatagataacttgtactcacctttaggcttcagcttttgtgtcatgtccccttggaagttcttaatcctcaaatccaggtagatggtctccctgtgccatcccacagtgccctaagctttccccattatagtcttatgacagtgtgttgtaatcttttgtgtctacgattagactgcaagcccagtagggagagagtctgcatctctcttgtttgctcttgtcgttatgtatatgccaagttcctaggacaatgtcttactcaataattcagtgaaagatgtgccggtgctcagggagaggtcaaagttggtgataggtatttgtagatatctgtttcctacataaagagagtgagaatgggagggcgaggcattgcctcacctgggaagcgcaaggggtcagggagttccctttccgagtcaaagaaaggggtgacggacgcacctggaaaatcgggtcactcccaccygaatattgcgcttttcagaccggcttaagaaacggcgcaccacgagactatatcccacacctggctcagagggtcctacgcccacggaatctcgctgattgctaacacagcagtctgagatcaaactgcaaggcggcaatgaggctgggggaggggcgcccgccattgcccaggcttgcttaggtaaacaaagcagcctggaagctcgaactgggtggagcccaccacaactcaaggaggcctgcctgcctctgtaggctccacctctgggggcagggcacagacaaacaaacagacagcagtaacctctgcagacttaagtgtccctgtctgacagctttgaagagagcagtggttctcccagcacgcagctggagatctgagaacgggcagactgcctcctcaagtgggtccctgacccctgacccccgagcagcctaactgggaggcaccccccagcaggggcacactgacacctcacacagggtattccaacagacctgcagctgagggtcctgtctgttagaaggaaaactaacaaccagaaaggacatctacaccgaaaacccatctgtacatcaccatcatcaaagaccaaaagtagataaaaccacaaagatggggaaaaaacagaacagaaaaactggaaactctaaaacgcagagcgcctctcctcctccaaaggaacrcagttcctcaccagcaacggaacaaagctggatggagaatgattttgacgagctgagagaagaaggcttcagacgatcaaattactctgagctacgggaagacattcaaaccaaaggcaaagaagttgaaaactttgaaaaaatttagaagaatgtataactagaataaccaatacagagaagtgcttaaaggagctgatggagctgaaaagcaaggctcgagaactacgtgaagaatgcagaagcctcaggagccgatgcgatcaactggaagaaagggtatcagcaatggaagatgaaatgaatgaaatgaagcgagaagggaagtttagagaaaaaagaataaaaagaaatgagcaaagcctccaagaaatatgggactatgtgaaaagaccaaatctacgtatgattggtgtacctgaaagtgatgtggagaatggaaccaagttggaaaacactctgcaggatattatccaggagaacttccccaatctagcaaggcaggccaatgttcagattcaggaaatacagagaacgccacaaagatactcctcgagaagagcaactccaagacacataattgtcagattcaccaaagttgaaatgaaggaaaaaatgttaagggcagccagagggaaaggtcgggttaccctcaaacgaaagcccatcagactaacagcggatctctcggcagaaaccctacaagccagaagagagtgggggccaatattcaacattcttaaagaaaagaattttcaacccagaatttcatatccagccaaactaagcttcataagtgaaggagaaataaaatactttatagacaagcaaatgctgagagattttgtcaccaccaggcctgccctaaaagagctcctgaaggaagcgctaaacatggaaaggaacaaccggtaccagccgctgcaaaatcatgccaaaatgtaaagaccatcgagactaggaagaaactgcatcaactaatgagcaaaatcaccagctaacatcataatgacaggatcaaattcacacataacaatattaactttaaatataaatggactaaattctgcaattaaaagacacagactggcaagttggataaacagtcaagacccatcagtgtgctgtattcaggaaacccatctcacgtgcagagacacacataggctcaaaataaaaggatggaggaagatccaccaagccaatggaaaacaaaaaaaggcaggggttgcaattctagtctctgataaaacagactttaaaccaacaaagatcaaaagagacaaagaaggccattacataatgctaaagggatcaattcaacaagaggagctaactatcctaaatatttatgcacccaatacaggagcacccagattcataaagcaagtcctgagtgacctacaaagagacttagactcccacacattaataatgggagactttaacaccccactgtcaacattagacagatcaacgagacagaaagtcaacaaggatacccaggaattgaactcagctctgcaccaagcagacctaatagacatctacagaactctccaccccaaatcaacagaatatacatttttttcagcaccacaccacacctattccaaaattgaccacatagttggaagtaaagctctcctcagcaaatgtaaaagaacagaaattataacaaactatctctcagaccacagtgcaatcaaactagaactcaggattaagaatctcactcaaagccgctcaactacatggaaactgaacaacctgctcctgaatgactactgggtacataacgaaatgaaggcagaaataaagatgttctttgaaaccaacgagaacaaagacaccacataccagaatctctgggacgcattcaaagcagtgtgtagagggaaatttatagcactaaatgcccacaagagaaagcaggaaagatccaaaattgacaccctaacatcacaattaaaagaactagaaaagcaagagcaaacacattcaaaagctagcagaaggcaagaaataactaaaatcagagcagaactgaaggaaatagagacacaaaaaacccttcaaaaaatcaaagaatccaggagctggttttttgaaaggatcaacaaaattgatagaccgctagcaagactaataaagaaaaaaagagagaagaatcaaatagacacaataaaaaatgataaaggggatatcaccactgatcgcacagaaatgcaaactaccataagagaatactacaaacacctctacgcaaataaactagaaaatctagaagaaatggatacattcctcgacacatacactctcccaagactaaaacaggaagaagttgaatctctgaatagaccaataagaggctctgaaattgtggcaataatcaatagtttaccaaccaaaaagagtccaggaccagatggattcacagccgaattctaccagaggtacaaggaggaactggtaccattccttctgaaactattccaatcaatagaaaaagagggaatcctccctaactcattttatgaggccagcatcattctgataccaaagccgggcagagacacaaccaaaaaagagaattttagaccaatatccttgatgaacattgatgcaaaaatcctcaataaaatactggcaaaccgaatccagcagcacatcaaaaagcttatccatcatgatcaagtgggcttcatccctgggatgcaaggctggttcaatatacgcaaatcaataaatgtaatccagcatataaacagagccaaagacaaaaaccacatgattatctcaatagatgcagaaaaagcctttgacaaaattcaacaagcttcatgctaaaaactctcaataaattaggtattgatgggacgtatttcaaaataataagagctatctatgacaaacccacagccaatatcatactgaatgggcaaaaactggaagcattccctttgaaaactggcacaagacagggatgccctctctcaccgctcctattcaacatagtgttggaagttctggccagggcaatcaggcaggagaaggaaataaagggtattcaattaggaaaagaggaagtcaaattgtccctgtttgcagacgacatgattgtttatctagaaaaccccatcatctcagcccaaaatctccttaagctgataagcaacttcagcaaagtctcaggatacaaaatcaatgtacaaaaatcacaagcattcttatacaccaacaacagacaaacagagagccaaatcatgagtgaactcccattcacaattgcttcaaagagaataaaatacctaggaatccaacttacaagggatgtgaaggacctcttcaaggagaactacaaaccactgctcaaggaaataaaagaggacacaaacaaatggaagaacattccatgctcatgggtaggaagaatcaatatcgtgaaaatggccatastgcccaaggtaatttacagattcaatgccatccccatcaagctaccaatgactttcttcacagaaytggaaaaaactactttmaagttcatatggaaccaaaaaagagcccgcatcgccaagtcaatcctaagccaaaagaacaaagctggaggcatcacactacctgacttcaaactatactacaaggctacagtaaccaaaacagcatggtactggtaccaaaacagagatatagatcaatggaacagaacagagccctcagaaataatgccacatatctacaactatctgatctttgacaaacctgagaaaaacaagcaatggggaaaggattccctatttaataaatggtgctgggaaaactggctagccatatgtagaaagctgaaactggatcccttccttacaccttatacaaaaatcaattcaagatggattaaagatttaaacgttagacctaaaaccataaaaaccctagaagaaaacctaggcattaccattcaggacataggcgtgggcaaggacttcatgtccaaaacaccaaaagcaatggcaacaaaagccaaaattgacaaatgggatctaattaaactaaagagcttctgcacagcaaaagaaactaccatcagagtgaacaggcaacctacaacatgggagaaaattttcgcaacctactcatctgacaaagggctaatatccagaatctacaatgaactcaaacaaatttacaagaaaaaaacaaacaaccccatcaaaaagtgggcaaaggacatgaacagacacttctcaaaagaagacatttatgcagccaaaaaacacatgaaaaaatgctcatcatcactggccatcagagaaatgcaaatcaaaaccactatgagatatcatctcacaccagttagaatggcaatcattaaaaagtcaggaaacaacaggtgctggagaggatgtggagaaataggaacacttttacactgttggtgggactgtaaactagttcaaccattgtggaagtcagtgtggcgattcctcagggatctagaactagaaataccatttgacccagccatcccattactgggtatatacccaaaggactataaatcatgctgctataaagacacatgcacacgtatgtttattgcggcactattcacaatagcaaagacttggaaccaacccaaatatccaacaatgatagactggattaagaaaatgtggcacatatacaccatggaatactatgcagccataaaaaatgacgagttcatgtcctttgtagggacatggatgaaattggaaaccatcattctcagtaaactatcgcaagaacaaaaaaccaaacaccgcatattctcactcataggtgggaattgaacaatgagatcacatggacacaggaaggggaatatcacactctggggactgtggtggggtggggggaggggggagggataacattgggagatatacttaatgctagttgacacgttagtgggtgcagcgcaccagcatggcacatgtatacatatgtaactaacctgcacaatgtgcacatgtaccctaaaacttaaagtataataaaaaaaaaaaaaaaaaaagagagtgagaatgggatagaaaatgttggagaagtggaaggaagccagagagaggacttgtagctagacagaatcctgttttatcaccaacaagctttgtaactttgggcatataatctaactttctgtatttctgctttccttttctgtaaaattggaatttaattatacttattcccagggttggttatgcatagtaaatgagaatatatgtaatgcaattagcattatccttagggtataataggttcctactaaatagggtgaccatatacctcaatttgcctgtgacagccgtgctttatacctgttgtcccagcataattattaaaagtatcccattttattcttaaaaggtcctgttttggataataaatggcatagtccctactagaaatagagaggaactcacagattaattggtccatttcacagattaaaaaaaaaaaaaaagcggaccaagagaagaggcttgctaaaggaaatgtagctacttgttggcagaactgggtcttctgacttggagagcagtgctatgtctatgatcacatccagctgccttcttaattccacagtttttgaacagttaatgatccgcattaatagatctccaaaagcaataaacatgtatgaatcagttaacagttacctaacatcaatcaccttgtaaacccctcaccattactcctccagcattttttgaactgctctttccccaaccagttcttggactccacccaatctcttcctacccctacttgcatctttgattagcatctatgggcatatacagatccccttcccaaccttttggctttaactgtttttkctcacccacatttattccatttatgtggttacctgcttcttctctgtttagctggagtcttggtcaggtagggcctactggtctctccttataccatgttattagtaatgaaccacctaacatatttttaaggatgacaaatgaataagagtttaaactctcttagcaggtggactttctgttacctaatgagacataggctccaggaaagagagttggcccagtatctctaactggaaaattaacctatgtgaggaaaaattcagaggctacaatacctctttccagtgctcatcacagagggaattatttcaacgaacacataaactttgcttggtttactttaaacaaaaacaatctattatctcatagatatccttggattttatttatttataatgttttaaaatcccacatagcactgtttagtcaatgtgatccactttctttattcaatagaattggctgctaatgacttttggtcattttccaaaactgaatccctacttaactgaaaatgacttaaccccactcagaacatttaaaagaacacatcctgtgctgtggagagcctggtgaacaggcaccatgagggccagcacacctgcacactgctgagagcccttgacctcagctttgggaaggtgcaggcagctgctgcgtcctggctggcatccatctctccatgccaatatttccctttccaaggcaggcagagccacctttgtggtagtggagtgtggagcaggaggaaatgagtggagtctgcttgtttctcacctagaggcaaacagaagagaaaagagggcccccttgctattccaccagaactaaggaaaaagacaaaagcaaagaagataaatagttatattatgcctttatttattcagagtccagatgtaaaggaaagtggaaagaaatcacatggacgatccctcatgaccaactttggaaaacataaggtatgaattaagagtaataactatgcatacttcagttaatttaaagattctggaagataacaggagaatatcatcatgaccttggaataactgaagatttcttaaccagcacgtcagcaaaggaaaagattgatatttaaactactttaaaagttaagaacttctacgcatcaacagtatcaaaaagcaagttgcatactgggaaagaatattttgaatacatatatccaataatatatccaaaaaactgtatttaacatcttaaatatacatatccaatacataatgggtatgtgttattaaaactggtatgtgtattatatattctatcctgaatatataaatagcttctataaatcaataaaaagataggcaacttaatttctaaaagatgggcaaaacacttaaacaggcagttcacaaaagaagatatccaaattgctaataaagaaaaggaattcacccgtcagtcatctgggaaacacaatttaaaatgactatgtgattccatatatgcccgccacaacaggtaacattaaaagatggcaagaaccaaatgttagtgaggatgaagcagttgaattctcaaacactacttatggttgtgcacatttgtgcaagtactttggcccactatttcacagtatctgctaaagctgcactatgtactatgacttagcagttctattgttaggtatatgtcaaaagacagaaataggccaggcgtggtggctcacacctgtaatcccagcactttgggaggccttggtgggtggatcacctgaggtcaggtgttcaaaaccagcctggccaacatggccaaacactgtctctactaaaaatacaaaaattagccaggtgtggtggtgtgtgcctgtaatcccagctactcaggaggctaaggcatgagaactgcttgaacccaggaggcagaggttgcagtgaggcgagattgcaccactgcactccagcctgggcaacaagagtgaaactccatctacagaaaaaaaaaaaaaagacagaagtaacaatacttatattgagattggtaatagtacaaagaggaaaaagtacaaatgtccattgataatagaatgagtaaaaattgtggtgtattcatataagagaatagttaacaactaagaaaatgacaaaattacaactatatgcaataatatgatctttataaacatgatgttgagcaaaataaaccagacccaagagagtacatacagttttattccatcaatattaaattcaaaaccaggcaaaagaaaccctatagagtagacatcagaatagttattaccttcacagagaaaggaatgacagaattggaggatcagaaggcttttgggggacagataatattctatttcgtcgtatgtgtggttttgatttgtgaaagacatcaacctgcacacttatgaccagtgtactgtcccaactgtatgttacacttcaataaaatagtgaaaaaagatgttacactaatctggtgtcttctggacagattagctgtttgtcagtaaaacttacataagaattcaattattagatggagaactttacattatacgtgaggtttctgtaaggccatttcttctactttaaggaatgtcatatttagaatttcctgcccgtcagtgagataatttgttagtaggctagtcagattagtcattatcacaaaatattgaaaacaaccaaaatgttcacctccaaagactgtgtaagtaatccgtgaatcattcacataatggacaatgatgcagccattaaaagatgatccctcggaagagctcgacctgtgaaacattaaatgaaaaagtaagatgagaagtagattctatggtatgataaccatgaaaagatgtgtcaaaactgtatgtccagaaaatatatcattctctgaatgttatctgtcattggtgattcatttcttatttctaatttttgcattttatagtaaaaatgattcttaaaaagacatttattactgtataactcaaattactaactatgtggaattagagaatatttcatttctggattgcaacttgtcattacaattaaaatagtctttcaaagtagatgttttagggagtacttcacctaactaaaatttatcatacctcaagttataagaataaattgttgtccattagactatttatagattattttaataaatattgacagtattttaaatggaaaggtaatgttatatagattacagaatgactttctgtgccatttatttaaccatcacaacaataatcctttgaaatagatgttcttgccacactctttctaaagatccaataggaagctagtgaggttagccagtttaccagcctggtgaaagacggaacatgagatcatcaaatggtagggcttccatacctgcaagctgaggtactcaaggcataaataatgccggagaagtttccaaaccaaactggcatcttactgtcactgaaatagagagaagttgagtgtgtttatgccaacagtgtagcttgtttgatttttgggggggtttaggagaagcatgagaaaatctagaaggtggcatggtcctatggtaatttggggatggagaccctttccctttctaagccacattcctgatgtccagggttctctgtctaaacatcttacctttgtttgtagacactgcattttcgatggcaaggttttcggcaattattggggtggtccttccccatcatttgtattgtttatttatttatttagagatggagttttgctcttgttgtccaggctggagtacaatggtgggatctcggctcgctgcaacctccacctcctgggttcaagcgattcttctgcctccacctcccaagtagctgggattataggcacctgccaccacgcccagctaatttttgtatttttagtagagatgaggtttcaccattttttggccaggctggtcttgaacttgtgacctcaggtgatccacccacctcagccccccaaagtgctgggattacaggcgcgagccaccacgcccggcccatcatttgtattgttgaggtctgtgttgcctaaatactgggactatctccaaattggtggggatgaaatcataccatcccaaaaaagttttattgtgaaacagctgatctgtccaaaagacaccagattagacctggagcctttcagcctgtattctgtgggtagcaattttttttcctgctgctagaaatgaaaatgggtcaaaatctcaaaagggaaatttgatttagatgatcatttgagtgcatactgatcaaaagcagaaatggtagttatttatttttttaaaagttactacatgtcctttcttaaaaaaccaaatgtgccttttacagtttattaatagtgagcttcctatacaaaagggcattttgtcccttataatcatttacatagatactgcaactttgactctacccctagtagaaaccttcaaaatgcatgactaataaagtctttctgatacatcaactttatgtgtctccgaagtcagtttctgagcatgaaactctcagttttgtattaatattttaatataattatggccttagataggcttgttattaatgctgaagcaagctgcaatatttggtcattttctccctccaagttatgtttgtgcacatgtgcattttaaagcccagctcattctctgsatgttgtaaatatacttgatacaatgagtttgttaagtttgttttgatttttctggcagaaaactacaaaatcacggtctaaatcttacagtactgatgatgaggaagacacacagcagagtactggcaaggagggtggccagctgtacaggtaagaaagcatctccatgtttcctactcacactcctgaggcccctccatccttgtcagcttagtcatttttcttgtacatgtctagagaattggatcacaaggaaagtattctgtgctgtcgaacatgtgaagaacagctggatatgaaatgataatttatgtagggaactcagctctgtgcctggcacataatgagctctttataaatgttagctgcagcagttgtcaagtaaaaggtatcttcagagaagagggagggagcacatgaactaatacaaagaccgtcacaagagactaaagaagatggatgctaagcccatgttaggagccaggaatctgaaatcagccagatttcaaattcttgttcctccagttaccaactttaacatgcgacaagtttggctcctcattgtatctgtctcttagagtcattgtaaggattaaaggmattaaactaattagccctgtaagccctggcctgattaaataagtattcaaaaaaagttcttttttgtttgtttgtttgctttattgccagtagtatttatgataagtaacatgaccatattttcagaatccaaatcgtgacacatgattcattacaggagttcctggcagtttatttataccataactttcacaaagaaatataaattatatatattagatagatatggatacatatacacacttttgcctttattgaaaaatgaaattatttgaaattagaagcatagaagccctgtaggaataaaactttagtgttcaattaaactttatatttgagctccaacagaatatgtatacataaaatagtaactaattagaagggcagaggagatgtgtgtggtccctactctagggaacagaaaattgaatatatagttacagtaaaggataaagagaaaataataggatcacctgctgggagacttctgctgtgactgttgtcatatgtaagtttgagaaaggcttaactctgacacatatagccagggaaaaggcagtgtttgaggaaagctacaataatcttaatgtgtgcaaaggagacatcaatacagttatcacatgaaatcattttgcatgctgcttagtgtcaactatagattttcccataatagatatcagggcctgagcatctatgatgatgtccttttgggactttagtaacctaatgcacctctaggatgaggaataaaaagagttaattttctgtagaatttctccatatcacggaatgtcttagagttttacttataatttctaggcatgacttcacaccgatttataatcattagccttcacaaaatcagattttcaccagtggctatagaatttcctaattatatggtaaagaaggaacatgcgttcttttttctattgatttttaccacagtaaagttctcagcagaccatcacattcccctcacttacccacttttctcctataggggaacatctaactatcgaaaagaaacctcacaaaaagaagatatacaaatggccaataaacacatgaaaatgtgctcaacattgttggacattagggagatataaatcaaaactacaatggaatacctcttcacacccactatgatacttataaccgaaaaggcagacaataacacatgttatttctgttgcctagagtacggaccacatacatctcctctgcccttcctaattagttactattttatgtatagatattctgttggagcttaagtataaagtttaattgaacactaaagtttaggtttgtttttggtagttgtttcccataagaaaaagtgtgtgtgtgaggggaatgtgatggtctgtggaggacttgactgcagaagagagtggtggtacaatttgtaaggttgcagaggagatcctatgagtggtttgtaggagagagaaaactattaaaatatctaagataaaaacagcactagataaagtaatgaatgtttgttttaagaaagctagagaatatagaaaaagtataaagaagaaagtaaacatcctttgtaattacatctctccaataatcactatggaaatttggcatatttccctttaggtgtataattcttgtggcccgctacccactatgcagtgtttctgttccattttagccctggtctcctccctgcaaaggccatgtagttccctgatgaactctggtgttactccctaactgggtcacagtgggaatccagccttccacagcagaactcacaaatgcatgagaagaggctgtgattcctggcagagcagtgaataaaaccacattacaatagtccccacgtcatcatgagaaatgactgcagtggatgcctgaaaccacagatggtagtgaaccctatatatatgttgtttttctctttccttattaagtcaaacattttcaccttttcacttcaaggaagtgctttgcagcatctctttggcatatctgaattgccagcattactactcccgcactttagggccattattaagtaaaataagagttacttgaacataagcactgcaaaacctccactccacagtcagtcacataagaagatgtctaccagatgacacatacatcatggatatgctggacaaagggatgactcatgtccagagtgggacggagcaggacctcacaagatttcatcatgctactaagaatggcayacaatttaaaactcatggccaggtgctgtggcttgcgtctgtaatcctagcattttgggaggccaatgcaggtggatcacttgaggtcaggagtttgagaccagcctggccaacatggtgaaaccctttcactgctaaaattacaaaaaattagctggcgtggtggtgtgcacctgtagtcccagctactcgggaggctgaggcaggagaatcacttgaacctgggaggcagaggttgcagtgaaccaagaatgcgccactgcactgcagcttgggcaacagagagagactctgtctcaaaaaaagaaaaaaaatctcatgaattgtttatttctgaaatttccacttaatatttttagaccatggttaactatgggcaaatgaaactctggaaagggaaagtgaggataaggggggactactgtagtaggattttgtggtggaaagagcactgaactaggaagcacacttgggtgccaatcctggctcccttaggacctggggcaggtattccctattaaatcattgtcttaaataaggaaagtgggataaccaagaacccaaacctctttcaactccaaaatgtcatgcatcctctgtgggtacttcacagattgggtcgccgaaggaaaaccatgaagctctgccgagaactctctgatttggttgtgtacacaaactccgtggccgctcaggacattgtggatgacggtaaggatggagagttttctcattctgctctgaataaacattcttgacctttctttttcaattgttaatgaatttttgttaatcccattatcaacacacatttttgggactatgtagaaaccaatttgagtgtcaggaaactcactgctgctatagtgttgagttcacatggagggttctactgattactgtggttgcctgattgaccagaggccagagaaagttcccacagggccaaagaggactttattactatacaaagacaagtgcctcagggcaagatcttcctgcaacacttgaactgtgaagtccaggcccggcttgaggaccaggtcacagatggccattccaaatgcgaatgaccaaaagaagaaattaattggctaaaatcacaccttgaaaagccctatattttctcaatgaaagttttgacttgggtgaaaatagcttaatccagattgaagttttaacaaaaagagcagaaatctcagtagcattctctccgtcactgttttttacctatcagttgccacacggagctgagaaattctagtcacatctattcatatccttggctttcctgctagttactcttgtctcctttatcttctatttcatttagttactgaatgcttacagaaaaaaaacctactgtcatgtggcttttcatctaattttaattttagtggaaccgaaatgtaaatcaggacctccaaatttctcaacaagttttagtgaagggaaaacaacattgtgtcctcacaaacctccaggattcttccctcccatctccccctgcccagcccccactccacaaatgtatctttttctatttgcagaaagatttcttccctttggccttgattccttcttcaaatggtaacaattatacaagatttaaatgaatttcacatgtgagagcatgagaacctgtaggattctcagcaactgagcaacacactcttacaacaattgcccttagctcaaaaataaactcagggaatgattgcattaagttaaaggtatatttggtttagggaataaaaatttccaataaatggcttggaaaacataatcctattaacttaatggaaattaatcttgagtactatttagctctggaacttcagctgtttttgtctttttaatttttttgccagccacaaaatgaaaactagataatgaatgcatggcttatcctaatgtgatacaactcaactctattaatatactaattgatatgtgcctaattagcaaggtcgtatcaatgatattgtgatgtgcatatttatrtagagagacagacaaaacagtagtagtgattatagtcctattctatctgaattaggcttgtcaaaaagatattttctcctataatgtttaaaacatccctcatcaaaatctgcaattaagttcaatattagtatgcttgagatatgtaaactgtgttaataggttatgccaataaaaaatatatgaacatgtatctttaaggaaagggtctaaactagaaacatcatcacattaaaaactgtaatcctctcatttctttgccacagtttgtattcctgactcttctaactcgggagtatcattgtcagttgggcagcatctaacatctaagggtgtacaaccctgaggaccacaggggccctgggaaactgtgtgttaataaacatgcagagtctagatatgactcaggcccagctggcaaagcgagaccatatacagttcaactctttggtttcatggaccacatctctctgtctgggctcagacacactcagcttattagggctgaataagaatgagattctgggtaactttgggtctttttatctgggctggtcttttccagcatgttcaaatgacatatgggcggccattttggggatagggtatgggttcttggtgaaggagtggaaatagcgggggctttgtagatatggtacaaaaggtgggattggagacaagagtggaatattaaatgtttggagctttactccattatgacccccaaatttgcagcttctgtgagtctagattgacccctcctgatgattgtgctggcagaaactttagtacaggcttcatgtacttttacctycctttactttgttccatagtttatatgcgtggctaggtgaatgtctgtctttgttcttaaaacttttattcctttataatgcttttgacctctttttctccattattattcctttctcccaaataggttttgacttgttccatagttctattcaaagcaactttaaaactcaactttttatttttataattgttcattttcctttattttcttggatcctggatgttactagtaatacatgttttacttgtgtgccttttagatgagtgccttcaatgaatgtcttcctgttatcaggaagaagctatctagttttatttatccatggttgtctatatatttggcaaatatattctgtttaagttattttttctacctgttcttttcatgctagccagataggcataaattagcggtatgattgaattcttagggagaacaggggacccagaaatagacagctacttgagcaagacacacagctctgatttggcctcaaaatggcaaaagaaccctatgaatggaatgttatgggtcttttctgttgaggagctgcctctactctggttgaatccactctctagtgctctgctttttgctattggtataatctgacattattataaagtcttctgtgcgtggtgttttctttgctgtagttctcacttccttttttctcgattaaaaactgccaggaaccacaggaaatgtgttatcattcagtgaaacaagagcacatcaggttgttcagcaaaaatcagagcagttcatgatttataatcaaaagcaactcacgaggatttacccctctgcctaccgcattgattccagtaacttcaaccctctcccctactggaacgcaggctgccagctaggtgtgtattccttgggaaggagtggttctctgtatattctcactatgccaccatcttgcctaattctctcccactttcaacttgcacagtggcactgaattatcaatctgaaggacgaatgatgcagttaaaccgagccaaattcaaggcaaatggcaattgtggctatgtcctcaaaccccagcaaatgtgcaaaggtgtgtattaatttcatagtcataaatgcaggtgtgtgttaatttcatagtctaaatgcaggcaacctttattaaggaagctgtttagaaagtgtgataccccagagtttttcaacttttttttttcaaaaagataggttaaggtgtttgaatgtgaattagaattcttgtcaccactacttaatatttggttagccgtgatgtttagaatgttatcttgagaggtcgtgtgtgaaagagggacatggatagcattgggttatcacttgaaatccagtgccccatataagctggactgctttttaaggtctgagcccaatctttcagaaactatcttaagtaatgtgagtctgtgacctgctgggaagcttcaattccacctgaaacaattttatcaagcccttttactcagtgtagtccaattacaaaacagtgctaacaaaagagaaaggataggctgggcatgggggctgacgcctgtaattccagcactttgtgaggtcaaggtgggcggatcacctgaggtcaggagtttgagaccagcctggccaacatggtaaaacgccgtctctactgaaaatcagaattagctgggcatagtggtgcgtgcctgtagtcccagctacttgggaagttgaggtaggagaatcgctggaacccaggaggcagaggttgcagtgagccaagatcacaccactgcactccagcctgggtgacagagtgagactccatctcaaaagaaacaaaacaaagcaaaaaaaggataatgtgttagatcaaacaacactttcttttggttctgctcattaaaattatttttaaaatttccaaattacatatataacaattcagataaaaaagttgttgacaggattatcttcaagattttacactttgcacattttcttgctctgctgtttacttaatttcaagtcttctttctgtttgttatattcactcatgcctgagatagtttaggttagaaaattatttgaatctgacataattgttcttctttttacactgttggtgttcaaataaaatgcttctcttccttcattccacagttgatcattgcattgcaaacacttgctttaagttggcccactccactggcctttggcaacatggtttctaatgaaaaccacagctatgccacactgatagttatgtgatcatgtaattcagcatttgtttttgtttgtttgtttctttgtttacaagcttaagctgtgcatgcgtgtgtgtttcttcttatgttaccaacttatactttacttggcctaggtactttcaaccctttctctggtgaccctcttcctgccaaccccaaaaagcagctcatcctgaaagttatcagtggacagcaactccccaaacctccagactccatgtttggagatcgaggcgaggtaagttgcctatgactacgtgtctaagtggttaattatgtgattatcttagtgcatttacattttatccgaaatgtcttcagagatgtatgtgtgttcataactgagcactgacctcagcttatcagacattaactgatttattggtaagtcacacagttcttgctgtactgctgtccatcatctattttgaaggcataagagcacacaattgaattcacaatttaaggttgacactagcattgctaaaattggagtgcaaagacaattatattattaacagaacaacacctaagagtatatcttaacctagaaaggcaatgttccgttaataatataacctcacattcctgtcctcctgcaatgctcctccctgctgcacatcagccacctgctccttggccatgtgctgattcttattatcatctgctgtacctgtgtcgcgtgattttaaaatgtcttcatctgcggccacagtcttttttctttccagagctcttagcccattgtttccattataccttcttggcttctgttttctcgctatatagcagcttctcctatgctcatgcccttcctctcagagctgatccattacttcaggttctttgtcactcccgcctattaaaccatcatttttggatcttaaggaaggaaatcacagagctctacaatttggtaccgccataaatgctttaagaagtctactttctctgctttagactttcttaggtcagctctttctagattctttgggttttattccttcattgttcgtcgcccagaactggtaccagaaaggagagtctacagatgaccaacaatacaagatatttccccctagaggagaggatgggaattaaagtataagaatcaaacatgcatagcttgattaattattatgccacccagatcaaggcagagtatatccagaatccctagaaggctcctgtccaccttcccagtcaatatctaccctccccactgcctctcatagcaaacaccaacccctatcacagcagacaaattttgtctattcctaaactttatataaatggactcttagagtaggtactcttttatgtctggcttgctcaacgttatgttatataggagaactttattcttttctcattgttgagagtattcattgaacacatacttctgaccaggcacggtggctcacatttataatcccagcactttgagaggctgaggtgggcagattgcctgagctcaggagtttgagaccagcctggacaacatggcaaaaccccatctctacaaaaattaccaaaattagccaggtgtggtgcacaatcctatagtcccagctactcgggaggctgaggtgggaggatggcttaaacctgggaggtggaggctgccatgagctaagatcatgccactgcactccgacctgagctacagagtaagaccctatctcaaaaaacaaaataacaaaaaacaaaaaacgtatattccacaattatccatcctactcatgatagaaatttaggttgtttccagtgtttgactattatagatacagctgctctcagcatttgtgcatgggcaaaacatctcagttctgtttggtatttgccctgaactaaagttgtaggttcagtgggtaaagttgttggcgttaataaatactagcaaacagtaatttaatattttttatacttgtctcatatatctgaatccaccacacctagtaccatttctttttcttactaagcaccttgtaaaatcagttgctgtcgaaatgtagacattttggccaatattctcagattaattaacatatgtatagaaatatgttatttgtaatagtactttctctttacttaatagatcattgacccttttgttgaagttgaaattattggattgccagtagattgttgtaaagatcaaacccgtgtggtagatgacaatggtaagatggtaatctgtgttcactttttaatgaagatggtctagaaatagaatttacactaaaaaaagtgtctatgtagaagagcaagaaatctctaaaatccgtaactcccatctgagtttatgttaaaagcttttcaacacataaaactaagtaactgtggaattgatgcgtggcttatttttatggtattgtaatctaggctctctagacttttgcttttaaaggaaattttttttctagtaaaaagagtaaatgatattttaaagaattgggttaaaaattcactgaggaaatgcctccattatatgtttatattgtatttttatgacatgcgttttctcaaagctctcatttgtgaagcctatgtgtcttgataatttctcactttttctggagcatgtaaaactctaaaggcaagcacaatatagtctggcgagtttacttcttgaatatttacatacgattggaggggcagcattcttcttatattttcgccataatataaagaaatttttctttacccaagcctcatgtctttttatttgtaatcttttaaaatttgtttgttcatacatttcacaaacattattgtatacctatttttcctcaatctcttgtgattaatactgtaaaatacatttgaagcacaatcattaatttgagaaattaagggttcacaaggagtccctgaaggaacactacagtttcagagtagggcaaacctataacttaggaaaaacatgtacacagaaagaaaccttctcaaattgcattttcccaccgatgttcaatagattcttctttctttttttagtctcagaaataattgagaggtcatcactaagtcaacaaaaagatcttctctgattcaagagaggtatctcagtgatttttcagctcataattatttcattagctcgaggctttttgatagggttaagtggttgatacctccgaaatgcatacatttttaaacacttattttcattttyagaaaggaagaaaaacagaaacttatggagtacttgaatttttaacaacttttatagttattttattggagagaattttaccaagtaaatgtatttttgcattttagtatttgaggtgaattatataccttattaacttatttttcagtagctgtgaaaatatgccatcattcatgcagtaaggtcttgcttcrtgagaagctactgggaatcaatagtgcatggtctaatttgaccctgtcactaactataaggccttgtgtggccttgggcacattattgtctatgaacatcaattttctcaactacaaaatgtcttataaatactgatattccctactttaaaagatgagtgttacttgtacagtttttgaaagtaatatatttttgaaagtcagtaatatatattttttaattagaaagaaacaaaaaccaaaaccctgctctactctaaaaactctaaacatcctctaaaaaaaacttagagaattgctataagaaataagaggatgtatgtacaataggagttgaaacctgcaaatgcaccttataaaatggttgttggtggttattacagcagcaggatctttggtgcatgagaagcataattctgttgggagaggatatcattctttattgttttgtctaaaacattattcttagatcactactatagataattttttaacttattgaagcattctgaatactaaagagcttctctacaatacagttaggcatcaaagattaatagatttgatgtgataatttacaggcaattttcttaccaattattttctagcaagggggtaaatttcgaggctttattccagtaaggcatccttgagtgtggcttagttgtcttcatgagtttaataaccattgcaagcaattttcaccgtctgctttgcagatgttgctgccaactcattttcagccaagtcctttgcttttctgatttttcttttcctatttctctgaggatttaaccctgtgtgggaagaaacactgacatttacagtacacatgccagaaatagctttggttcggttccttgtgtgggatcacgatcccattggacgagactttgttggacaaagaactgtgaccttcagcagcttagtgcctggtaggtatgagctggccttttctctctagactgaccattcctttttatttggaagacgtaatatatgatatgttacttacataatagcatacgtgataaaatatgtgtcatgtaataaatgtgacttttaacaaactttgtaaaatgtaaaggagtatagttgggctgggtgcagtggctcacacctgtaatcccagcactctgggaggccgaggygggaggatcacctaaggtcaggagttcgagaccagcctgaccaacatggagaaaccccgtccctactaaaaataaaaaattagccgggtgtggtggtgcatgcctgtaatcccagctattcgggaagccgaggcaggagaattgcttgaacccaggaggcggggtttgcagtgagccaagatcatgccactgcattccagcctgggcaacagagcaacactctgtctcaaaaaaaaaaagaactacagtcaagtcagatacttaattttgttgcacccatgagaaagccaaatgcaagttcaactaaaaagaaacgactctctttccttttatcaggctaccggcatgtctatttggaaggactgacagaagcatccatatttgtacacataaccatcaatgaaatctatggaaaggtgagaaagatcataggatttaaagtcatatacattaatatggtccttaacaatgctactgattaattgcataataggaatgtaaattttgacaaactgttcttgaaccaaaaactctaaggaggcccagcaagcccagtctgctattccagtcatgtcctgatccacctgtactcttttcactatttaaggtgtgtactcatttcttctatacaggggccctctctgggcttaatagaattgagaaaactattattctctcaggcagtaatctgttgggctaaaacaatgaagatatagttaaatgttgagttttattttaatccttaaaaagactcaactggcctcagtgggaaatgcagtgtctcagatggttgatgagttacctgtactaactgggctgtgatcccagcgacttctaggcaggctacattcatttggtaccaatgtttttaactgaaaatctaaaaattgtgaatggattttaaagctacctataggactgaaaaggcgaccatgtaaatgcattctagttctttcctgatgctgttgtcttggttatagaactcatttgaggtttacaaatcaataggttgtcctctggtcatgtcaagtaattggggacttggttaccagtatgaattttcaggaccacacgggatttggagggactgttaaagcattgaatggggcctagaaatgtyccgtgctctttgccagaaaatctgtatagctggaagcttcctcatctgtgaatgtgggataaaaataatacctatctcataaataaatatatatcttatccttagaaagctgcctggtacrcagtaaatgctcagaaatgttggctaatattaatgttattatgactacaaccyaactaataaggaatggaccatttcagcatgaattagggagtgtaaagtttattttcatatctgtcagcaagggcgtggaggtgggggtaaggatcctaatttctaagactcgtgaagttttataccataacttcctgtgtttagtcctggatttctgtttgtgctgcttgttggggtcttgcctctcatctaagtagacacaaatgtaaataattcaaaaatgattcttgaattctaggaatcccaggttaactacagattatctctagcatttatcacattgagggaaacaattacattctgaatttgtttaaaacttgagccagggccaggcgcggtggctcacgcctgtaatcccagcactttgggaggccgaggcgggtggatcatgaggtcaggagatcgagaccatcctggctaacaaggtgaaaccccgtctctactaaaaatacaaaaaattagccgggcgcggtggccggcgcctgtagtcccagctactcgggaggctgaggcaggagaatggcgtgaacccgggaagcggagcttgcagtgagccgagattgcgccactgcagtccgcagtccggcctgggcgacagagcgagactccgtctcaaaaaaaaaaaaaaaaaaaaaacaaacttgagccagaaataaattaaaatctgaaagtgttctatatcacctccatcttctctgctaaataaatgtccatttatgagtcatactctttattcctttcaagatgtgttcgggttgggatccacacatcacagtgtagtggatattggttgaacaatgaatgagcataagactaaaaatccccaaaactaagagaaagggtttatagacatgtatgcattttttcttttgtgtttacttgtgacaccctcttcaatgagccccaattgtgttttgttgtgttttgtttttttcctttacagtggagccctttaatactcaaccccagttatactatattgcactttctaggagctacaaaggtagtttctcagcatggtgctttgttctggctggcatatttctttttaagtggttatggcagcatgctttttcatatcactccatcttcctgcttaccactttgaaacatgcatctgttgctttaaggcgcctgaagttcatagcagtctatgagctgtggagacttttcctaccactttgtcatctctgggtaggaaacttctgggaaagcttgatgtaagaatggaaggctgaagtccttgcaaagtaaggttgataagatgtgcatgaagttgtgcaaacatgctgtgagctgctgctttcttggtttgaatatatttcaatggctgtacgattttggtttatattcatttttcatggagctgtcattttcaaggcaagttgttgatgtgatggcatttgcttaacttgtggttggttcttttgtgtcttcagaacagacaactccagggtctgaagggactgttcaataagaatcctaggcacagttcttcagaaaacaattcccattatgtacggaagcgatccattggagatagaattctgcgacgcacagctagcgccccagccaaaggcaggaaaaagagcaaaatgggcttccaagaaatggtggagataaaggattctgtgtccgaggccacaagagatcaagatggcgtgctgaggaggaccacacgcagtttgcaagcacgccctgtctctatgcctgttgacagaaaccttctgggagctttgtcgctgcctgtatctgaaacagcaaaagacattgaaggaaaagaaaactctctaggtaagatgctttaagtttctctgagaataaacccttctaggctgcatgtcagtccctgtttaccattatgaagtggctgacattctgtagtcaaagtaaaatatactgaaaaataaatactttgtaatgtgatcttccagaccagaagattttaaactttgggggccaggtagatccatttcctcctcaccaagagcttcataatatcaacatctgaaattgacagtgagggataggggagccattaggtgtgatggcacagagaggaagatgaaacctgcaaaataggatttgaaatattgattttccaaatgagtgcyatatttactgatttgttttgagggtgaatatagttgtattacttttcttaccatataacacatttccatgattggaaatgtttatggagaaagaaagccagatgttaaaaacgagccacctttttcaaaaacaggcaaatcttttttctcaagatgtggctcaggcagtgttttcctgtggcctcacttccctgatccttggatgctgacagagatagaggtgtgcctgcagcttcagcacggttgtgggctccacaagcatagggaccaggtgctgcctgtctttttccttaatttgagtgtatcattgactcatatcaggagctcaataaagagtgaagaccgccttgcagtgtgccagagaatttttgactgatgttggtgactcccaacccatcctatctgggggtaaatttaagcgccaaaactgtgtgcatttgatatctctgcaacaaatatgttttaattaaatcagaatcatctcagacaagtaaaatgtggtactgatttcctttagcaaaattattcttttaacttttatcaaatggtctaatttcagtgctctcttttcccacaaacaccattttacttgtattgatttttgttacaagatattcttcagtggtttatttgaaggagaaaaagaacatttaaaagcttgaaattttgctaagagcagtgtcagagaagagataaaacatgtgccttaaaatgtattttaaaaccccatctttgggaaaaataaagctatattcagtagaaattggttctatctgttaatgccacagttaagatgttaataccattaaggtgagttagaaagcaattttgaggtaatgtttcttgtctacttttaaaaaacagttatataaattagtcatgtgtattaaagtttcggtaaatataaaacaatacatagttatgttgcattaagtacagaaaaagcagactacaaaattctatatattattctgttcctctgcaaaatcttacagtggctgtctcagtggtaacatcatatggtatttaattttttctttataattttttgaggttttcaaaatttttatgatgaatatttttagtttggaaactatttaataacaagttgaacaagttctttttcttatatatcatgactctgaaagcattaaattattaaaataatctgatgaagaattgaatacctcatactctcctagcagtatactaaccatgatgggctatcccaaattactgtgaattgtgtttttatggttttcctttactgtgcctgacaacttactgccacttttagggaaggatgcaatatgaaatttgtgtattaaaaagaaatatatgattaacaaaaaattagatattagcaatgacatggaattgatgaccaatttttatctttacattttaactcaacagatattgatattttaatgcatttattgcaccttccaattattttagaaattaattgactaaattaaatatgctcccaaaatgttttgaaaatgatattattatgtttttcttcttttcttctttttttgttttaactaatacatgtataactttgaaagcttatagtatcttgcttacaggtaccacaatgctttgtttaacagagctgtcttgttctgtttctattgccatgcttctgtgtagtacaaatctgaataggaaacaacttaaggtaatcctcactgtaaaagtatggtaactcattgacatttttttgacaatgaatattacatccttagcagatgtaatagatattcaaagggaagctccagtgaaattcctataaatatattttaccatttattcatcacacagacactttgttgcaaacctatgcaatccataattatattctgtcacagtgtaacagatttacattctccatttgtctgtccgaagacaacatgagtgtttgcaggtcctacataaagtgatagatgtcacctaaaatattgtttgtctccttcagcagaagataaagatggcagaagaaaagggaaagcaagtataaaagatccacattttctaaatttcaacaaaaagttatcatcctcctccagtgctctgctccacaaagataccagccaaggggacaccattgtatctactgcccacatgtcagtcacaggagaacagctgggcatgtcaagtcctaggggtgggagaaccacatcaaatgccacaagcaattgccaggaaaacccctgtcccagcaagtctctctccccaaagcagcatttggctcchgatcctgtagttaaccccacacaagatctgcatggtgtgaaaatcaaggaaaagggtaatcctgaggactttgtggaagggaaaagcatcttgtcaggaagcgtcctttctcatagcaacctagaaattaagaacctggaaggtaataggggtaagggccgagctgcaacatccttttctttgtcagacgtctccatgctctgttctgacatacctgacctacattcaactgcaattctgcaggagagtgtaatttcccatcttattgacaatgtcactttaacaaatgagaatgagccgggcagttccatctcagccctgattggccagtttgatgagaccaacaatcaggctctcacagttgtttctcatcttcataataccagtgtgatgtcaggccattgtcccttgcctagcctgggcctaaaaatgcccatcaagcatggtttttgcaagggaaaatccaagtcttccttcctgtgctcatctccggagctgatagcactctcgagttctgagaccaccaaacatgcaacgaacacagtttatgaaactacctgcactcccatctctaaaaccaaaccagatgatgacctttctagtaaggccaagacagcggccttagaaagcaacctgcctggatcccctaatacttctcgtggctggttaccaaaaagtcctaccaagggagaagactgggaaacactgaagagctgcagccctgcctcttcccctgatttgaccctggaggatgtaatagctgatcccactctctgtttcaattctggggagagcagccttgtggaaattgatggagaatcagaaaatctttctctaacaacctgtgaatataggagagagggcacaagtcaacttgcttctcctttaaaactcaagtacaatcagggtgtggtagaacactttcaaagaggtttgagaaacggctactgtaaagagaccctccgcccttctgtccctgaaatattcaacaatattcaagatgtcaaaactcaaagtatttcttatctagcctatcagggtgctggctttgtgcataatcatttctcagattcagatgcaaaaatgttccagacctgtgtgccccagcaatctagtgctcaagatatgcatgtccctgtacccaagcagttggcacatcttcctttgcctgctctgaaactgcctagtccttgcaaatccaaaagtctgggggacttaacatcagaggacattgcctgcaattttgagagcaagtaccagtgtattagtaagagttttgttacaactggcattagagacaagaagggcgtgactgtgaagacaaagtcgttagagcctatagatgccctgaccgagcagcttcggaagcttgtgtcctttgaccaggaagacaactgccaagtgctatattcaaagcaggatgccaatcagctcccccgggcactggtcaggaagttgtcatccagaagtcagagcagagtgcgcaatattgctagtcgtgccaaggagaaacaggaagccaacaagcagaaagttccaaaccccagcaatggggcaggagtggttcttagaaacaaaccctcagcacccacccctgcagtgaatcgccactccaccggctcctacatcgcaggctacctgaagaacacgaaagggggtggccttgaaggccggggcatcccagagggggcatgcacggctcttcactatggccacgttgaccagttttgttcagataattctgttttgcagactgagccaagcagtgatgataaaccagaaatttattttcttttgagactgtgaattatttaaaactgcattcttaaggttttcaaggtattctgtagaatgtcagagttttcagtaaataagttccttggctttggaatgattttcaaatgtatttttaaacttgtatttgggtctccctttgacttcatgtgttctccctgttaatgcgtttgtatatagatttggtgacatttcccatgtacctattatgatctttctcccttgagttgttgtaaactgtatcagtatgaaatatgtgcatgccctagatgtgaaactcctcagcagctcgggttataatgtgtgtgtgtttcaccaagatgtcctttactgtgtcctcagattgcagtcacaaatgtagtcatttttactctctaactgttgagttgattaagagactttgcaaacgacaaagggatgaattccttactttaatctgttatcatttttcctatgtttccctctttgttcagaagcccagatgcatttttataactcagttttaaaaactttaaaatagttaccttgccttttaggatgttcttatcccacccataatgagagttgaaaggggatggatagctgctccccatgcccttcccactttttggaataggccgtgagggtgtgasgaagaaggctgtcttttgtacataaggacaaaattgtttgttttacataaattttgttacatatttttgctaatggctttgtatgtaacaagaagcgagttgccaaactacctgttgtacttttgaattttctgattgaattacagactgcgaacaacggctttcagaatgagggacttccatcagactctaatgataatagtagcacaaattgaaaacttccccaaagctttcacagaatattttctcataataaaatccaagtgaacagataattagaagaaacccttttccttcagggaaccaagcaactctattttagtactgacatgcattattttcactgtgaattcacttttttattgcatgttcagatgtccctctttgttttttttttttgtaacattaactgcaatgatgttcttcctggaattcatgaaaatataattaaaacacatttttaaacacttggtgaactttttttacaattgaaattcatatgatgactattgagttaaagcactcagcactctgacatcctttccatgtgtttgcgacaaaatagaaagctatcacagaggacagttttaagcagcaatttatgtctctgagtgttttccttatgctttaaagagcatatttgtgaggcgacttgaaagaaaatcaaatgtaatgagtttccttgcatttggcattgctattgcaagtttaaaaataagccttctgaactggttgtggtggtgggtggtgggagggaagcggtggtagtggtggtggtggtggtggtcgtgggtgggggagctacgtggggaaggcaagtgagaggttatgtttggcaagtgaaattgtctgaagctttgcaatgtgagggaagagtgcagaggagaacacttggtccctggttcccttggtccccaactctgagcttttccccaaggttgggggtcctttattttctggacaggcactgggagtctggttgggggctgatgtgtaatgatgaaagggtaagtgaccatttctatgcccttagtgagcccaaggcatttttgttttcttgggagttctgaatctcctaattctatccttagaccttggtttgtttttaaggtatccttgttttagaagggattgacatgctgtacagctgttaaaattcacttgccaaagaatagaatttagctgccctttaggatttgacggtatctttgttctaaaacaaatccaggagtttacatttgttttgttttgttcctttagggtaaacactgacattttatggactagaattatgagatccccaaaattgtgggaagtgaaatacaagcaatttcagaaaataggttgggaatgtttctagcacaaagaaaagacaaatatttaaggtgttagatatcccaggtacastgatttgttctttataaattatatgaatgtactaaattatcatatgtacccccctcccaaaagaagaaaataggttggatgcacagtacttctggctgtcccaggaaatactcattttcctttgctccttaaagttcttaaatggaaatatttgataagcaaatttgataatggactgggattaaatcaagttcatttcacacatgaaaaaactgaggctcagagtaattattaatttaattaaataagcttaattacattaagtgtaatccattagcacattcatttagctgatgctttccctttaaaaaaaacaaaaaacacatattatttcttggttaatattgaatttaaatcctcttcctttttaaatttttttattatttaatttgtgtgggtacacagtaggtgcatatatgtatggagtacatgagatgttttgatataggcatgcaatgtgaaataagcacatcatggagaatggagtatccatttcctcaagcatttatcctttgacttacccattgacttacgaacaatccaattacactctttattttaaaatatacagttaagttattattgactatagtcatcctgttgtgctatcacatagtaggtcttattcattctttctattttttttgtattaattagccatcttcacctccctactcccagtctcccactacacttcccagcctatgtaactatcctactctctatatccatgaattcaattgttttgatttttagatcccacaaataagtgagaacatgcaatgtttgtttttctgtgtctggcttatttcacttaacctaatgatctccagttccatccatgttgttgtaaatgacgatctcattctttttatggctgaatagtactccattgtgtatatgtaccacattttctttatccattcatctattgatagacacttaggttgcttccaaatcttagctaaggtaagcagtgctgcaacacacataggagtgcagagatctctttgatataatgatttcctttcttttgggtatatacctagaagtggtattgctggatcatatgatagctcaatttttagttttttgaggcacttccaaactgttctccatagtagttatgctaatttatattcccaccaacagtgtacaatggttcccttttctccacatcctcatcagcatttgattttgcctgtcttttggataaaagccattttaactggggtgagatgatatctcattgtagttttgatttgcatttctctgatgatcaatgatgttgagcaccttttcatatgcctgttttccatttgtatgtcttcttttgagaaatgtctattaaaatctgttgcccattttttgatcagattattagatttttttctatagagttgtttgagttccttatatattctggttactaatcccttgtcagaggggtcatttgcaaatattttctcccattctgtgtgttgtctcttcactttgttcattgtttcctttgctgtgcagaagccttttaacttgatgtgatcccatttgtctgtttttgctttggttgcccgtgcttgtgggtatttctcaaaaaaattttgcctagaccaatgtcctggaaatttccaatattttcttgtagtcattttatagcttaacatcttagatttgtctttaattcattttaatttgatttttgtatatggcgagaggtaggggtctattttctttatcttgtatatagatacccagttttcccagtactgcttattgaagagactgtcttttccttagcatatgttcttggcacttttgttgaaaatgagttcactgtaggtgtgtggatttgtttctgcattttctattgtgttccattgatctgtgtgtctgttttcatgccagtaccatgctgttttggttactatagctctgtaatataatttgaagtcaggtaatgtgattcctctgggtttgttctttttgcttaggatacctttggctactctgggtcttttgtggttccatataaattttaggattattttttctgtttctgtgaagaatgtcattggtattttgatagggattgcatcgaatctgtagattgctttgggtagtgtggatattttaatgacattgagtcttccaatccatgaatatggaatatttttcattgttcggtgtccttttcaatttccttcatcagtgttttatagttttcattatagagagcttaatatgtggctattgtaaataggattactttaatttttttcacattgttcactgttgacatattgaaatgctactgatttttgtatgttgattttgtatcctgcaactttgctgaatttgtttatcagttctactaattttcttgtggagtctttagttttttctaaatataagatcatatcatccttaaacaaggataatttgacttcttccttttcaatttggatgccctttatatctttctcttgtctgattgctctagctagaactttcagtactatggtgaataacaatggtgacagtgggcaccctcatcatgttccagatcttagaggaaaggctttccagtttttcccccattcaatatgatactagctgtgggtctgttgtatatgacttttattactttgaggtatgttccttctagcctcagttttatcataaagggatgttaaattttatcaaatactttttcagcatcaattgaaattatcatatgttttttattctttattctattgatatgatgtatcatactgattgatttgcatatgttggaccatccatgggtgataaatcccacttagtcataatgaatgatctttctaatgtattgctgaattggtttgctagtattttgttacggatttttgcatcaatattcatcacagatattggcctgtcattttctttttttgtgtctttttctggtttttgtgtcaaggtaatactggcttcatagaaagagtttggaagtgttccttcttcctctattttctggaatagtttgagtaggattggtgtaagtcattctttaaatgtttggtagaattcagcagtgaagccatcagtttgcaggcttttctctaccgagagacttttttattacagctttgatctcattacttgttatcaatttgtttgggttttggatttcttcctggttcaatcttggtaggttttatatatctagaaatttgtcaatttcttctagattttccaatttattggcatgtagttgctcatggtagccactaatggtccttcgaattgctgcaatatcagttgtaatgtctcttttttcatttctcattttatttatttggatcttctctcttttttcttagtctggctaaaggtttgtcaattttgtttacattagaaaacactaactttttgttttattgatcctttgtaatttttcccactctaatgttgtttatttgtgctctgatctttattatttatttttttctactaattttgggtttggtttcctttgcttttctggttctttaagatgcattgttagattgtttatttgaagtttttcctctttttaaatgtaggcacttatagctctagacttccctctgagtgctgcttttgctgtatcctgtaggttttggtaagttatatttccattatcgttttctagatcctgtagaaattttaaaattttcttcttaatttctttttgaaccagtggttattcaggaacatattgtttaatttccatgtatttgtatagtttccaaaatttctcattattaatttttagttttattgcattgtgctcagagaagatgcttgatattattccatttttttgtctttttttttttttaatactttaagttttagggtacatgtgcacattgtgcaggttagttacatatgtatacatgtgccatgctggtgcactgcacccactaactcgtcatctagcattaggtatatctcccaatgctatccctcccccctccccccaccccaccacagtccccagagtgtgatattccccttcctgtgtccatgtaatctcattgttcaactcccacctatgagtgagaatatgcggtgtttggttttttgttcttgcgatagtttactgagaatgatgatttccaatttcatccatgtccctacaaaggacatgaactcatcattttttatggctgcatagtattccatggtgtatatgtgccacattttcttaatccagtctatcattgatggacatttgggttggttccaagtctttgctattgtgaataatgctgcaataaacatacgtgtgcatgtgtctttatagcagcatgatttatagtcctttgggtatatacccagtaatgggatggctgggtcaaatggtatttctagttctagatccctgaggaatcgccacactgacttccacaatggttgaactagtttacagtcccaccaacagtgtaaaagtgttcctatttctccacatcctctccagcacctgttgtttcctgactttctaatgattgccattctaactggtgtgagatagtatctcattgtggttttgatttgcatttctctgatggccagtgatgatgagcattttttcatgtgttttttggctgcataaatgtcttcttttgagaagtgtctgttcatgtccttcgcccactttttgatggggttgtttgtttttttcttgtaaatttgtttgagttcattgtagattctggatattagccctttgtcagatgagtaggttgcaaaacttttctcccattttgtaggttgcctgttcactctgatggtagtttcttttgctgtgcagaagctctttagtttaattagatcccatttgtcaatgttggcttttgttgccactgcttttggtgttttagacatgaagtccttgcccatgcctatgtcctgaatggtaatgcctaggttttcttctagggtttttatggttttaggtctaacgtttaagtctttaatccatcttgaattgatttttgtataaagtgtaaggaagggatccagtttcagct

SEQ ID NO: 95380 - DNA, 15189 bp, Homo sapiens
  misc_feature (1)...(15189): n = A,T,C or G
gaggttgccgtgagcctacgttgtgccactgtacttcagcctgggcaacagagtgagacttcgtctcaaaaaaaaaaaaatttatatatatgtatatgttttaactgaataaaatgaaaatacaacatatcaaaaattgagagagatagctaaacagtgcttaagagggaaattcatagcacaaatgcttacattagaaaaaaagaaaggttcaagtcaataatctaaccttctgcattaagaaaccagaaaaggaggagcaatataagctcaaatcaagcagaagaaaggaaataacaagtaagagcagaattaaaataattcaaaaaccggccgggcgtggtggctcacgcctgtaatcccagcactttgggaggccgaggtgggcggatcatgaggtcaggagatcgagaccatcctggctaacacggtgaaaccctgtctctactaaaaatacaaaaaattagctgggcgtggtggcacatgcctgtagtcccagctactcaggaggctgaggcaggagaatggcgtgaacctgggaggcagagcttgcagtgagctgagatccggccactgcactccagcctgggcaacagagagagactccgtctcaaaaaaattaaattaaattaaattaaatttaaaaattcaaaaaccaaaaagaaaaaattatgaaacaaaaagcaggttctttgaaatgatgaataaaatggataaacctctagctagcaacactgatgagagacacagaggacaaaattaccaatatgaggaatgggagggttagcactgcagaccctacagacattaaaaggataaccaggaagtactatgaataattgtagtcacataaatttagcaacttaggtgaaatggaccaattccttgaaagccacaaactaccaaaactcattaaatagacaacttgaacaatcctattaagtattaaagaaactgaatttgtactttaaaacttttctaaaaaggaaagtactggctcagatggttttaccaccaaattatacaaaatatttaaagaagaaatttaatacaaattcttcaaatcccttccacaaaataaaacaaggacagctggctgggcgcggtggctcacgcctgtaattccagcactttgggaggccgaggtgggcggatcacaaggtcaggagtttgagaccatcctggccaacatggtgaaaccccatctctactgaaaatacaaaaaattagccaggcatggtggcaggcacctgtaatcccagctactccggagactgaggcaggagaatcgcttgaacctgggaggtggaggttgcagtgagccaagtctgcaccattgcattctagcctgggtgacagagcgagactccatctcaaaaaaaaaaaaaaaaaaaggacaacttcccagactcattttataagcccagcattatccccatacagaaaccaggactaaaaaagaaaactatgcaactttgttgaacacaactgcaaaaatcctcaacaaacacatttgactcttatgacccatggcagctagtgtataaagttgctgcaaacactgaattaaagaatatgctaaactattgctcctaagggaaatgcaaagttctgttcctgcaagcttctggtcacatttttgttaaatgatcaatatattaataaaaccttcttttatgtgtatttttgtttaagggcaccttacttaatatgtattgtatcactaacattgaactcatggccaacagcgctaactcttgcacgaatgaagcttatccaatgtgtgttttctctgtaaagtgcatctcagccttcttgcatttctgcactatgctgagacgccattataaacagtgaaatcaccaagaaaaagcacaaaaatgcacacacatgacaccaaatatgctaccagtaaagagagtcccgattgagaccccaagagggttcttggatctcacacagaaaggaattcaccgcccccccgcattcccccaccctatttccccgccccccaacacccccagccccacccagcccggccctggctccgcgcctcccccagccccgccccgcttcagaggccgggaccccgacggcggcggccccgggacccacggcgagcgggaaaggcagagtggctgcaaatggaaaacgacgggcgccgcggggctgcaggcgcttccgcccccgccccgggcctggaccttcggggtcacctgactccgacctgcccgggccgggcggcacggggggtaaagtccgggccggggtcaggagcgcggctgcgggccgtggggggcggggtcccggagttctgcccctcgcagctccaggctcctcctcagcttccctctcctgcctcccacccccccgggggcggggcgaccctgggcaccgagacagacccgcgggtgggagatgcggggagaccctgggcgggggacccgaggctgtcaccgccctgccccgcccaccccagctgtcctggacccaggggcagggagaggctggacgccaggtgcgcggacacagaagcgtctaagcacannnnnnnnnnnnnnnnnnnnnnnnnnnnnnnnnnnnnnnnnnnnnnnnnnnnnnnnnnnnnnnnnnnnnnnnnnnnnnnnnnnnnnnnnnnnnnnnnnnnnnnnnnnnnnnnnnnnnnnnnnnnnnnnnnnnnnnnnnnnnnnnnnnnnnnnnnnnnnnnnnnnnnnnnnnnnnnnnnnnnnnnnnnnnnnnnnnnnnnnnnnnnnnnnnnnnnnnnnnnnnnnnnnnnnnnnnnnnnnnnnnnnnnnnnnnnnnnnnnnnnnnnnnnnnnnnnnnnnnnnnnnnnnnnnnnnnnnnnnnnnnnnnnnnnnnnnnnnnnnnnnnnnnnnnnnnnnnnnnnnnnnnnnnnnnnnnnnnnnnnnnnnnnnnnnnnnnnnnnnnnnnnnnnnnnnnnnnnnnnnnnnnnnnnnnnnnnnnnnnnnnnnnnnnnnnnnnnnnnnnnnnnnnnnnnnnnnnnnnnnnnnnnnnnnnnnnnnnnnnnnnnnnnnnnnnnnnnnnnnnnnnnnnnnnnnnnnnnnnnnnnnnnnnnnnnnnnnnnnnnnnnnnnnnnnnnnnnnnnnnnnnnnnnnnnnnnnnnnnnnnnnnnnnnnnnnnnnnnnnnnnnnnnnnnnnnnnnnnnnnnnnnnnnnnnnnnnnnnnnnnnnnnnnnnnnnnnnnnnnnnnnnnnnnnnnnnnnnnnnnnnnnnnnnnnnnnnnnnnnnnnnnnnnnnnnnnnnnnnnnnnnnnnnnnnnnnnnnnnnnnnnnnnnnnnnnnnnnnnnnnnnnnnnnnnnnnnnnnnnnnnnnnnnnnnnnnnnnnnnnnnnnnnnnnnnnnnnnnnnnnnnnnnnnnnnnnnnnnnnnnnnnnnnnnnnnnnnnnnnnnnnnnnnnnnnnnnnnnnnnnnnnnnnnnnnnnnnnnnnnnnnnnnnnnnnnnnnnnnnnnnnnnnnnnnnnnnnnnnnnnnnnnnnnnnnnnnnnnnnnnnnnnnnnnnnnnnnnnnnggtgtcctaggtctggggggctctcctggtctggggggggctgtcctggtctggggggctgtcctggtctgggggactgttctgtctgagggggtgtcctggcctggggggctctcctggtctgggggggggctgtcctggtctggggggctgtcctggtctggggggggctgtcctggtctgggggctgtcctggtctgggaatctgttctgtgtgagggggtgtcctggtctggggggctctcctggtctggggggggctgtcctggtctggcgggggctgtcctggtctggggggctgtcctggtctggggggctgtcctgatctgggagtctgttctgtgtgagggggtgtcctggtctgggggggctgtcctggtctcagggactgttctgtgtgaggggatgtcctggcctgggggactctcctggtctgggggggctgtcctggtctgggggggctgtcctggtctggggggctgtcctggtctgggggggctgtcctggtctgggggactgttctgtctgagggggtgtcctggtctggggggctctcctggtctggggggggctgtcctggtctggggggctgtcctggtctgggggactgttctgtctgagggggtgtcctggtctggggggctctcctggtctgggggcactgtcctggtctcgggggggctgttctggtctggggggcgctttcctggtctgaggagctgttctgatctgggaggctgttctggtcttgggggtcttttgagtgtgggagaggttgccccaacctctttgcctacctggaggctcaggcctgggggtctcaggtggctacatcttctgggtgtggagtccctgtgttcctggcccctgtcacctgtttgtccctatgaggtggcctatggcctgggtgctggttggggacacaggctgggccctgtctgggctggaccggcctcctgtcctctctgagcctctgtcatctaccctccttaaaatgggcttatatcccccggacatacagaattgcgtgaggaccccacagcgtgtcccactttccacgtgcccaggagccccaggtcaggaccagggcagcacccgcgcctgccactcagtgtgggtgcaacgtttcccgggggaacacgataggacacggtcacatggggttcaggtgctgggaccttggcaggcagcctctggctttgaccactcctttggcagtggtacccgtgtgaagtggggctgtatggggcacagggtcggcctggggtagtttgagagctgagacccttgctgggcgtttgggcagaggaggaggtggacacctcggccacagggctagagaagcccaggcccctcagatggcatccctgggtccacctcccgaccaggcgccatctggcaccagctaagaaggtgcagagtcagattagggaagccttgggctggatttccagagaaaccgatgttgttaagaagcctcacactcggcttcctaggatggctggcctcaccctgggttcacccacagcccctcggcaacagtcccctcagggctccagagagaaacccccaccctaggagtgcctggggtgggggccgcagagaggaggcagagccctgggcccccagtgcaggctggagctgtggctgctcctggggagggtggcacgggagaggcaggaccgaggggtggggacacagggtggccccatcacatggtgggggcagctccgcgagtcccatccgagggggtccgagggggctacttggatcctgctggggctgtgtccccagacgaggcctctgctgccccccgcccccctcccacagggccctctgatgcccatggcacccctggcaggcgtggctcctggggagtggtccttggccacgggaggcgtctgagccccggggatgcctctatggccacgggagaccgtctgagccccggggatgcctctatggccacgggaggccgtctgagccccggggatgcctctatggccacgggaggccgtctgagccccggagatgcctctatggccacgggaggccgcctgagccccggagatgcctctaaggccacgggagaccgtctgagccccggggatgcctctatggccacgggaggcgtctgagccccggagatgcctctaaggcaagtggctgtccaggggtgcgtctccagggagacggggagcgaagcctctgcctctggagggcgggatggggacaccaagtgcagcctgggtgcccacggccgtccccccacaggaaccagtaccacctgcaccatggggctgtcccggaaggagcaggtcttcttggccctgctgggggcctcgggggtctcaggcctcacggcactcattctcctcctggtggaggccaccagcgtgctcctgcccacagacatcaaggtgcgtccccgccggcaggggaggccgggccgggtccacaggtgttgcctcccactcatcccactgtctccccagtttgggatcgtgtttgatgcgggctcctcccacaygtccctcttcctgtatcagtggcyggcgaacaaggagaatggcacgggtgtggtcagccaggccctggcctgccaggtggaaggttagtgggctgttctgcagcccggtgctgggacctgcctgttgctgcctggctgggattcccagctgcacggaaagggtttggagaggttcagtgacttggctgagctcacacgccgggcatgggtgctgggccggagcctgcgttcacgcggtggcactctggggacctccctgcctgatcctggtgagcagtcagattctcatggcctggcctgggtctgcccagcatctgctgcctccagccctgaccctctctggcccctggtgctccccaccctggcaccacgtggtgctggcagccgaggctggtagttacaggggtgcctgcactccaggatcctgagaggggaaaacaggaggccccgaatttgtttcctgggggctctggtaacaaattaccacaaattgggggcttaaaacagtagcagcttatttctcagcattctagaagtctgaaaasaaggtgtggacagggccgcaccccctccagaggctctgggttagggtccttcctgcttccttcagcctgagcrctccacgcagcccttggctggtggctgcaccagggggcatgaggtggtcaygtctttgggggctacctttcagcccagccagcctgyggggtctggagctctgtccccggctgctgttccagggcctggaatctcctcctacacttctaatgctgcacaggctggtgagagcctgcagggctgcttggaggaggcgctggtgctgatcccagaggcccagcatcggaaaacrcmcacgttcctgggggccacggctggcatgaggttgctcaggtgaggcaggcatggccttggcacccacggggagtggctgcagaagccatggtctcagccagygtggcaggcagggtggggccgggcccaggcttccagccagctccagcccctggtcctctgtgcccagccggaagaacagctctcaggccagggacatctttgcagcagtcacccaggtcctgggccggtctcccgtggacttttggggtgccgagctcctggccgggcaggccgaaggtgcctttggttggatcactgtcaactacggcttggggacgctggtcaaggtgccacaggctgcctgagggcgggggctggtctgcgaggggctggtgtctggggctggctgaccgggacggggtccgggtggctgctcccagctgagtggccccttctgtgcccagtactccttcactggagaatggatccagcctccggaggagatgctggtgggtgccctggacatgggaggggcctccacccagatcacgttcgtgcctgggggccccatcttggacaagagcacccaggccgattttcgcctctacggctccgactacagcgtctacactcacagctacctgtgctttggacgggaccagatgctgagcaggctcctcgtggggctggtgcaggtcagctggccctggggagggtgcatggggctgtgggaacagggctatgggcacagggctggcgtgggtcatccggccccggggagggggcacagggtatgggcgcggggctggcgtgggtcatccggcaccggggagggcgcacagggtatgggcgcggggctggcgtgggtcatccggccccggggaggggcacagggccgcaggtgtgcggctggtgctcaggcctccctgccctctgcagagccgcccggctgccctgctccgtcacccgtgctacctcagcggctaccagaccacactggccctgggcccgctgtatgagtcaccctgtgtccacgccacgcccccgctgagcctcccccagaacctcacagttgaagggacaggcaaccctggagcctgcgtctcagccatccgggaacttttcaacttctccagctgccagggccaggaggactgcgcctttgacggggtctaccagcccccgctgcggggccagttctatgtgagcacctacactgcccccaccaggggtccgggcttccttgtgaggcctcaggtgcctgtctgactccagcaggcccaggaggggcccaggctggctcttaggggctctgggagcccgggtggggtggatctggcccagcgtggccacagcgaaggcacagccacctcccctctcactcaggccttctccaacttctactacaccttccacttcctgaacctcacctccaggcagcccctgagcacggtcaacgccaccatctgggagttttgccagaggccctggaaactggtgggtgggccctgggctccctggctgcagcgagggtccctgagggtacagggctgcctcgggcaggatgctggagcctcattctgggcagcacggccagcrgggccgggggaggcaagggcagaggacagctccaggccgtgccactccaggtaggaggctgtggccacggcygcagctgggcccagcctctggcccgccaagaaggggccgcaacccgcaccacgtaactggtcggtggggccagggaggggctctctaccactgcccggcaccctcttgttgtctgcgtgctcaggttggccaggacagatggggcggtccccgcatgactggggatcaggggccctcacctcgcctcttggtctcctgggccccaggtggaggccagctaccctgggcaggaccgctggctgcgggactactgtgcctcaggcctgtacatcctcaccctcctgcacgagggctacgggttcagcgaggagacctggcccagcctcgagttccgaaagcaggtgactgcctcccctgggcgtgggcggggcgtgggcgtgggcaggtcgtggtcctggggtagctgccccgcagccctgagcagccgtgtgtcccgcaggcgggcggtgtggacattggctggacactgggctacatgctgaacctgaccgggatgatcccggccgatgcgccggctcagtggcgggcagagagctacggcgtctgggtggccaaagtggtgttcatggtgctggccctggtggcggtggtgggggctgccttggtccagctcttctggttgcaggactagtgggaaggcggaggtgggcccccacagagcccacaggcagctgcgtcccggatgctggaggcttcctgagccctgagcgccgtggggccttgctctgtggctctgcccacggtcaggtgacagccacctccagggcaccgtcagggtggtgctggccacagaggctgcatgacctcccctcccggcgtccctcccccaacctccttccgcaactgggcttccagggccgtaggtgcctttctgcacacaggccgccaggactcgtggtgtctccaggctgtgtgactgcagggccacatgctgcctgcaaacagggcaagaccacggaggcacaggggtcctgctcctgatggggcctcaggaggggcggagaggggtggaagggagggagctgccccacctggacccccgctctccctgctgttgtctgagcagatggatggagtccaggcctgggggcttctgctgggccagcccggcctcccacacccacttggagggtgagactgcagtgggggttgtttttattaaaagcatcatggacacagcatcattagggctgatctccctgctgggatcggggcaggcggccgggggctcctgacatccgagggccggcggggaccacgaagcacttggggaagatgccgatgcggccgtcacagtggccctccagccatgcctggtccactgcaagggggacatcgggctctgcagggcgttacccaggcgtggcctctgggtgccacgtctgctcacagcacaggccgagctctaagccccccacaccccgggcaccacggtgctgcctgggaagggccatgcccaccctaccttcacacaggacgtccaccgtgtccccctgtcggaagcccaggtcctctggcccctgggcggagtagctgtgctgggccaccacctggtagaggaccggccgacccccggctccctgaggcaggagagtgggctgcaggtcgggccgggcactgggaggaggggcctccaccgcccctcagggtgcccctgcccctgcctcgcccttggctcaccctgcactgcagctgcagccccctggggcaggcagctgcgtcctgccaggccctctgcagcgactcctcctcggggatggggacccagtgcccgtcctcacctggggctaggtaactgcaaagagattcctcagagggggcctcctgggtggggcctgcagggagggcagtgacctctgccaccccctcttccagcagctgcctcagtcggggcggtgcccagctccaccgcagccaccgggggctttctggcccacctgagttgcccaagctgggcctggtgagggagggcttggcccagcagtgcccgcaggctggacaggtcggctcctcttcgtgccctcagggccactgtgaaggcgcactgcacggtgacagtcaccaggggctcggagccccctgcacctgctccctgggtccaggcaggagggggaggggtggtcgctgaggcccagggcctggtcagggccgtcttcagcccgaggggtgtggacagagactgggcaggtgaggggggcttgcaagccttgattctgagggatggggcttggcctcagcctccctcaggtgactgacaggtgaagggtctagagcctcttaccccagcacccgcggggtcctcacaggggccggggccaggcccccccattgccagcagccctgtaggacagagcaagactgacacagccactaccaccaaagtgggccctgtgggtggagggcagccggcacccatgcaccagcagcttcctccttcacccggggaccccgccgctgaggacgcccatacctggggagagaggagcctgtttgccaacttgctccacctggggcctctgcaagagaagcacaggctgggtgggctggggcggtcaggtgctggaggccggtactgtcctcgcagagcccacaccaagggtgtggcctgtgtgcccggccagcacccagcaggtggtctgtgggtgttgaattcagggcactggccacaagtcggctgccttaggatggggctgggtccctgcagacctagaggctgcctgtcaccaggagggagcgccccgtcccccaaggcccaccgaggtggcagctccaggtgggtgggctccccagtgaccccaggaagctgaggacccagtccctgggccccggcctctgtgtgggctcgacattaaccgtgtgccctgagttgggcactgagcaggagaccagttcaccagctgcaagtcacaaagtcacagcccagcgctggctagaccctgagggtcaggcattgctgttgttttttgagagggagtctcgctctgtcgcccaggctggagtgcagtggcgccatcttggctcactataagctccgcctcctgggttcacgccattctcctggctctgcctcctgagtagctgggactacaggtgcccgccgccacgcccagctaattttttgtattttttagtagagacagggtttcaccatgttagccgggatggtctcgatctcctgatcttgtgatccgcctgcctaggcctcccaaagtgctgggattacaggcgtgagccacttcgcctggctttttttttttttttttttgagacagggtcttgctgtcttgcccaggccggagtggagtggcactgtcatggctcactgcagcctccacctcccaggctcaagcaatccttccacctcagcctcccacggtgctgggattacagaccactgtgcccggcctcgattgtaacttattattagatttatcagatggttgaagttgccttaggttaggaaggacgagagcttaaaggcccatcgtgggaactgggcaaatagttccaaaccctgagggaattagtgaagcacagcttggagggcgcccttgcccccgggatgccacggttaaactggaagtgggcatccataaagagagagtgccggggctgcttcctgatcgcatcctcagatgcgctcagcgtgaaatgcaggtgccttctctgggcctcccggatcctgcagcagagcctccgcccacggctgccaccctgggagcagctggggttcctgccttcctccgcctctccccaggtgccggggtgtccgggaggactcgggggatggagtcgctgctgggcccccatggggggcgggagccttggggcccctccagagctgtcctgcctcccgcctgtccccagctgggtcactcctggtcactcgcaccccagtgggaggggaggggcaatggccaaactgaggtggtcctgggggctgagggcctgcagggctacgtggatgtctccactggacaccacctctctcctgtcctgatggccaatgcccactcgcctcgggcacagccaggcatcctcccatctggctgggctgggccaggaccacgggtgagcccggccccgtctaccccccagtgagctgctccctccaccctcatgttggtcccattgtggtccccagtctgcggaggcagcagaagcaccgacccccagcaggggaagaggcccaggcccacgcacctgctcctggtaggcagtcgacgtgcagcggtcagcaccgacctctgtctctgcatcgagggggccctggtgggtgccagctcttggggagtccatgattagggacctagggagaggagggaggctctcaggccctgcccatctgactgccctcctgtgcccggcccgcgtggccccatgtggagggcctctgcccagcaggaaaggcacgcgctcgcagggcccagtcagcccctcctacctggcatcatggttcgctcctggtccctgtggacacaaagcaacaacctcgctctggttaagggtcgggggccgccctccctcctcctgaaccttgaagagtggtttccccaggtcttacacagggatgggatggccaccccacacctcccatcagaggaacttcgcagccccaggagggctcagagcttgtgcagcattttctttcccagaaagctgggtgaggccaggcaggggtctgaggggccgcaaacccacctgtggctgctgagggcggacgccccagccctggtcgtcggggatggcagaggccaccacctggcggggacagtggggacgctgggtcagggatcagcggcccagcagggtctgctccctgcagcccgccccaccgtgccccgcagctctaagtccccgggggctgggtgacagctgcccatgcccggcccacgtctgccagaccaccatggagggaaatgtctgatggagaaaaacatctgctgcaatgttaacttatttttagcacaactttaaaaacattttggtttcttataaacagcactctactgtgatatgcggactctaagttaatgcattaacacagctcagagcccggcttcgcccaccccaggcctcccctgctgggcagctgcactgggcccaggagtcggccgtggcgcagcgcaggtgaccgagggggcgtggccagccaatggggcgtggccagtccggggcgtggccagccaagggtgacccagtctttgcccaccaggagttcttcttctccgccatgtttcgcccgctgcctttgggggtgagcagctccccattcctgtgactttaggggtgttgcctggctctgacccaagtgtgggcgtgacgtggcccagaccgtcggactgcagcccccgcccccgtgagaccttgctatctgtggcagggacacagggacccccccagggacctcgctatctgtggcagggacacagggagaccccccgggacctcgctatctgtggcagggacacaggcacccccgccccccgggacctcgctagctgtggcagagacacaggcaccccccccgggacctcgctacctgtggcagggacacaggcacccccctgggacctcgctgtctgtggcagggacacaggcacccccccggggacctcgctatctgtggcaggcacacaggcatccccccaggacctcgctatctgtggcagggacgcagggaccccccccccccgggacctcgctatctgtggcagggacgcagggacccccccgggacctcgctatctgtggcagggacgcagggacccccccgggacctcgctgtctgtggcagggacacagggagacacaaaggcatgaaaggacgcagagagacgcagggactctgggaggctgcaaggctgtggctgtggccatggcccagtctgggggcggggtggcacctgcagggtccttgttgagagagctggagccccctcctatgcagccggctctagtgggctctgccttcaagctcacagccccatttggggcaccgcccccctaccgtgggcgccagtttgaggatggctgtgggcccactctctaccctcctggcccttacggtggcctggactgcacctccccccatccctgggaacacagttcgagggctcagcaccagccgccatgccccaggacgccgtccccacctttaccttggccttgcccaggaaatccacgggctccaagtgcttcaggtgccaccggtggggccggaagacctcgcccctggggacctgccgtggcggcagtgagccccgtctctggagggggtgggtatccagcagatgcagacggggtgaccaaccaggcctgcagccgcagagcccctgtgccttggagcagaaggggccgcttgggccccccacccccttcccgcaggtcacaggaagcccccgcctggcacccgaaactgggcactagggccatctccctccggaagcttcttcatctcatgaaattggtcttgaggagctttggtaggcaccagcccaaaaccatgaccgggctggcactcctcacctgcacttggtccagggctgagtccaggccattcagggacccctccggccacttggacatggcctcccttaggctgctggccgcctctgtccagagccc

SEQ ID NO: 95381 - DNA, 35101 bp, Homo sapiens
  misc_feature (1)...(35101): n = A,T,C or G
ccactcccctgcccacccgtctccgcacactctgagctctccttccacacagcctgctcacatccagacccttgcctcagcgtctgcttttgggagaaccaaaaccataacaggacaaaaagaagggaacacagtctccgactgcacttgggggtcccaccagagtgtgacggtgccagcagacactaggagaggagggcgcttgtatttcctgtggccactgtaacaaatgaccaaaaactctgaggcttaaaacaacacgatttttttttttttacagttctggaggtcagaagctctaaaatcaaggtgtctgcagagctggctccttttgggggctctgggaggggaatctgttcccaccttttccagctaccagaggcctccacatcccttggctcatggcccctgctccgtcttggaagcagcctcctctccttggaccccatcaatgcatctccttctctctctcgtaggacctttgtgatgacatggggtccacccagccaatccaagaccacctcccacctccgggtccttaatctaatcacactgaatgtcccttccccaggtagcctacccgacttgcagggatctggacgtggccattgggggacatccctctgtctgtcacaccacacgccagaagctcagagagattccagggagggaggcggattctcatgttctccgagaccctcctgggccagagccctgcctgttggaccctgtgatgtcagtgggtgcagcagcccccgagatggatgcgggtgagggcagcccggggctgtctcgctagccctcactgcatcggccccattctgggtcaatggtaggtcaacctggtggatctctgaggtgaccaagcttactgacagatgaactacagcctcaggaagagggtcatggctggcaggagccagcggggggcaagaccagcagccctgagtgctggtgcaggccacgcagggcccagcctctgtagccagaagtcagcgccagtgccggtcctgagcaagatggccatttcacagatgaggaaagaaggctcagggctgtggggactgtccgggtgggtcacatggccggcaggtttcagggcctctctttccatctggtgcccacagttacgctgtggcttgggtgtggtctggagctactgcctcaggacccaccaccatcctggcagtgtggtcccttcagaaaagctgaaaatgcaaaaatcaggcacatgcacctccccccatgagctgctcaagagagaggagcagtcacgcatccttatggagaaaaggagaagcaggacccagaaagggtttccctgtaagattcctcagggcccagcaggcctcagccccaagattgaggccaaattattggaggggtgtgtgtgtgtgtgtgtgtgtgtaaaactgagtatgtgagcatgagcccagagctgggggtgcaggccacgcaggtgtgagagtccacctccccatctcgctgacccctgtgtatggaggagagatggaggcgggggaggctgtgtcctgcccaggccagccgcctgccagtgacagtggaggacttgctcacagtggggctgcttggggtcacacaggagtggcctggcaggcctggcagccccagccctggagccagccacagactcctgggttctgcttccctgggagcttccaggggagtgtcactggggctcacgataccgaccccttctgggatcagtggccccttgcttttggcacagagcttcagggccagagggtgcctctaatccagtagctgaggaaagctttcagtggtgctctgggcacctctgtgacctgccctgggcccagtcctcatgctgatcccactgtagccaccctactcagtgccccaggccctggacacctcaggccatgggatatcccaagcattcaaactctcacggccacctacgcttatgagcagaggcagaggcatggtgccaccgctgcctcctcaggcaggatatgctttttgtttgtttgttttgagacagggttgttcgctgtcattcaggctggagtgcagtggtgtagtcagggctcattgcagcctcaaactcctgggctcaagcgatcctcccgcctcagcctcccgagtagctgggactacagtcttgtgccactatgcctggctaatttgtttttatttttattttggtagagactgggtcatgctatgttccccaggctggtctcgaactcctgggttcaagcaatcctcccgtctttgcctcctaaagtcctgggattatagaggtatgagtcactgtgcccagcccagaatgtgcctcttaactttcataccgcagcccctatgctcaggacgaggagggacataggccagctgccccaagttccccaaggggactgtgccaccctggagtgggctctgtgatggacagagtcaccgtctcccagcagctcccaatccatcccatcacaagtcaggtctaggcactgccatcagactgatagttgaatttttcctgccaagaggaggtccctaagagcctgagccacaggcgagggacagtgctgtcctgtggccaggccccgttgtcactggggagtggcctggcctgttcactcacccagctccagtctgcaccaccgtcgctccacttggggttgtcactgcctgaggttaggacgtcagcagaagccagcctcatgtggcagaggcgatggggaattacagcctgcaaaggctgatggcatcagagagattcaggaaagcaaagggcttattaaaaagctgaaattggttctaaacaaggtcagccgtcgatgcgccttggagggaagccaggcgctgagcagcaggaatggggcttatttcctgacaccgtggccgtgacaccctgcacctccccggcctaccccacccccaaccccactcccacccccattcccatccccacccccaccgccacctctggagggcaacgtgcacccagacactggagcagaggcagcaggggtgggagcagggaggaaagccccccgcggggcaccacagggaggcatgtggccaagagagcacctggcaagcaggtgtcacctctgaggagggtgagggcaggaggagagctgactgttgcttccttaccctggggtcggattgctcccttttaaaatccattaatgcaaggaagggcgcagccacggggccatccgattggattcgctccctcccgcccggccccagtctccgcagattttctctgcggttgcatttttcatttgagcgtcccttcctcttgactccagtggaatttttctgaccttggctgacaaggtgtgcagccccctccagctcagggcaccctctttggggtgcttgccccaggcactggcccaccctgtgagctcaggcgcattgtctcgcctctccgaggctgactctcctgtgtctgagacagggatgatcgcacacccagccacccaaggctggccaggatggaggcagggcaggggaagccctggtgcggcctgacttgtgtctcctgtccctccctaggacttagttatcagtattttggaatcagctgaatcatttctgtcaaatgctagaggaaagccagttttgagttggataaagaaaatgtctttgattcctgttaaaaataaacatgtgtgcataacactgctgagcacgagaccgcacctgccgtccctccttagagctcccagcagctgttggtctttggcgtatccgggagaggagcgaggcctggaggtgtgttgagccgtccaagggctggtagcatcaggggctcttcactgcctctcgctccacagaaccgctgggttgaaggaagctggagggatcaattgtccttgtcatccaacttcctgtgtctgtagatggggaggaggcgctgggttggaaagcgcttctctgaggacgccagctgcgcattcaggagggcggagcaggatatgaccccagagctctgaccccggaggagcaggaggggtgcctggggcctcaataccccagaggggagagaggtgccccccttcccacaacgcgggccccagctggtgctcgtttagcctgttgtctagctggagccacctgggtggccaccaggctgctgggagggctcacccctgagctgggtgtgctgtggagcccgtgaccctcacctctgcctctgctggcttttgttatcccgtgctgggaacaccagtgcctgcccaccccggaggctcgtcgtatcaccggctcgctgtggccgctccccagtcccgagagtgaatgtccgggatgcagcagacacctgcttacaaggcacaggtgaggaggttttggaactaatctgaggcatgaaggtgaggtgctctcaggcgacggaggtggcatgtcctgatgggaaagccaggccttcggaggctgagacccttcccaaggctcaccagagaactcccaagagtgtctttcccctggcctgggagacaatttcacaccaatgccacactctattgcacaggtgattatgcacttggtcctcacctgcctgggctgtgggtgggggcgaacggtgcccctctgggtgcaatcagtggggaggggctcatggcctgagcttggctttgcaggatggcctggccactgtggggcagagagcactgcctgcgagggccaggggaaggctggcactttctccaaatttcacgttcgtgcaaagacacagtcattcctttctacagcgtagagctcagagctgaagcagcctccagacctgctgtcatgggtatttaaggacctaaatgttgctgtcagcctatgacatgaatgtgcccctaaggctagattctgggtttctccagagagacgagaaacaggagggaaaaggaaggaagggagggaggaggctggggaggagggacagcttctagtccagctggagagatctgtcaacccagcctggggggtggagctggagggatcaagcagaatgtcctgaaggcagctgccctcagtctacttgcgggagaggacaggagggagaggtgccgtggtgagactgaccctcgggcccacgggtggatgatggcaaaggtcctgtggcaggtgtgggagaagcagggctgcggccagctgccctgagaggcttcaaattcaggccagatctgctctgggcaagaggaagctgtgggtttgggagcttcagagacaggggagcaggcctgtcactcaccctcttttccttaaaggctgtcacccccagcagtgcaccctgcagcctgcctatcccctgtgcagctccagctccgtctgtccccagcaatgcaccccacgcccatgtcccccactccctatgatgctctcgcgccttctggagcagcagtggtaccagctggaggctgtggaaaaattgagaggagacaaaagtgggaagagcaggccgtggagagagtgtctaaacacagggactatttggagattgtcttatttttggtttgaaatgggcccacctgctagtattgtacaaacggctctgctcgctaggccaggcctgcagtggctacgggcctatccttcactggtcagcctggagcagctcctcggacctcagtctgctcatccgtgggtagaggcgacgcagaccccatcccactggggactgggccagacagcctgtgaggcagtcagctggtgcctggccagagggtgtctgaaaggcctcttggctgcagggtgcatctgcttttgggacagctcttcagagccatctcagaagggacagcatccgcctgtctacttcaactcccactgatgacgtccatgtgtcattagtgccaattagaggagggcagcaggctgagtgcttggcctggggcgcaagcttgtgggagggaaaattggattccccgctagacaaatgtgattacccgtgctgcctggacccaccccattcaggaccagggcataaatggccaggtgggaccagagagctcaccccagccatgcccgccctcagtcgctgggccagcctgcccrgccccagcatgcgggaggcagccttcatgtacagcacagcagtggccatcttcctggtcatcctggtggccgcactgcagggctcggctccccgtgagagccccctcccctatcacatccccctggacccggaggggtccctggagctctcatggaatgtcagctacacccaggaggccatccatttccagctcctggtgcggaggctcaaggctggcgtcctgtttgsgatgtccgaccgtggcgagcttgagaacgcagatctcgtggtgctctggaccgmtggggacactgcctattttgcggtgagtctctcctccctgccagctctccaaacccttcctgacccggcaccccatctggccgtctttctgcactcaccctccttaayccagaaagttcttctstcacctstcagtgtttgagttgactctgctctgagccaagtctgcaccccgagcttgggcatcatggggatctcagtttgaggacaaaataggaaagacatgctttccatggtccttgactgcccgccccaaatcatgggacccagtaatcccaaggaatggaactatacacagaggacgcacacaccacacacactcgtgccgctccacaccccacacgcgcatgagcacagaccccacgaccctcggccctgtaaacaatgcctagtaccacgtccccagagcacacatgcccactgatgtgggccaggtggtggcgcgtggctgggcacagcatgaggcctgcacacccatgggatccagcctgacctactgtgcttgtacccrtggaccractgagcaggtgcagacaccctgcccctacccataggtgtygaacaagccccacagggctcagccaaaactgttaggatgggctcttgactcctttccgtccaaatttacctccactcttgtttcacagggtggagaaaggggaaaagtttcccttcaaactggaggggactttaggcccttccacaagctgcagggggtccccgaagtgggcgagcccaccgcctacaatgggtcctgctccmgccttcctttccacatgggactggccaccagggcttctttgtggatgaaacccaactctctccacagaaacacacaaaggagtgacaaaaaagttttatttctgaagtcagraggtgcctgctttatctgggagtgccgagctggagcgggggagctgtgtctgtgyggagcggccggctccagctctgcaycttggtctcaccatgggctggtggggcggagagtccctctctgcctttttgggtgttgtgaattcatgagggcagatggtggctgctgtttctggagctgagcttgccccctccaattcccaagactcggccaggaggcacttgcctgtgtcgctagtgaggcttagggccacccaggtagggtgagtggagctgcctgggaagggccctgctctgacccatrgggctgcacagattcctgtgcacaaagacactctgtggctcaggttccagccaagaaagacctgggacagccctgattctgagccgtcagccgtctggaggagcagctgaaccccatcgctgacagtttggggttcttcgcaagcctctgccatgaggcaccctgagtgcaggagcatttgctcctctctggggcagcgtcccccctgcctgcatttcccggctgctagggaagccagaggaagccaggtgactttgcctttccgtgcrctggcaaggttaatttgcacaacaaattcctacgaaagcaaatgtcagccttattattcctccctaagcaatatgttcaactaatatcttcttgatttccagctgaaatatcacaggcgaactttctgcctctgtttaaaatgagtctctcggcaaaccagcggtgtccccagcggggttgcattgtgtggcttttttctctagggaaagttttgcagtatcttttgcagatttcttttttctcaaggaaatgaagaaaagatgttttaccctgaatgtaagattaaaaagaaacacaacccaaagtccttaaggccaagggcccgaggctttcttggggtttccatgggaaaggccaggcagggcagggaagcagcttcgtttggacaattctggtgggctctgggtggctggggtggtctctagttgcctggttcctggccctagggtgwtttagggttggggcaatattggcctggggtgtgagagtcaggtggaggaggtagctagggatatgggcttggtgtgggtcggaatgttaggaatatgattctcacacamgygtgaatgttggagggcaggacaggtgtaaacaactctgaccatctgtttgagccttcaatcaattaatagatgccaaatagacaaatatggaatctaagaagggcccttcttgagtacgaagggcagcctgcttgttggggaaggctcctcgctgtctctcagtgggtctccctggtggtcttccatgtgacctggcctcgggccaccgtgtccctgccccttagggcccagtgcaaggggagcrgccggagayggggagggcagaggtcactgatccagatcccaggaagcatcctcggagaatgcagcaggtccaatgcctccctgggcctcagtttaccttctccaagcagggctgggactaaggtgaggggaacaatgcctaggctgcagggtttaaagtggtgcttcaggctgggtgtggtggctcatgcctgtaattccagcactttgggagggcaaggcaggaggaccgcttgaggccaggagttcaggaccagcctaggcaacatagcgagaccctatctcaaaaaaaaaaaaaaaaaaatccaaaattacatgtatttataaagtaataaagcagtgcttgttctcagggttgtgccagtgcagggtgggcacctgctatcaatcaccaycttagatgtggcaccctggtttctctctcctttcctgttcatgtcccaccctgttcccaactctcccctttctgaggctccgcaactctcctgcctgcatgaatgtgggcagcattggtctraggcattgttcccagtcytgaggwggccttgggagcctcaggcatcttcttaagaagctcagtgtcccgcccrccaggcccgggaatgcccatggctaacagaacctgtgacctgctggcaagtgacagccctggttcctggctgcagaggaggaaccaactccactgtcggggctcatctccactgtctccaggcagaaatggagatagaaggtgtgagtgaagccacagccccaggcagaaccctcagatccacagggactgaggcccagcatccccagatcagctggcaatgaatgcggagctctgccggggaatgccctcttcccctgtggattggccyggcttggctccttmatgcctggagcccagtgcttgtctctgcaggamgcctggagtgaccagaaggggcagatccacctggatccccagcaggactaccagctgctgcaggtgcagaggaccccagaaggcctgaccctgcttttcaagaggccctttggcacctgcgaccccaaggattacctcattgargtaaggggtggcygcgagtacccaggagggcrtgggctgcktgtatcatgctgccatcctgtgccaatgtcayagtacctttcctgtccctgataagtctggggcctgggcctggccagctatgacrgagagaaagccaaggaggatggccagaggcagtggtggggccaaagcmcttaggatggtccagctctgctattgcccctgagccctcaaagacgcagctctttgccaacacgtagctgacatggtttctagatgcggggcttgtgctgaagcctctcccattggactagaccttgcttctggatgtctctctcctcctggtcctgttaaccatcaggtgggattctggagcccaggcgacctggctttccatcccggccctgttgccagctcgctgtgaggctcgggacaactgcccccctcctctggacctcactttgcccatctgtaaaatggagatgggaactagatgatctgtayggcctgaccaactctgggagttcatgggagccataaaacattgyaaaagccataggcttcttatgctgctctaagagccccccaacctcttagggaaagcaacccaccttgcccttgaagacaaaactcttttaactctagcacacctgacagcttttgtcttgtgtaagtaatcctttggtgtggcagtggcctgggctggccgttagtgccaggtcttaatcatgggtgtagctgagtgaccacacgggaggccagtgccatcgaaagattgattgcatttccggagagaaggggcacctgtgccgtgcagggccacctgcagagccctgggtttggtcaggaggcagatgcaggagctaggggagagcccaggcctgaggctttcttggggtttccatgggaaaggccaggcagggcagggaagttgcttcatttggacaattctggtgggctctgggtggccggggtggtctctagttgcctggttcctggccctagggtgatttagggctgaggcaatattggcctggtgtgtgacagtcaggtggaggaggtggctaaggatatgggcttgggacgggttggagggttgggaatatgattctcacacaagcgtgaatgttggagggaagggcaggtgtaaacaactctggccatctgtttgagcctgcaatccattaayagatgccaaatagacaaatacggaatctaagaaaacagmacagctggctgtttgccagatgaggaaactaaggcccggagacggggagtggatgtacccaggggttcggggtgtgctggggcagacctggtgccagaagaggtgttcttccaggaggttgttgagcccttaccctgcttcccagtggacgaggcaagggtgagcagagaaccctctggaagcacctcacagggggaggccaatgcctgtgtgtgctcagcccagtggccccaggccaggtataggggcctttgcctggagttctgggcrtcccctgcacagggcggcccatcggctttccgcaaactcaaagagcaaattagccacccacacgggtctgcactgtggagtgcccagaaagctatgaaaggcactttccacacccgatccccgtttccattcatgacagcatgtgaggaagccagccccacagcttgcctcctgagtctgcctgtggcctccagcaccgcgtagatccatggagctttctgtggctgcttggtcccctcctgccaagctggtggtgactacataatatagcgtggctccgcagctcagcgtgaccatcagcaagccccagggtgtttccttcccttcatagagggcactgaatcctcaggctgggctgctgaactgaccaatgatcccccacacccagtccccagtgaccttggggttggtggagggaacaaatgttccggccacactggctcacggcgggcccagtagtcactggttgaatggatgttaagtgaatgtaggtggaatgtgttkagaagagaaaagtatttgatggccggtgcaaataggggatcctgggggtcgtcagcccgggatktggccccagccagggccatgcaagcctcaagggtcccttattcacagagatgagagtgaggtgtgtcacctggtaggtgtgggtgggcagggatgtggcatcctctcaggagcccaactctgggggctctgagagggcraccagctgaaccctgtctcggctgcaggacggcactgtccacttggtctacgggatcctggaggagccgttccggtcactgsaggccatcaacggctcgggcctgcagatggggctgcagagggtgcagctcctgaagcccaatatccccgaaccggagttgccctcagacrcgtgcaccatggaggtccaagctcccaatatccagatccccagccaggagaccacgtactggtgctacattaaggagcttccaaasggcttctctcggcaccayattatcaaggtacgtgcgggtccagggccgaggtcctcgcccagccctgccttcctccngggcctgggttgtccctgaccctggagagctgtccacagtcctggttggaccaggtgtcctcttatcactggaacctcaggcacctgcctgagcaggggagcagcragtggtcttggcttccccatcactctgctcactcccctaccctcaaagggccttggagctcccacttccctgcctggaccaaagtgaccaacatcttgacttctgcatctttccttgggactggaactgctgtctgtctgccaggccacctcccccttcatgaaaaagcagctcgagtcagaactcacttgctctcgaacacccgtccggggaagacagaatagcaaaggcgatagctgtcgagtgtccactatgccactagtcccgggggaggggcgaggtgatccctccttcatcataagagcccctagtttccagcagaggaagtgtggcccagggaggttgagtgtccagggtcacatagcaagaaggggcatgtccttgaaggtgcactcagagaggttatgtgagtgtccagagtcacacagcaggaagaggcatggccttgaaggtgcgctttgggcccgggctctaacctcagggctgccctgcctcccactggggctgcaggagctgkcccggccacagccccatatgcatgaggacggctgcgtcctgtccctgccttggcaggaartggcctgtacgaacctcatttccttcactctggagctgcctacgggatttctttctgggctgatggctccaccctcaaggctgtgaaccccagaagtgcccctgaaattgtctggatcatccctcccattttacagatgggcattcggaagcccatggaggagggctgctggggaggggagggtgggcggccggttcccgggctcagagggctgcctcctcacagtaysagcccatcgtcaccaagggcaatgaggcccttgtccaccacatggaagtcttccagtgcgcccccgagatggacagcgtcccccacttcagcgggccctgcgactccaagatgaaacccraccgcctcaactactgccgccacgtgctggccgcctgggccctgggtgccaaggtgcgtgccctgcgaccccagcatggtgtctcctgcctgggcccctggcatcyccacacctctgtttycccagcttcaccgtctcagaggcttcaagaaggggctcccaagggggctcacgaggccaccagaagggccaggcctgaggtggccccctcgcctctgtgatgtctgaaatgcttcaagccttttttttattttccacagaaacgcaagtgccscaggaccttatgccctcagtgggtcctgattctgtttcccamctggagtcagggttttgtgtacaggtggtcccagggctggctggcggtggggccagtgttgaggcctccacaggctgagacgatgggggtctccccagctcttacaccygtctagagaaggggttttgggggaaggctcagccctaggcaccagctcctctccccaactccctgacccgagtctcacaggatgttcctggggcgtgtaatgagctgcctgtcaggaggaagcatcgctctaatcctgctgcgccccctccaccacccctgaggctcaggccccaacagttgactgggtttkcccctgcccagacctggggccctctcaggacacaccygtctgtctgacaccttgccccacacaggcattttactayccagaggaagccggccytkccttcgggggtccagggtcctccagatatctccgcctggaagttcactaccacaacccactggtgatagaaggtaggsggytctgctgccatcctcctcagaagccctaggactcagctgtgttgagccagtgagcaaatcccrcccttcgtctgcccagcatggtgcccccgctgtacagctcctcttggcacgaggcccttgcgtctgcctcatcygctgtccatcttccatggctgtggtgggctccyagggacaggaccycgaggggctcactcctcacagcttcgccagggcccagcagtggcsccacacctccctcctcrtccctataatacgggctgccatcggcgcagcactgtgcatcccaggggaaaggacaaggagaattttcataagggaagctgccagatgccaagttccaaatacagggagaggtgtgtgcataaacagggaggtggtagtaaagcagggcatattccaggacacaggcgctccggcctggccrgagtgcagggacgggaaggggagctggggcagctgctgttggatcacccatacctgagggtggagtgagcagggtcagcttttagcatggcaaggccaggtgatgctgtctcagaaactgaaaaaaatacttccctctctctgttgcaccagcatctttcaccatatatagacacacacrmacacaatgcacacacacacgcacacayrcatgcacacatgtacacatatgcacgcagaagcacacacatgcacacactttttctctctctctgaatggtgcttcttcttttcatttgtgcaaggtgcagaagtggcctaagagataggtgctaggctgtgcctcaccaccttggggacgctgggtggatgacctcacccgctgcctgttctcccacctcccacagctattgtgaagctgggaaaggctcacgcacagaacttgctgtgggyacggggctgtgctcagctaacagtcgcctgtggttttttttttttttcctggctgcataagtaataccttccgccactgttggagttatctccacatgcacagagaagggtataagtmagcttgggccttagcatgacacgggatttattgctcatttaaaccctgaaagcaaatggatttttgaaaactcctgaagcatcagggaagtctgtctcttcatgattatctggttgtatttatggatcctttgccaaatataaggacgctcctgtcacttcacccatcttgagatgggctgcttttctataaatatcaaaatcccacaattatttcatgatttaatccccatctgaattttaaccaattgcaacaccctttttattattatcctctgatgtaatcagcctggagatacaggagccgtttgagtytggatggtgtaggggtgtcgagggaagaaggcagaggcaagaggagttgttttggcctcatcttaaaggaaacaagtagggagatggttgggccccctggaagtgccctgcaccccagtccacagccctggstttgaacctcagcttggccacttcccagccctgtggtcttgtgtggagtcttcagttcaggctccatcctcagtttcttaatctgtgaaatagggctgatgattctcactgtgcaaaacttccaygaaaggggtaggttatgcttagagcatttttggcacccaggkaagatgttagtatctgtaccaccctcttggtttgatcagaaagggcaatgcatgtacactrgtgagaagatggacagcagaaaagcatgaagaagatgaaaccaccccccagctcccggctccaagttttgaagtgagcactggtcacccagctatgtgtctgtcctgactgcttttctggcccattaatttttttcttgtgactagaattttatatctttttttttcattgttgtttgtttttttacttaaacttcatcagaagcctcttccctgtgaattaaaaccccttgtcaatttcacactccttgcygcctgacatcsctttcctgtacataacccagggggcagagcctcctgctgcacagcccctccagaccaccccgccatgtccgccatgtccrccatgtccaccatgcatccgggggcatggggccaggcctttagatcctccrccaaccatgagcccagccggtactcagagcctggctgctgattcactaggcatggagtttcaggaacggtggggctacctggatgacacctggttgtgaggatgttcgagtgggtgccagcatccctgaacctctgtttttttgttttgagacgaaatctcactctgtcacccaggctggagtgcaatgcacgatctcagcttaatgcaacctccgcctcccaggttcaagcgattctcctgcctcagcctcctgagtagctgggattataggtgcgtgccaccacacctggctaatttttgtatttttagtagagacagggtttcgccatgttggtcaggctggtctcgaactcccaacctcaggtgatccacacacctcggcctcccaaagtgctgggattacaaggcntgagccaccgtgcccggccccctggacctctgaccatcagtttcatgtgaccactgggaggctggcccagggagcttcagggactctccaattagcaaacggcaaggagaactaacaggtgtggccacaccataatcaggagasacagtctccgtgactcgaagaagcaccatgttattcctttggaagaggcccttgagtgtgggctgaggctcataaagggacagcaagtcatctgagagcacacagcacgctgttgaccaagcaggacctggcctgtgcatgaacgggggctagacctgcaacgctggccctcctcctggggggccacattctcactcaaattgytcctgagatgtcagcttggtaggtgggttccttgggtctgcaggacataaatcaaagtagtaaaagtgggggctgctgggaggatgtgctccttgaatgcttcttgttaacctcaacacagagatacactcacacttgyccagctttgacgcagggccagggctcttctgtgccatcggcagatgggagttccatgccctcttctttgcccagaccacaccctgcaggttgtcaccgtcytgcaggctgatttccagcttaggttcctttgaacgtggaagaagaacatcaaagcacttatgaaacaatctgagcacagaactcaagttgtttacgagtttccgtctatcagcagcatctcacccgcacctgattccatggaggctttaagtggctcacgttgatcacatctttccatagcattcaactagttttcatagaaacagcagctctttcttccyagtgagtgtagcctgtttgcgttaattgatcttgcgagctgcctggcatccacaggtgtggaaacaaagacagccagctcttggtctgcctagcaggtgggarcagatggggggtgaccggccctgcctcctggctgagggtggctggggtcatagggataatctgtccrcagggggaagtgagagggcctccacttaccgctcacctccatccatcccaccttctcccaggacgaaacgactcctcaggcatccgcttgtactacacagccaagctgcggcgcttcaacgcggggatcatggagctgggactggtgtacacgccagtgatggccattccaccacgggagaccgccttcatcctcactggctactgcacggacaagtgcacccagctggtgagtggggctgggcccggcactgcaccctccctcctcccgcgtcccycagtggaggcctggcaggtsgtggcccacgaagggtggcaggcacagctttggtttcccctgaccctgaatccccctgcggtcctccctcttttctgtatgcaagggaaccctgctrctgagaggccatttgtgtgtgtatgcacctccctctccagcaataaccatggctcccactagtccacacccacgtgccaggcttccacgagctgcattttaaaatatgccttcattatgtaagcaacacacacatgcacttgccactcacaagcgcwggcactgcagctaaagagaacgctcccctcatccgctgccgcctcyccctgagatagccacttcttggctctttgtgtccttccagacctttttcctgtatatttcaggaagctcttgcaggtgttagaaaccttttgtgtttttaaaaagttgtattgaatagttaacaaatttttcaacaaatgggaggcatttttctggtgatttgcctttttattgctgcatagtattccacaggatggggttttcaccacgcacctgagcagggcaggactaggtgaggcagtgaagtgccgggtacaggatctcagggagcacccgtcctcagggctatgcacgctgggtggaggcacaggttggcgcttagactggcgccaacagcaggtcctgtccttggcttctggtgagttcagagagtgactactaaaatctcctcctttgcttgccctatcttggtccaagcctgtgmtgaactgtctccctatcaatcagtgtctaggctgttctcaacttttcaccaatagaaagaagcttctgggaaatccttgtccatgtaggaaaccattttctcatgtagatttctaggcatgaaattgctgctcagagatgtgagtgttcccttgagtaaatcttgcaaaatgcccctcagaaagcccatcttctgctccctcccacacataggacgagagggtgcccggttttactgacccactggattattaatattgtaaatattttctgtcatttgggaggaagacatgtcagtgttgtttaacttgaattttctatttgtggacttgaggatcttttcctctgcctcttggccatttgttcctgttttctgttcattcctrtgctcggtttttccagtaggtggtttgtttttcttactgttggtttctaggagttcttcttatatgatggatgttatttcatagtttgtgtatatgttacaaacatttcctcctgtgcggtagctttacttctcacagtgacctgcaaagtaagtgttgacgtacccatttcacagatggggagactgaggcttgctgggatcacactgccagcagtcacgcagagtgaagattcaaataccagtctgtctgactttgaaagctgtggccgtgacagcagatttcgttgtaatgaggtttagagtggattttccttcctagtaaatgggtcgattgggatttgttcttcatgtggctgagcccccagagcatcccagtcttccaagcaaaggttcctcaaggctgaagggagacggagctctcagccggcatggcacccattgtctccggcaggaaatcagctccttttgtcccagacgggggtggacactctctcccacttccctaaagcgcccactggtgaagcgtgggcccatgtaaaaggcaccttggccagggctcatggggaagagcggcttccggccagrcagcactcactgccccttgcagggccttggggccttcgaccccgctgaccgctgactgtgagaacgcctctctccagcctcaggaatacagacccgcctccccttgccagagtcctccactaccttaagtaacagaatgagaatgttcagtcttgtctctcctttggcagataaaagaggggcacaaattctgcagccaaaatctggcctagtctagctatcccagtgaaataggccaagacaagagtgctgctttggaccagagtgcccagaagagcatagtcctccctccacctggccgacacctggcatctctgggccagggtcggcctctgggggccaaaggggcattgggaccctttgggctcccaggcctggcacacaatggcctctcaagycattgcaagggacacaaagctataggcgacggyaaggtcagggcggccgctgcttgggagcgagagggaaggagcaaaagtgagtcctaaaaagctcggccatctgggaccttcagggatggggctgtcgggaccttgagctctgggacctgctgactgcatgaacaaactgggcagagcctggcagcgggtgggcaaaaggacaactgactcacaaagaaaatgctcgatttcaggaaagacgtgttcttttctttccttctttccttcttttctttcctttcttttctttttctttctttttctttttctttcttttctttcctttctttctttccttccttccttccttctcttttctttcttccttcctttctttttttttttttttttgatggagtttcgctcctgttgcccaggctgcagtgcaatggcacaatcttggctcactgcaacctctgcctcccgggttcaagtgattctcctgtctcagcctcctgagtagctgggattacaggcacgtgccaccatgcccggccaatttttgtatttttagtagaggcggggttttaccatgttggccagactattctcaaactccttacctcaaatgatccatgtgcctcagcctcccaaagtgctgggattacaagcatgagccaccatgcccagccatggaaatgcattttctatctaaaaaaagttagcattaggttagagaaaactttcgttctctggaagattctctcatgccccagtgatggcataagacctcttgagatgagggctgccatcttttctgtgaggccggcctgcagcctcagagtgtccagctgcagcaccccatggtcacatccatcttggtcctggatgaccaccttccagttgtagctacagctcccagctgtagcacggggtgatgctgagcacagggagaatgcagccttggctgctttgaagctgaaaggaagccacaacgcagggcagctgaaggtcctgctcggcccaccacgtaggggacctgccaagtaccaccttctgccacttgcttttccctggacagcaagctcttcagcacagaggccacgcgctgctcarcttggtggctttgccacaccctgtccacgggaggctcgccttaaaggcctgttgactgagtgaagatgaacctgtcaggcttcaggggctcaggagaggatgaaggactcggaaagaaagtcgctcctgagtgggactaggggctgcttctttgggagctgggggctgttgcggccmcctcgctcttccccgtgaggtttctgatggtggctctaacctggccggggagaaagacctagaaaatgcaagtgttccagggaagcaaactgcccagggtggctgctccctaccgggtcctggccatggacgggagggtcccctcgggggtcaggccctgacactgcagccccccgaccccacaggcactgcctccctccgggatccacatcttcgcctctcagctccacacacacctgactgggagaaaggtggtcacagtgctggtccgggacggccgggagtgggagatcgtgaaccaggacaatcactacagccctcacttccaggtaggaacctgcaccccacccctgccccgcccccacaccctgccaccacacgacctcctgggtctactgtttcctgacaccatagggatggctccaggctggcttctttttcctgggccagccccacccgccccccacccatgtggcctgtgctccccacttgggtgtctggtgtctgatcgtagggaggcctctggcacatggcagatggtggtgggattcgggagacccaggcggccctctgggaacatcaatcttggtcttggataaccaccttctggtttgaatctaatgccctccctggccagaagccacacttagcgggctctggcttccactgtagaggctggggcaaaatggacacccccagaggtcagggaggcytgagggaggacacagtggccgggggtctggtctgcagctctctgaggtctcctctcccccacccctcggctctgcctgccccaggagatccgcatgttgaagaaggtcgtgtcggtccatccggtgagtgcccagcgggaaggctgtcccactcactgccaccagctggggtggctgagagggctgggggtgccaccagaagragagggacacagaaagtgatagggggagggagagccatccagggcagggggagggtgcctgtgggtggctctgggctgggctacctcatggggagactcactcaggagttcatggagagacgttggaaagagtggagcagacaggacactcccaggggacgcgtgtcctcagtctgatggrccgaccacaaacccgagagtgtttgggggagatgagggcactaaggcaggcagtggagccctgatcccacagarggccaagcccaggcctcggtggggacttgcccaagtcctttgagatgtgtcawggcccaccagctgcacccccactggcctgggccctggccctgttgtgacccactgggtcacaggagctgatggtttataacttgctygggaacactcagcctgtgaccttcgcacatkaatctgctgggctccttgtagtggacgacagggactgtaccccagaggtgccgtggcatgcacagtggcrtggtcctatgggggcgaggcctccarcacctgccaacrccaggtggcaggtgctgatggtcacattggcttttcctcagggagatgtgctcatcacctcctgcacgtacaacacrgaagaccgggagctggccacagtggtaagtcacccccgcttccccctgcacctgcccagggcgartgttcagcctgagccatctgaggaaggatgacaggtcttgactcctcacttagggcatgggctcgtcccctcaataagccagtcgttctcagctccctgaaccacagtggcagcatcaccagggagcttgggatgaatgcaacctcctgggtgccaccccaggcccactgagtcagagacacaggcggtggcatcgggcaatccatgttttaacaagctcccagcggatgttgacccctgctcaaggttgagaagcactcacaccaagaagcttctcagcacccggggctggtgtggggagaagctgtaggacaagaggtygacctttgccccgtggagctcaaggtgcaccagggagacaggcctggagcacctgctgctaacaacaagcaaaattacaaaacaaaactttaaaaaccaggttgaggaggcagaggtgcggggacctgggagggcctygtcagaaatgtggctgtcacatggagcccaggggagaggggaggaggtgaaggaaggctctgtgcaggggctgcgtgcgggaaggcccagaggaccaagaacattctcaggatggaaaggagaggaggagagggtggagacatgggtgggggtcaggcaggatgagcgtcagctgaggatgcattttggctggactgcagacagttcaaggagaatctgcactggagagatctattttcaaggctgggtatgcaggcagcaccaggacacgggcagccacgtgatgcatcacgcagcggggctgcttccgggagccaaaggggatgctgttcacaattacctgggtcccaggcacaagccagggctgtcctgscaaatgggmcaccttgccagtggatcygtgccagctgcttcggtaaccatggtggtctccaataattatcctgtgaattgtgtggctcaagtggagcagacctgggttacagctaccctgacatccctcagcgccaggaactcaggtccatgtcacagccctattctttgtgttttaatccaatgtggattcacctgatgtttactgagcccagactgccagtggtttattttattttattttatattttatttttttttgagacggagtctcgctctgtcacccaggctgtgtgttctcagcttgctgcaacctccacctcccgagttcaaccgattctcctgcctcagcctcctgaatagctgggactacaggcacccaccaccacgcctggctaatttttgtatttttagtagagatggattttcaccatgttggccaggctggtctcaaactcctcatgtaatccctcatgctgggattacaggcatgagccatagcacccagccagtgtttgtattttcacaggtgagacataaaggctcagagagggcaggcacttgaccaaagtcacacagctgatagatggctgagctgggatttgacccagggtcttgtgcctcacagctgttaccccacccttcctgtctcccttggatttcaggtgacaagtgtcctaggttcctgatcacaaactcagggtggrgrcaggacagctttgtcagtcctttattctctctagaggaggtgctcagtatatcacagcagtggctgatgtcgggtgcttgccacagctcagcactgctctaataactcatcctaaccacaccaagccttgctgagacctctgagcaatcccaccaggagatacagtgaggtccagccactcaggccacacagcgaacaggaggcagggctggtatgggtgcaggtgccaaccccgactgtgccgcctctcggctaagcacctgtgcagtgactgagtgggctcgcaaacagakggctctgcaggtggagcaccccaggcaagtccccaccatcagccccattctgcaggcgyggccccggggcmrgggatgggagggtcttgccgggcatccagcgaggagactgcatattccctgcccaatctggcttcacggcggcggaactgacgccacgtcccagggcgttcggggctgccaggcctggtgagcaccgcggacatctcagatggccgttctgcaggttgaggccctcggtgccagcgtccccgtgggcagttctgtggcttccctggcccatgtcstcctcttggcagtggccacatcacagcaccaggtgggatcaaaggggagggcagctccccaggtggacctgagcttctcacactctgacaagccctcgcctgctgatccaagacacagtggcctttgaaattcgatttccttccccaggtgaaagaggagaacagattctacacagggtcggactcagttcccttttgatgtctgtggtggcagagggtggggagggacaggaactcacacaggagggcaatcgtcccgatctgacgggggcgggatggatgagaaaagctgggaaaggaggaatccggcccagagaacaatgctggcaaaaacgcgtcctggccaacaggtgccaggtttcgtctctgggcagaactgycccatgctctttgtctgcacgggaggagggggcggcagctggtgtaagtgccacgccaagctttgcccagtccctttgttctgccatagagtaaagattgcctttcttccccaccagccagatgaaatccccaggcccacagcagcttcacaaacagcggggagcctggaggggcaagggtggccagggcgtcatgtcccggcccctgacctgctgggatctgagctgctgccgggggagctttgctctctccagccccagctcctccaagctgctgctgttcttcctcctatggctgaggctccacggtcaccagctccaagagcagcaacccagcgaggggcttaaagctggcagtggggactcagagggtgcctgccctgcccctcccatgcgatggcaggccgtagggttgccgtgagaggctggaggttgtcgyggcctctagtcacggtcctgtcttatagagtccctgctcccctcagagccacgttggagaaatgactggtggacggtgcggggctgcagtggaaagggcctcccttgcagtccttggctccaggctctcgctggaggtcatggggacagcttccagacaatggccgggacgctgggtgcactcaggctgtgccaccgatgctgtggccaccacggggcatccccttgcctgctctgagactcagtttctgtacccataaaatgggcacaataacaccccatccgcttgtcccgtttcatttttcctcacagcatcatcagtacctgatacgaatttcctggttgactcactcactcactgcctgtctctcctgccaatggtggcaattccttgagggcagggactcggttccccagagcatgcctggcacggtgcagtgaacagacgagtggacgcagtgtacacgtgggtgcggcgaaagctgctggatggcagygtctgcgtggcatggcccggggctgacgggtctcctccaacttgcaggggggcttcgggatcctggaggagatgtgtgtcaactacgtgcactactacccccagacgcagctggagctctgcaagagcgctgtggacgccggcttcctgcagaagtacttccacctcatcaacaggtgagggctccctgcacaagctccctgcccccagggaaccccgacacagaacctcgggcctgttaggcggctgggcagattggaggagtccaggctaagttctaggagcagagacctgtggcggcatcactcacccctcccctcactcgtttcctgctgagtctggatttggcttcagagcctcctcaacccagcctgcagcagccattacccacccgccaaggtgacaggagaggtgaggccgttgccggtgaaggcagcatctggggtggcctggcggaggcagyggggctggggaggaggtggcaggacggttgccccagggacaggactcgagttgcagggaggtgttgctggtgcccactgggctccctgcccgtcagctgctccccagcctggctgttccttgtcccsrscaggttcaacaacgaggatgtctgcacctgccctcaggcgtccgtgtctcagcagttcacctctgttccctsgaactccttcaacygcgacgtactgaaggccctgtacagcttcgcgcccatctccatgcactgcaacaagtcctcagccgtccgcttccaggtgcgctgccatgggcccgggtggggcatgcagtcaggcaggcctcatggggggccccagtgaggggtgatgggyctgcactccaaactgctggcaaaagcactcgcacaagacaatgagagcaagtgccaggtggtgacacataggcctagacagccagccagccagcagagagagaggagagaggagagagaggagagagaggagagagaggagagagggagagggagagagggagagggagagaggagagagagaggagagagagagagagagagagagggagagagagagaaccaataacgaggcaaggaagggagggcaggcaccctctctggtgacacctccacactgtaccgaatgccaaatgcaggtggtgtgagcagggcgcactaacctgcctaaaaataaagcacyaggggaggggaaggtaagaaacgaaccagtctgaagctgcgagctggttttttcctccttatctgagacccactggtattcgaaggcatctaatttatcctgggcccactgggctgtggtcaggaggccagggcctatgcagagttagtcgcrtaaggtgccgcagcctggagatccaggaagatccttcccagaagcatttgggagccagattaactgctaagtcaaacatcctcagcaccaagggaaggaagggctaatactggcttgctgagaatagtgtggggtggacgtctgatggggttgaaaacttggcatttggtgtagccttgaggggaagagatagctaaaaaatatcagagcctgcagcmaggggctctggttgctacaytagggtgaatgattaaattgggtggggacagaggcggggagaggcctggatgactcccaggttcctgactaggtgaatgggaagccaggggagggggcatttactgaggtgaggacccccaaaaagcaacttgggggagcagagtgagttcagtttgagacaagctgagtttgagggcaagaatccaagaggtggctgggaagtggctggggaagcagccacccatcttgcccytccagcctcagtttacctcctgcccccttccttgcagggtgaatggaayytgcagcccctgcccaaggtcatctccacactggaagagcccaccccacagtgycccaccagccagggccgaagccctgctggccccaccgttgtcagcattggtgggggcaaaggctgaggggggacctactcctccccctcctccatgctgtccctgtgggctcacaccggcactgtgcactctactctgcgacgatccccatggaacagcmctgcaygcccaggatgaaggggccagaccacgcccctgcctgagaccacggtccaatccagccttcttcccccagggtcccctgcatggctgagagggtgtgggtgccctgttgacctaccctggaccgagtggaccacgacctcgtccatttaaacccggctgactcagtgcagggacagccygcacagtggtccagggtccagccctccgccagccctgttccgcctcactgggtgtggcctggcttctgggacaggcaccatgctgggccggggtgtggaatcaccgggaacgcccccgcccccgccccgctgctcccggtgtgcagcgggtgcgggtgccgcttaaacatttccctgctgagtggctcgtgtttcacagtgggcggcttccctgcgacggaggcaggaccaggcatttagctagttagagactcgcctgggaaattgctccattcctgagtaaacagatattttcgcccacctaaagggaagccctgacaacaactatcaccaaaagacgaggcggcaaagatccagcggggcttctgggcgccggttccacgtggggtggaattattagcaccagcttgcttctctgccggtggggccagcgctgaacagaccggggtggagtcagggctgtgctttccgcgtggttctgccacttagggagtgtgccttgggcgggccatttcacattcctgaccctcacttttctcatctgtaaaaccaggctgatgccgtgcgggctaatgagccaataaagctcacacttgggctggcacccactggaggtgggtatgtttgcactccgggccgtcgctccaggagagagaascttgctcctgagcctcctccctgtgccaggcgtggtaccaagtgcttccccctgagcgtcctgaagctgcctcagctggcctgggtgggtctccccttcctgccctctgagctgcctctcagggacaagttcagctctttgatggtttctggagacagtaacagatgcacttgtgttcagccacttcagcaaaacgctgcccagcctcatggggagagagggagatggatgggcctcggagtcccctcgcatcagctaagcggctgctgcttctgcaaggcacttcacttcatcacagaagggaactcacgagcccaggagctctgcctcacgttgtataaatcacagcttcttgtggtccataagtcacggcgctagcgctgtgaaatgccaggccccagcctggagagccactccggccctctgtcatctttacagcctaggtgacagtagacacggagcaggcccaagaagcctcttcccgcgatcacacccaattgccagcccagagaagggtcccagggtcctgcccaaacacctggggggcacttgtagcctgccgatctcgggcagggaaactgagactcccagataagtacctcacctggggcccaagagcggcagtgattgggaatcctagccagctctggaacctgccacagcgacaaccccacccccacctcaccccccactcacactcttgctctcaggctggttatcctcttcctcttgcagagacagcagccgtgtcccccctaccccgctccagcagtacccgcacctcctacacccagataagcgtaaccccgtggttgctgagagttgccacttgccccacactgaggctatgcacagccgtggcaatctcgtgaagccatgtagtttctgtttccattgatggaggaggaaactgaggctcagagacctaaagttaggtgccaaggtcacccagagtaagccggggagctcgaagtgtccccaggtctgactccagtgtctgaatgctcaacctctgcttacttaggaaacaggaatttccccaggacccttgtgggggattttatctaaaataagttccttatttagaggcttaggggaagtgctttgttacctgaaaatgacctacatgccccaagccaaagggactctgggctcgcccaccttccgaatgattggggtgtgagtccagcagcccaggttgctattcctgcccctgctgtgtgaccctgagttagttactttccttccctaggcttgggtctccctatctgcccaccgaggagagggttccccagcctcccagggggcagggactgctagggtggcacaaccccccatctgtgaggtgctcagagccctggggtgaggaatgctcatgcccatcagtgttgagagaagtggggcgaccccaggctccagccagcataggggtgcctgcccgactgggtcccagagcacaccagggctgtgctttctggtggctgctagcctcatgtggctacttacgattaattttaaattaattaaaatgatacaaggtcgggtgctgtggctcatgcctgtaatcccagcactttgggaggctgagatgcgaggatcacttgagcccaggagttcaagaccagcctgggcaacatagtgaaatcctgtctctacaaaaaatacaataattagggctgggcgcggtggctcacgcctgtaatcccagcattttgggagactgaggcgggcggatcacctgaggtcggtagttcgagaccagcctggccaatatggtgaaaccccgtctctactaaaaatacaaaaattagccaggctgtggtggtgcgcgtttgtaatcctagctatttgggaggctgaggtgggagaattgcttgacctgggaggtggaggttgtagtgagctgagatcacaccactgtactccagcttgggcaacagagtaaaaccctgtctcaaaaaaaaaacaacaacaacaaaaaaaaacaaaatggaacctttctgcgtcccattcatacccccaacttttcacatggcccaaggctgtctcactgcacactgtggtatagcgctctgccggtgacgatgtaggcactttcttttttttgttgtttttgagacagagtttccctcttgttgcccaggctggagtgcaatggcataatctcggctcaccacaacctccgcttcctgggttcaagcaattctcccacctcagcctcccaagtatctgggattacaggcgtgtgccaccacgcccagctaattttgtgtttttagtagagatgagacttcaccatattggtcaggctggtctcaaactcccaacctcaggtgatccgcccccctcggcctcccaaagtgctgggattacaggcgtcagtcactgcgcccggccagtgtaggcactttcaaaacagtttgctcagaattcctgagaggcagtactcagccacagtgagcgtcatggtatcaatatttccagaaaaaaaatttaaaaatagctacgaaacggtgtttttaaagttgaggtctggaagacctggctcggggtctgggaaggtgggtcttttgtgatgtggtccccgggcggtgcacttgggagccatggcggggccaggacctctggcagcgcagggatggagcccgcaggtgatgagcttgggaggtgagttgtggaggctgcgctcacatcaatgcccagtgccctccccgaggggccaggttctctctccacaggggcgggggaagcacacaggggacagggaggggtgctgggttctctctcctcgggacagggagcgcagccaggttctctctcctcgggacagggtggtgccgttgcgtgcattccccagctgcagccacgagaaacaatttggagcggaacccgggctctgacctcccctcatcctcagccttcccccagggatgggccgtgagatgaatgtggtcaccggcccaatccaggggtctatggccaaaccgcagacccggaggaagcaggccaggccatctggggagccggctcccctcctctcctcccctggctcccacaaagctgtctcatccagaagccaggcccgcctgtgagcaaggggaggctgcaggtgttccttcagcctgaagcgtgtgaaagccaacagcccccaccctggtctccagccgcagccccctccccagactcagggggccaaacccacttttcacagccatctgtaacccaaacgtctgcccacagctttgttcgagctcagtccacagtgggccgcgtggcctgggagcgtccagtggcagctggggcctgccaggactgctgcccccagatcgctgtttgctgtgtgtgtggctctgtggggccccggctccacgataccctcaagcatctgcctcccgctcttcccagattgcagggcatgcctggcaagactgcgcagtgccgctctgacgggcctgatctgaacctgggctcggggggacaagggaggggactgagcacgtgggatggacagagatgcacacccctcccaggcaggagaggcagagctgcttctgacacacaggcagttatcagggggaagagaaggtgggcagaggagccaccccatctcaaggcagcgtgcagggcagagcctaagagagggtcctcctgcaagggccagacaaggaggagggcatgggcaggaaccgcgtccaaatcaacagcaaagacaaaggtcacctagaaagggggactccaccagactcttacccagcagcacgtccctcctgcctgggcctggtgagcgaggggctcaaggggaaactgaggcaggagctggcacttctgtgtgggtgaggagggcaccaatctgaggccccgcccgctccctgcttcggctcctctgtgttcccgggctgccgactctcaggaggctttgccacctgaagaacagggaggtcgagcaaggtaagaagagctttccagctcctgttccgacctgagagccgagaggcaccatcctgaagaatggccttggtcccaggcctccatgtgcgctgtggcagacaatgccagtcgatcacctctctttcctgacccagacacagcctcatgctcttcagccaagtgccccagggaagcccgccaccgatcagtcaagcctggagtaaaagatgaagcctatttgcttcgctgttttcacgtggggcttatcaagtatttactaagcaccttctagaagcttggaaagggctacaagccatggtccctgagcccaagacacttacaggtttgctttctgggaggattggggtggattagagactgccttccagtcagtgaccacaggatgggccatcttggtctctgtccgtatctggtttgggggttttcgcaggactaggcctaggctaaggacagggagggcacaagttctggctgggtccagggtcctgggacccagggccatttgggacctgtgagaatggatggacagcatgggatggggcatgtggtctgagccctcagtagattcccttcaccctcttgttgttggggtcgaagggcgacttcaggtgagcctgggcaccataggtcacccccattctctccagggcatagtccccgctcttcacaaagtccagcgagacctaggagcagaggtggggatgaggatcactctctgttggtaggtacagggctcacgtctgcctgcttctctggaggagggggtcttggtcttgctacctgccctgtgggcaaactcatccctgtgccagggactcctttctgaacccaggcattgccccagagcaggtgcagttcgtgtccatgtgatcttgagttggacatgggcatctggggtccggcaaagccaaggtctggcagccaatatgacttccaccggacaacacacctcccaccccagcaattccagatgcctgggaaacagcagcaacacggtggcttccccggacccgggcaagcacagcggccagagcagcgccgaggctgggggccaatccggctcgaatccctcggggcaggggcggctggaacagccttctagacagcttggcctctgcatgctccccatcccacaccctggctcgggctccccagcaagcgctcgggagccagtcagccccaggtgcaggtgctcttaggcaggaggagggtgtcacctccagcctggcacagctggtgacgcctggcacttttgctgcagctgctatgaggagggcaggctaggccactcagggaagctgttcttcctttacagcaattaaacccaaggtcagggccacaggagggagtctcgggctccgctctgggagtcagagggctccttcttgttcctagcagctcaggactggatgaaaaaaataaaaaacaaaccaagctttttctgcgacaggagctttaggagtggtgcttctgagccatgtgtgcacctgcagggctgagagctctgagctgccccccgcaggcaggcagcatggagagctggtggccttcagatgtccacgggcaggcacaactcaaagcgggcatctggccttgctaacagatacctacgaggcagaaacgccttccccatctcggagcctttcccatcaatgagcaggtttccctatcttaggaagaaacctccgttaccccacttgggtgctagaaaatgtttaacaaccagctctggggtgaggtgggtgtgactgtagcatttgcccatttccatggtgcaaatgctctggacagccctgatggagggggcaggagacgtgcaccggccgctctgggtgcatcgactggttccccggctgcctgtctggatgccgtttaacctcggaacctcggcttccctggtcacgttggttatggacccatccctgactccggagaaaggcgagcattactgttctttgaagaaatggcaaaggagcctccactccccagcccaccctggcatggagcccataaactccggtttggctgggccccagggctgtggcccccaggaccatggccccagggctgtgtcaggaggccctgcccaccgtgggagccatgccatcacaatccccacatattaaga

SEQ ID NO: 95382 - DNA, 73918 bp, Homo sapiens
  misc_feature (1)...(73918): n = A,T,C or G
agatcacaacaaaagtgatgtcatggccatttctggactcaagtcttaagaaatcggcaatttccattttgtttttcttgggatgcttccttgcggaacgcaggcactatgccatggagaagcagctccagagaggcccacgtagaggactccagcctccagccctcagcttctgccaagctcccaggcagcaacacccacaatttggcagccattttggcctccatcttgctccatccaagcaaatcatcttggaagtggaccttccagccccatttgaacatccacccccatgtaagattccagagataaagaaatgttgtttaagatctacattttggtatggtttgttatgcaacaagcaataatcaggacagattttgatacctggaagtggagtattgataataccataacacgcagcactggctttgggactgggcagcagatacaagccagaaacgcctctgggagcatgttagtaatggtgtaggaggctgggagtgaggacttaaaagtgagggaaatgttatctggagagaggaaaggggactccagttacatagaaaagtttggcaacactgttgccgtggccttctgtaatgtggaaaataaaaagtgtacttcatgaactcagtgacctttctaagaagatttctgggctgagtttccaaagtgctgcctgatttttacttggctagctagtggcacctctttctaccacaatgcatgaaccagtcatgttgttaaagacattgtctccatgcatgaaattatagacaccctatgccaagcttgtccaacccacagcctatggaccgcatgcggcccaacacaaattcgtaaactttcttaaagcattatgagattctttttgcaagtttttgtttgtttgttttgttttttagtttatcagctatcattagtgttttatgtgtggcccaagacagttcttccagtgtggcccagggaagccaaaagattggacacccctgccctaagccttctccaggtccccgaagagttggcactgtcacaatgacaatggctaaccttttgtcttccaggctactcaacccttttggagaaggtggcaacatcgttggcactgtcatcttagacaaaagagagtgggactggcagaagatcagctatctcaaaattggaaagcaggtcactagttcctatccactgtgattcgtctggcattcttcagtcctctgtactgtggcttctcctttcccccatgattttcattaaacatctacacaaaaattatttaatatgtgcaaaatgtataaataactaatcctgcccttcaccatatccatgatcctgcattttgtgtgtttcctttctttgttttcctctatggtttcactacatgtgaatccctagtgatagatttatttttgcttgtttcttaactaacagaaatgggatcacactgtatgtattctcccgaaacttgctttattctctcaacattaagttcataaatttcacctatttgttttttgtcttaatctttgtaaccagtctgtaaaaccaaatgactatcctctctgttctggcacaatgtgctgtgcatatcaggtgaccagtaaacactgtaggatgatgctgggcaggatatgtccacagtgttgggagaaaagctgagtgttgggagacaacctgaggcagggcttggaacatgtcaggggtccagggtctaaaacccctcgtggcctttggaatgggtctagacttgcgggctccttgcttttagcactcccattatctcaagtagccatatgtttcaaagaaaatgctaaactctcacagctatagctcattcgcttgatacgccacttccttccaacccccacatcctcaccacctgtttctttgttttatcaccaataaatagcgtgggctcccagagctcagggcctttgcagcctccatactagcgttggccccctggtcccactttctctcttgtcttttctcattcctttgactctgctggacttcgtagcacccacagcttagtgttgggtctgatcaccccaacacacagaataggtgggtagctcacgttcatgcaaatgtagttgtaatattcaggaataagagtttccagagaaggtacaaaacttttacgtgacccccaaaaaatttaaaaaaaagaaaaaaaaacaaaaaacttttaggtggctaggcgtggtggctcttgcctataatcccagcactttgagaggccaaggcaggaagattgcctgagacctggagttcaagatcagcctgagcaacatagcaagaccctgtttctaccaaaaaaaaaccttttttaaaataaactaaaaacttttaggcaactgctaaaaatgaatcatttggtgtaaagggacctttacaaaatcatttaagagcagggacctctcttaaaggcctgtggatctcccaagcatggaaataacagaaaatcttgagttccttcaagggaaattccaggcaccttcccagcctttagaagtaaatgagcaaattaataagcaagaaggtaatagtagcttaaaacaatagccaaggccgggcacagtggctcacgcctgtaatcccagcactctgggaggctgaggcaggcagatcacttgagctcaggagttcgagaccagcctgggcaacatggcaaaatcccgtctctacaaaaaatacaaaaattagcattgtgacatgtacctgtagtcccaactacttgagaggctgagggagaggatcacttgagctgggaggcagaggttgcagtgagctgagattgtgccactgcactccagcctggatgacagagcaagactctacctcaaaataaaaaaaaaaatcaaaaataaaaagccaaggaagttagagtcagaagatggtccctatagaaactaatgatgcatcttaactatgtccctgagttgttttttaaaaacccagaccctcacgaaatgtatccactggcatatagacctcagataaggaggaactgaggattgaactctgaccactgttcttcaacgtctttcagaggggcctgaaagtcatgtctgcaaatcagaactaacattctttttttttcttttattttttctttttggagacagtgtatcactctgttgcccaggctggagtgcagtggcacaatcatggctcactgcaacctccaccttccaggcccaagcaatcctcccacctcagtctcccaagtagctagaaccacaggtctgtgccagcatggtcagctaatttttaaattatttttgtagagatggggtctccctatactgcccaggctgagaactaacgttcttttctactgaccccaaatttttagacaaagctttgtctaaagttccttaaccaattgcaaaaaagaaaatctctgattcacctatgacctgtgggtccccctcccccactttgagatgtcctgcttttttaggtcaaaccaatgtgtagctccatgtattgatttatgactttgcctgtaacctctgccccacgcacctttattttactttttatttttgagacagggtcttgctctttcattcaggctggagtgcagtggcacaattacagttcactgcaacctcgacctcctaggctcaagtaatcccctcatctcagcctattccgactagctgggacacccagctaattttaattttttgtagagacacggtatgtgttatccagcctggtcttgaactcctgagctcaagcaatcttcccaccccggcctcccaaagtgttgagattacaggtgtgagccaccgcgcctggcccccagctgcctttaaaaacccttacttgccagccatcaaggaggagctacctgattctccttgcttggtaccctacagataaacacccttctttctccctctgcaaaccttggtgtgggtatttggccttactgtgtcaggtgaagggaccctagttcagttagataacataaatatttgcagtgtatgtgtactacccaaggacatgacttcattattcaatttgacaaatgcgttctgttacacaaatacagaaaggattaataaagctttactagtccatctttcccattatccctgcatgtatccttgcattagtgcaaataattgagaacaaaccattggtgaggggatggaaagactgctctgactcaccagctccctttaagtatttccttaagtaaatatcataagtaacacaaataaatatttcatacaatgtagagaaaaaagcaaaaataacagttctctgagcatcaaactaataggcttagtattactatcatttttttgaaacggagtgtcgctcttgtcgcccaggcaagatctcggctcactgcaacctccgcctcccaggttcaagagattctcctgtctcagcctcctgagtagctgggattacaggcatctgccaccatgcctggctaattttttgtattttcagtagagacggggttttgccaagttgggcagactagtctccatctcctgacctcaggtgaactgcctgcctcgacctcctgaagtgctggggttataggcgtgagccacggcacccggcctaggcttagttttttgtaggtactagagtatttgtttctttagccagaatccactgatattttagtcttctggttctcaatcttggcttgcttttgcaactacctcttgaactttaaaaaattctgctccagcctgggcaacagaaggagactgtctcaaaaaatatatgtcaataagtaaatatcctgatgcctggatcccaccatgggacattctgatgtaactggcctgcaatggtgtctgggcatggggatttttaaaagccccagtgactaatatgcagcagagtttgagaaccactggtttaaaggactttgtcctactctgacagcgtctagcacagtgcctggcagagactgatgctcagaatgaacaaactaagattctatttgtcaaggaggagagcattgtgttactcacaaatgcaaacaaaccacaagcaagggataagtcaggccctgggcaaagacaatggtaaagcaattcctgccaagtaagcgtgtgagggtgacacccactgaatgcaagctgttgttacctttttccctttatttttatgtatttattttttgttgagacagggtctcactgtccttcagtctggagtgcagtggccctatcctggctcactgaagcctcgacctcctgggcacatgcaattctcccgcctcagcctcctgagtagctaggactataggtgcgtgccaccatgcttggctaattttttaaatttttgtacagaggggtggggggtcctaattatgttgctcaggctggtctcgaactcctgggctcaagtgatcttcctgactcggcctccaaaagtgctgggattacaggtgtgagccactgcaccaggtcaagtttctatcttgactctaactagaaaaggtgtcatccttgaaatgcaggtactgttcagccaaattccaaagtcctctgaagatccaagttctctaagaagttcagaggtgccaggctgtgtcttgtttgtgcaaatgaaacagaggatgacaaggtcgggtgggcatttcgagctctgccccaagtctggtcggcttgagagtcaacctaggagcctctctcggctccaaatggcaatgtggcagcccttcccgagtagggaaaaaggagcgtgtagggggcaccacggcaagctggttgggtctgctccacccatgaggatggagtgcagcctccaccgggaaccaggggcgcgagtcgctgctcagtggcctgggcctgcatgtggcgcggcgggagctgctgcctagggccgcgcagcgacagggggtgaggactacatgtcccgacgtgcctcgggcagggcggggcggtgccggagccgggcctggaggccggccggggccaggcgtgcgcagtggttcttgggagtggcgaagcgggtcctgccccgctgtcagctgcggcccccggcgccgggcgggggtggccgcgacyattggcggagaggcgaaaggggcggggccgccgccagccgctgcgggcaaggctgaacaggcggaggtgggcagccggccagggaagcacggtccaggcggctacattcggcccggccatggcagcggcgcccctgaaagtgtgcatcgtgggctcggggaactggtgagcggcggcgggctggaggccggggctccgcttccaggaagcgcctctcccgggcggtgagggctgcgcgccccatgctgcggcgtgggcaccgggcactgcgcgcagggaggcggggtgggcgacctcgttgctgggctgggcaccgtgcgcccgaggaggccgcaccggggcactcgctcgggaggcgctgggctcgcgtgcgtgcgggggacagcgcggagagagggcaccccgagcacgcgggcacctgtctgcgcccccgttactgagcgcacagaagccacctgcttgccacgcctgggtgttttgcacaatatcctaagggcgtattccgttctccrcggcggatctcctgggtcaaggacttggtggaggctcgagcattcttactgcagtttcggtgttgaggaaaccgaggcggagagggctaaagggctcttgctgcccaggtcacgggcgkggcatgctctgcccttcaaggtgcccgtctcgcccccgcttctgataggtccactatcttaggcgcgtcgtatcaggaagaaaatccaagtttcaacaggccgctctccctgaggcgttgagaattctcccttgccgagatgtttgcgaagctttgcgtctctttggggccttatttgactttaacattttatagagcacattagaaatgtcagttcttctagtacccttaatcaaacgtacactgtgggattctctggtgtgtttgggtgaatgtagaggtgggggtgtgaagggggaaggaagcaaagtgtagcatctggtgtttccaagccttttttcattgctgtacactctgccacattggagggactggtgtacaatagttaagagtgatgatgtcctttcagtgcttctgtttaccggtttttctgtggcgtgacaggcatcagaagtgctgcagcagctggtcctaggtagttggtcttagttttactctttcaagacttggcccagaaagtacttattgaaggaaaccttacctggttcttcacttttccatcccagcaaggccagtggcctctctctgtgtccctattgctggcctgcatcactgcattataaggagttatttgattatctgtctcccaacttttgagaatggcatctaccctagtgcctggcatatgctaagtcaatactaagactctgttgcagtggtgcgatcttggctcactgcaacctccacctcctggattcaagcgattcttgtgcctcatccacttgagtagctgggattacaggtgtgagccaccgctccctgcctaaaaactaatttttaaaaccataatgatatttgattgaataatacattcacattgtttaacaaccagggctgggcgcagtagcttatgcctgtaatcccagcactttgggaggctgaggtgggcccaggagtttgagactagcctgggcaacacggcaaaaccccgcctctacaaaaaataaaatattagtcgggcatggtggctcacgcttgtaatcccagcactttgggaggctgaggcagggggatcacgaggtcaggagattgagaccacggtgaaaccccgtctctactgaaaatacaaaaaattagccaggtgtggtggcaggcgcctgtagtcccggctacttgggatgctaaggcagcagaatcgcctgagcctgggaggcagaggttgcagtgagccaaaatcagattgcaccatcgtactctagtctgtgtgaagggagtgaaaccctgtctcaaaagaacaaaacaaaacaaaaaataaaaaacaaaaaccaaagagtaccaaaaacagtgaaacatcacccatccacatttatcccccctgagtacctcctggaggaaaaccagtgttatgaattacttctgtcctttctggaggaattccatgcaagtgaatgcttacatatagtcctttcgccctccacgctgcaaatactagggtattgcatacttttctgtgagctgcatttttcaaccaacaacagaatgttctacacaatatttaatagagttggtagcttgctgctgcaaagcttaatttggactttcagcttggctttgccagttgtttttttttattactatttttttagacggagtctccctctgtcgcccaggctggagtgcagtggcgcgatctctgctcactgcaagctccgcttcctgggttcatgccattctcctgcctcagcctcctgagtagctgggactacaggcatccgccaccatgcctggctaattttttgtattcttagtagagacggggtttcaccatgttagccaggatggtctcaatctcctgacctcatgatccgcctgcctcttcctcccaaagtgctgggattacaggcatgaaccaccgtacccggccggctttgccagttttaatgtcaagctcacttgagtgcagtgtcagctcccctgttggccatgccacttgaaaggcacccatttagcacatgtttttttaacattagttttttagtctgtacaattccacagatgacagccccttttcctaatttgcaagatgcaggacaagtagcacagctctgccatgctggaactgggcctggagcaagagtagtgaagtgagcctcctgccccctctgctgggatttggctgcctgcccgtggcttcttcattctggtgtacttgactgtttccttggcccactccagcccagggaaatggagtagaacttggccagtgatactgaagcagagcaattgagaaatgtgctgatggtttgggctggctgcctggcttcattaattatgggattagacgggaacaattcttggcttctgtgccactgccttgggtacagagttactccagtcctagagagaggatcacaacctccccagagggattcaggaactcagaaactgaaaacaacatggagaagccccagaggagtgttcagctctagtcagtagacatttgagtgttgcccggtgaagagactgtggtctgaccagggatgcagacacagctggacacagtcccggtccttaaacaacttaccttcaggtctgagatcagtgaggacatggaagataagaccgaaggaattgccaagtggaatggagtaactgctctgttacactttaaatcgtgtttctttttttgtttgtttgtttttgtttttcttgagacggagtctcgctctrtcgcccaggctagagtgcagtggcgcaatctcagctcaccgcaagcttcgcctcgcgggttcacgccattctcctgcctcagcctcccaggtagctgggactacaggcacccgccaccacgcccagctaattttttgtgttttttagtagagacgaggtttcactgtgttagctaggatggtctcaatctcctgacgtcgtgatctgcctgcctcggcctcccaaagtgctgggattacaggcgtaagccactgcgcccggcctaaatcgtgtttcttaaattgtggtcccaagaccacttgtgtcagaattaccactgaaactagacttgcttaatcatatcccctgagaatgagatttttttttctgaaggaactttarccttttgccaattttaatacagatcaccaagagatagacctacccttccagatctggttcttacctcaggaatgtcaagttgcttaagcaatgtttatacttggaactttagggcagcttagcctgtttgtgtaaataaaggtgtttgtcacatttgagaactctcacatggagtgcctctcccaagtcaattgtcatcagttgcaatacagttatcagaatattgaatctagctggcttgccagggagcttcagccaggaaggtcctgggcaggaaagtagacgtgttgtataacatgcccttgtcctgtcctttggtgaagctcattttctctacatagatcagagagaggaggctagaggaggggccgtcatgcatccagctgagccctgctgtgttgcccactgccgcaggtgcagggagggacttcctaacctgcatgacttttcctraccctgtaaatttgatttggaaaaacaacaaaagcttctcaggttctttcaaagatgaaacagtttcttttttctttttttgtttttgttgttgttgagacaragtcagctctgttacccaggctagagtgcaatggcaccatcttggctcactgcaacctccatctgctgggttctagcgattctcatgcctcmgccttctgagtagctgggattacaggtgggcaccaccatgcccggctaagttttatatttttagtacagacagggttttgccgtgttggccaggttggtcttgaactcctggcctcaaatagtctgcccgccttggcctcccaaagtgctgggattataggcatcagccacagtgcctggcccaaagtttctttcttttaaccagcaccttgggaagatcacccagacaaagtgcaaaataaagttctagagttaaaacctsagggctgtatttacagccaaacccttgtgataggaagcatatgtccagaaacacatcctaaatctcctttggaggcagggtagtgcagtggtataagaaagagcttgggaatctgactgcctacgtttctgcctgggtctcccacttggcagctctgaggccttgggaaaagcrcttctctctaagaatcatgtattgatacctgctgtctgggattatggttaggattaaatgaaatgatctggggagagtgcatggtgactagcactcagtaaatgacagttgctattagtattattagtttcatcatccttgatggacctgtcattaagtcacaaaatggactggtttggggtttggccaaggggtagagaggcagaggataggagagaagacaggagatgaggagagaggctgatagacagctggaggagtgtccttgggagttgcctatctcttgcccttgttttcacatcaccccacagcctgacattttctctgataccgaaggtcaaggagagctttggcccactttgctctgatgactgaagctggacctgtgactctgtcttttttttttttttggtctgctggaactggctgggtgcagcatcctggctgttcatccgccctgggcacccttttgtctgtgctactcagtttctgttgtgattctcaccacacagagagctcagaaacaatttgagtgactataagttagctcctttatggtcagaaataatccttccctgaggacaggcgcacggacacacttctgccttggaagttggagtgagagttgataggatggactggagatgaactgggaagagacttagagttcccttgtgggctaagatgagaaagtttgtacrgctttttaaaaagtaatatttaatcacctgtttccttcatctcccccacctgtttggtatacaaatcatgagtggggctgggtgcagtggctcatgcctataacctcaatactttgggaggctgaggtggagaatcatttgagccccacaatttgagtccagcctgagaaacatagcaagaccctgtctctaaatctaaaaaataaataaataaaatataaataaaactcatggccgggcgcagtggctcatgcctgtaatcccaacactttgggaggctgaggtaggtggactggttgagcctaggagttcaagaccagcctagacaacttagtgagaccctgtctgtacaaaaaaaatacaaaaattagctgggcatgatggcatgcgcctgtagtcccacccacttgggaggctaaggcaggagaatcacttgagcccaggaggcaaaggttgcagtgagccaagatggcaccattgcactccagcctgggtgacaggagggaaaccctatctcaaaaaaawatatataatataataatgactactattctaggaatgagtcgagagctcccagtgtcttaccttaacctttcatttcttaacctttacctcttgcttcattcttccattctatctccttctcttccttaagaggcataaatataataatttatcattttctgtgtgtcatgtacatgatgttatttcrtttaaacatgtgacaggcctgtggggtactattrttataaccctatgttagatgacataactaagatttagagaaaacttgcttaagtcaacagttagtaggtggacttgaaacccagatccttttaaccccaaagaccatgtttccataaattcttaccattttcagtgtgaagcatactttyacatgaggataaatatcattttcataaaaatgttgagtatcctcccaacaaaatccaattttatattctccttctgagaaataaaatggaagcaaggccttaaaaatcatctcattcagtttcccaccaatgtagtcatcccttctcctatagatatgacagatgattatagtttactattttcaaggcaattgatcttaaaattaattagaggattaattgttgaaaaaatcttatctttttttttctttgtatgtgaagaaaaatcttaggaaaatctaagctaaaaatctatcacctctaacttttacctgttaatcccagagcaacacttaggtgagcctactcttctctaagtcatgtccctttggacagaaaagtcacatatctcctaaatcttgtctctggcaggccaagtagcatccccaagtctctcagtggttgcaggtggacagtagtttctgggatcctcaccatctgtgtcaccattctcctttccctttcctcctccccaactgggtgatgtcaggaactaagctyactgtgccagaagtgtcctgggctcccataaggttatactggtgacactttgtagttattctgctttgaggctcagtctcttccacaattggaagaggagaactgaatcagtcatctctcactgcctaacagtctacccccaaacttagtggcttcagacagcaatcatttattagctcatgattctggggtttaacaatgtgggctgactaacctggcagattttctgctgatctagcctaggctcactcatatggctgtggttggctggtgacttggttggacactctcaccyaccttttttttgttgttattttttgggagtctcactctgtcacccaggctggagtacagtggcatgatcacaatgcattgcagcctcaacctccaaggctcaagcaatcctcccaccttaacctcccgagtagctgggactagaggcacacaccaccatgcctggctaatcttcagatttcatcatagaggtggggtctcactatgttgcccaagctgatttcgaacacctgggctcaagtgatcctcctgccttggcctcccaaagtactgggattacaggcatgggccaccacacccagcctggctgggactcttggtcctagatgacctccttcatgtctggcagtgggcaggcttcagccagcgtgacaggggtgaccagcccacatgtctytcatccttcagcaggctagcttagkcttctccatatggtggttgggttctaacaagagtaagagaaggcaaaccttcatgaacttaataggcacttttcaagctgtagcacgaattgggccagatgcttttctagtccatgtgttcagaagagtcatagtttcctaaatctgtggctttaaattttttgacttgcaactagctgacatacaattttatattatgatggaggatacttcatatccaaccagaaacaaatgtttcacrgtaacaaatgttactatgggtgattaactgtgatctcttctccttrtatttattttgtgcctgcataaccttcagtttgagaaacactgtcctagatagtaaaacagtttctcattcttattgtttccggacttggttccttccggtgggttcttggtctcgctgacttcgagaatgaagccgcggaccctcacggtgagtgttacagttcttaaagatggtgtgttcagagtttgttccttcagatgttcagatgtgttcggagtttcttccttcyrgtgggttcgtggtctcgctgacttcaggagtgaagccacagaccttcccagtgagtgttacagctcttaaaggtggcgcgttcagagttgtttgttcctccaggtgggtttgtggtctcgcttacttcaggagtgaagccgcagacctctgtagtgagtgttacagctcataaaggtagtacagacccaaagagtgagcagcagcaagatttattgtgaagagcgaaagaacaaagcatccacrgagtagaaggagacctgagccggttgccaccactggctggggtggccagcttctattcctttatttggccctgcccacaacctgctgattggtccgttttacagagtgctgattggtccattttacagagtgctgattgatgcattttatagagtgctgattggtgcatttacaatcctttagctagacacagagtgctgattggtgcatttacaatcctttagctagacacagagtgctgactggtgtgtttttccagagtactgattggtgcatttataatcctttagctagacacagagtgctgattggtgcatttttacagagtgctgattggtgcgtttacaatactttagctaggcagaaaagttctccaagtccccactggacccaagaagtccagctggcttcacctctcattatcattacagccagagtcacatgtatgtcctaagaaaactatatcctcatcatttggattttctctacccggtttttccagtgctgaagaaaggaagtggtttgcatgggttataggcaaaaaaagaaccaaagaatttgtgtttctccagtcctggaggaggaggagaactctaacctaatagccctaacactggccatctggacagaaatatccccaagctgaaattagtaattcatgtagctacctcagcttgatggaaatgtcttcaagcatctaaacccttttcgtgtacgttgaacttttttttttttttttttttttttttttttttttttttttttttttttgaaacggagtctcgctctgttgcacaggttggagtgcagtggcacgatcttggctcactgcaacctccacctcccgggttcaagcaattctcctgcctcagcctccgagtagctgggactgcaggcatgtgccaccacgccaggctaatttttttgtatttttagtagagacggggtttcaccgtgttagccaggatggtctcgatctcctgacctcgtgatgtgcccgcctcggcctctcaaagtgctgggtttacagatgtgagccaccgygcccggccaggttgaactttttaagttgggtttcttgagtggatccacccagtgasaggaagtgccttttgtagactgtactccatggttctccattgtgtgggtcgtctgttgaaattctgcatgtgcaaacactttgacaactgtaatatgttatataaatgttagaaatgattatggataaatttgcattatcacatataattaagtgaccatscattcacatttgtcttcaactgtggtttatacttgtcccagtctaatttcagagcattctcaaaaggatcttgttttaaacaacaaatcttatggtaacctgcttaaaaggaactcttgtgagtttgagtaacatgattctgatcctcacaaccaggaccagcaatgatggcagataratttcatctcargcactgactctagttgattaatggtggctgcagagagttttgtgttgagaaggattctggggaagagagtagctttgccaggaaagggtgctgtgacctacgatagcaagctggggtggggattggggtggggactgacagcatctagcttggactgatttactactaccaattttactactactcatatttaaatttactactacttggactagttacttctaccaaaggagaacccatctgtgaggccttgactgacacagccagctcatgctcagctttggcccacagctgcacaaatgttagattcagtagtaaggactatcccggttaaccccttaagcactttatgtgttatctgagttaatcctcacagtatgaggtactgtattgtcatcatccttattttataataagtctgagcttacagaagttatgtaatgtgttctaagttacacagatactatgcagtagagtggttgaagttctctgccttcctgcccacttgaaatgtggctattcggactacatttaaatgttaactaattaaaatgtaaatactatgtgtagctacrtatgcagtggagctctacatacttattttctccttgctttttcatgtaactgtgtcttgaagccctttccatatctatacataaagaacatcttcattcttttttatacttgtataatattgctgggtataggtatgcttttgtttaatcagtttcctcttgatggatattctaagagttctgcagtgaatagccttatactgaaccatctgcatatatgttggtggaagccagaacaatacatgagaaataatttagtcatgatttcttatttcatttttcactttgtaataagcaagtatgaggaaggtggacagtaacattccagctgtagagggcctagaaacataagcagaaaagagatttgtttgttctggattacctagcatgtctggtgtagagctcaggtttgaaagctgagattttgcattgttgagactctggtggatgtttggaaatggttttcagtaattctcattatccaggaatgcgggcaggggtgtatagtctttcagttgttatgtcaacagagaccaagtgccaggtggctgttagaatttgcactgcatggttctttccattatcaatagatgggcttgcagaatgtayttatctaaaaagtttgtgctaggatgtagaatatgcttgtttgaagcaccatggacagtttggttctctgccatccttgcttaagactggtggtccttaaaggcaatttgagactgtgacttagacattctccaggaccctgtgtgttgttctcctgagtgggcaggtagattctcctgctacctatgtctttgattccgatctgaattaatcactgaccattcctccattcactcagatgaacattgttcccatggtgtgtggggttgatagcatggctgaccaggtcatggatagccatttttgtacaggctgacagaggtgtggtccatcccaaactgctcctacttggctgctctgaaaacatattgaartaagtatcaactaaaatgagacttagggggcatctgtggatttcagttaaacctccatagcttctattttctggttggctaacaggccttgggacttgctgaaacttgtctgctttggattcggggtctgttaaaatatctaaatgggaatgatttaaaatcagaataaaaaaataaactaacacatgcctgtttgggaaaatttggaaaagataggcaagtatgaagaacacaataacatttgcttgtaaacttaccaacaagaaaggatgtattcatgcaacaaatgtttgtkgtgcatctactatgtcaacacttcaatgtgcatgtgaatctcttggggattgtgttacagagcagattctgattcagcaggtctggggtagggcctgaggttcagcatttctaacacgctctcagggatatattcactgctggtccacgaactgcacttttaataggatctgaccataggctgggtcttatgcttgttcttgtgtgttttcttgccatcctttttaagtgtgtatgtttttttaattgtgacaaaatacacataacataaaatttaccaccttaaccatttttaagcatacggtttagtagggttaagaatgttcacattgttcgtattgaaaacaatgaaaatattgaaaagaattagatctccagaattcttttcatcttgcaaatctgaaactctrtattcattaaacgacagttcctcaatccactctttccccagtccctggaaaccacgcttctactttctgtctctatgaatttgactactctaagtacctcatataagtagaattatacattatttatccttctgtgtctggcttatttcagttagcataatgtcttcaaggttcatccatgttgtaacgtatgtcagaatttcctttttaaggctggataatatcccattgcatgtgtagaccaccttttgcttatccatacatcagttgatggacacttgggttgcttccaccttttggcaattgtgaatagtgttgctatgaacatgggtgtacaaatacctctttgagaccctgctttcaattctttggggtatatacccagaaacagaattgcttgatcatatgttagttctatttttaattctttgagggactgccatttggttttccacagtggctgcagtattttacaaatctacaaacagtatacaagggtcctgatttctctgcatccttaccaacacttattattttctgtgtttttgatagtagccatctaagtggatctgaggtggtattatttattaattgcacacttgcaatcatatggtatgtacaattttacatcctttttgttaaatgtaacattctatcataagcattttcccctacagtttgaattttgatagaaagccttttcagtctccttcctctttgaagtgaagttgttcatattgatcttttttcctttgtggtttctttctttgattttaagcttagaaagcttccctatgtagagatcaaataacattcgccaagttgaatctatttttaaaatacttcatttttaacatttgcatctaatactctggcatttggttgttctttaaaagccctttgactgcaaagaattacgcaaaatgttaatagtggttctccctgggtggtgagattattcataatttttttcatgtattgctcttatgagtgaaaaagtacatgttatttaaaccacaaaggaccacscttttgcccatggaaccagcccgggtcagctctggaagagatgggggcatggaatgtggagaatctagctgatggtgtattcttcctggacctccgcttcctccatagtaaaaagaaggatggactgtagggtcctttctggcctcaaagaaattcatcaggtttttaggcccaacttgatagtgtcaacctaaaataatyaaaaaggtcagaatctagtttaaagagagtttaattaagtgcgaaggttaaaagtgagcctgccggcyggacacagtggctcacaactgtaatcccagcactttgggaggccgaggcaggcggatcacaaagagatcaagaccatgccagccaacatggtgaaaccctgtctctactaaaaatacaaaatttagttgggtgtggtggcgcgtgcctgtagtcccagctactggggagcctgaggcaggagaatcgcttgaacccaggagacggaggttgcagtgagtcaagatcgcaccactgtactccagcctggcgacagagtgagactctgtctcaaaaaaaacaaaaaacaaacaaacaaacaaaaacaagtgagcctgcccagaaagaacagattccaagaaatttgacagtgttcatatagaaaaagttcagggaaatttaataggatttcagcatgtttctatgtaaggcttaatgcatagttacaatgatctgattagtcaaggtggtctttytgagtggtgggggaggtatatttaacattccacacagcagatgtaaccatcattgggtcttggactgacgctatctggtgcgagttaggtacaggacaatgaaggaggcagttaatgtacaacaaagatcagcaattagaagcgggaagatctggtctctcctagtcatttacaatgaggaagtcaagaacagtggggaagagagtgaagcagaattgcaagcatgcaagttatacataacccagtctccaagccctaacttcccccttggcataataaatttagagggttctgaaatttttatttttatttaaaaacaggcgtccattccttggctgaagtagtacctccccagcctaattaaatactacacctttttagagagaaaggggtgagaaggctgtggacagagtgaatggcaaagggttagctggggctggaggcggggagggcattgccaagctgggggttaggacctcctgcaggcgggtgtccatccagctgggactcagggccgtagagcagaagggttaaaagggatactgtgggtaaggtatttgaaacagtgcctgacacctggtacgcaccaaattagtgctgtttttgcccaccccgtcccttccttgcctcttgcccctgccacgccattttctccaccttccctccctcctctttttctcctcccttagtctccctgatcctttccatttctcttgcactgtctcctcttctctccttcccttaacctgtctcctcttccttcttttctctcctctctggatgtgttggttctagataaaatctgtgcctattgttggccatgccacctgctatgagtgagctttgccccaggggccttactgctgccgggaaggtacccagcctcctccccgggtaaggcccactaagcctcagagctccgccctggctaggctttctttatatatatatttctctctatatatatttctctctatatatatttctctctatatatatwtctctctatatatatttctctctatatatatttctatgtatatatttctatatatatatttctatgtatatatttctatatatatatttctatatatatatttctatatatatttctatatatattatatatatttctatatatataatatawatatttctatatatatttctatgtgtatatttctatatatatatttatatatatatttctacatatatttctatatatatatttctatatatatatttctatatatatatatttctatatatatatatattttttttaggcagagttttgctcttttgccgaggctggagtkcagtggtgtgatttcagctcaccgcaacctctgcctcccagtttcaagtgagtctctgtcctcagccycctgaggagctgggattacaggcacgcgccaccacgcccggctaatttttgtatttttagcagagacggtgttttaccatgttggtcaggctggtcttgaactcctgacctcgtgatctgcccgccttggcctcccaaagtgctgggattacaggcgtgagccaccgtgcgcagcagcacagttacatttttttctgtgcttgttgaaacagcgtcagtctctgtttaccagtctccaagctccatgaggatggggacttgtctgcgttcattcccttgtgtcccttgcacccagcatggtgtctgaaattaatgggtgctcaataaatattttcaataaaagactctacactacaatagggcaaatatgaattagcagcaagtgcaggctttggagacactcagatctgggtttgaattgctaaccgtagatggacagcatgacttaggcaattcatttatgctctttgggcctcaatttcatcatctgtaaaatggggataatgtgcacctctcttatgggctgtaataaagattttttaaatgaaatcttatatgaagtacccatctactcaagttccttttaaattttatttgcatagcattacaggayttgtgaaatagtgtatactttaaggcctaagacttaagacaattcattatttcatgggtaatagaattttatacatctatgtraagacccaggactggccatcagcagacctgagtcctccaagttctgccttagctagtttttgacctttgctccgggggccttccttctgcctggaaggctccccaacctcctccccaggtaagacccacctggaggccatacctggtcgtaggatgcaaggtgaacatgactgagtctcatgcatcttaatctgcaagatgaagagtttgggtagggttaaacacatcatgcaggcagcacccttatggctttggctctatctgcttcatagctatagtattatttgattgctattctttctttaaaagtttatttttattcatttattttttggagacagggttgtgtgccattacccaggctggattgcggtggtatgatcatggcttactgcagccttgacctcctgggctcaactgatcctctcgcttcagcctcctgagtcgctaggactacaggtgcagccgccatgcccagctaattttttattttttgtagagacaggatctcagtatgttgcccaagctgtctcaaactcctgggctcaagaaatgctccctccttagcctcccagtgtgctgagattccaggtggaagccactgtgtccagcctaaatgtttactttaaaagacaacttcataccactatagtaaatatcacaagtagaaggtaacaacaacaaaacccagtagaatgaaaacaagacagtgttataaaattcttgccagatattactacctgccaaggctcagagtctgaggcctcttcagactttgtgaagaagggaaattagcacatgctggagagatggtaaccacttaatggcactgcagcgagacattctgcactcgctcaggaccatgagagttgaaaagggcatgagtgattcagtgtcatttggtttcrtgtgtatccctagtacccatttctcactttgggaagcactggattcgatcatagacctggaaggaaccttaaagattacctgacccccccatcattttgtagatggatgagctgagcctgatgtggaggtggctgctcgtgcccttgacccagccatgtgaagacctgtgccctcgattctcaaaatgcgggagtcgaaagacagacagacagatagatagatagatagatatgcaggagttgaaaaataggcaggcaggtagatagacagagagatagatatgcaggaattgaaadatagatagatagatagatagatagatagatagatagatagatagatagatagatagayagayagacagataagacccatgcctgactatgcttgtgtagtgttacagaaagcagctgagacatggagagtgccagcagtgtggccgcaggtccccaactatgacctgttcacatgcaaaccacctttgtggactgtagtcagtacttttattttaagctcagctctaatatatctatgtacatttttggactggccttctgttggccagtcacatttctttctttctttctttcttttttcccagacagagtcttcctctgtagcccaagctggaatacagtggcatgatctcggctcactgcaacctccgcctcctgagttcaagcgattctcctgcctcagcctcttgagtagctgggactacaggcgcacgccaccatgctcagctaattttttgtatttttagtagagacagggtttcaccatgttggccaggatggtctcaatctcctgaccttgtgatccacccgcctcggcctcccaaagtgctgggattacaggcgtgagccaccacccccggcccatttctttagaacagggtgtgccacttataagtagactctgttcccttcaaaaccctctggctcctccaaaacactttccttgctctatttcatccacaagaaaaatgaaactgctctttcacattggtcagaagaggtaacacttgggacaaatgcatctagtaccattccagaggcacaaaggaattttgggtgcgggttatactttttgattttttataaaccacacagataaaagtggacaacagagaaaatattgagttcaacatggagattgggctgggcgcagtggctcatgcctgtaatcctaacaccttgggaggccaaggtgggaggatcgtttgagcccaggagttcaagactagcctgggcaacatagagagatttcatctctacaaaaactttttaaaaaattagctgggcgtggtggcacacatgtagtccagctactcgaggggccagggatgattcccttgagcctgggaggtcaaggctgcagtgagccatgattgcaccactgcactccagcctggaggacagagcaagacattgtctcaaacaaacaaacagagagagtatgccaaagggggttaaaacaaaataaaatatagtgttttaagtcctggtcctcctcctccatgccctgcctccccgccacccttgccaaaaaaattactgtataaattatatatagagaacaaaactaggccttaaggtactaggatcattttgttcctctccatatgtgaatttaattccacagtccttccttcagcactgaacactaccgcagcccccaatccctcccaccacattgccaatccctgggtggcaaatccaacagcttggccaacaattcacttggagtggcctctagttgtgtcaaagatgctgtatttatgcatctatcagcttttgctgcaacacagcccactctcccctaactcagctgcttaaaataacaagcatttatgattgcttatgagttatggatcagctggtcaggctcactcatgtgtctgcagttagctgagtatttgggtggaaagcactgctgtgtctgctcttcccagccctgatttgcgaagctttttttgcttctcagcggggtttggtcttcctgagcaccatccttatgtcttctccctgcaccctgggttgggctgtccattatggttctcttaatagaaggttgagcctgggagacttgtcatggatcaacatgtattgcagttggttcctttgtattgaagtccactgcagtttacccttctaaccacatctgcttccactttcttccacctcttaccacacacagcatcatgaatgccttttagctatttatctctctgagcgggtggtaagcttttgagagcaaataacacattgcctttcccctgctgtattaccaccatctggcccaatgcattacgcatagtaggtgctcagtaaatatttgatgactgagataaatgagtgaatgactgaaattattgatgaaaccaggaatgaggtagaatgaggtcttgatgaccccccaagagtaaaataactggaattccccttattaattttttatcctgtcactttaagccccattgaatcccaaaggatgtacagacatggtctggagggcttagttcttaatggtaccaatgtttgtttaaattttcctaactctaggcaggtgtggtggcatgtgcctgtagtcccagccactcaggaggctgagttggaaggatcacytgagcccaggaggtcgaggctgcagtgaattgtgactgtgccactgcactccagcctgggtgacagagtgagatcctgtatcaataaattaaataaataaataaatacataaataaataaatattcccaactcattgcagcagatactacaggtttgcttctggttgcaaatgtttggcttccccaagaggcagctgtaaaggggaaagcaagtgtattccagtaagatcatggggagggattcctggttctgatttatttttccacttggtttactagacttagattcctggtgtctcatagtccctcgtcagttgatgctcagtcccccagaaccatacttgttctctatgaccttgtgaaagttacttgatgccagggaacactgtgaaccacagcctttatcttcctgtgagtacgtgagcagctgtttccaagattagaataaaggtggtagtgatggtgggagattcctggcctcccttctacaaagtgtcagtaggagaattagattaatgggtatttttctaataacctgtcctgctggcatagaataagaatttcacaggtacagctgcatagccttgatatctayagctattcttttgtgagggaggagggcatcagaattctaatcattgtgcagagcagtggctctcagccctggctgcacatcaagtcatcagggagctttaaaaagtacagatgcctgatcccaccacagaagtgccagttccgttggcctggggtgtggtctgggactcaggatttttaaatctcccgggtaactctgtgtgcagccaaagttgagaaccactggttcagtttatcccttctatgtcaggaaagggacaatatttataatctgttagaattacttgaaattttatggttgttaaagcatacaggtttatatgctgggatgtattatatttgggttagaataacagattcatccagggatgaaaataaatgtctccaacatgttctgcatccacttggccgcccccgccttttgttrtcaccccctactccatctcatcartttgtcttgagaataattgtgagaaaaagtagcaactgccctaacacatgaatttgcaagatgctctttactgcgttctctcatttgctcctcacrccaggaangtcatctaagaaacaaactgtttctcagttgaaagtccagaggggaaagctgacaggctcagctaggatcaagtgcccaccatggccccatcagcagcttctgtgagatggacacaggtgcctggtccaacctcctctgctgcggcaaccacgtgcagacctgcactgctgtcgggaggacagatgttaacaaatcagggtcattcttgtcccctgtaggaaagcctgtgggagactgagccgtcactagaacatgtttgctaaatagagatgcagagaaaagggagcttgggggccagaggccggcttggttgcagggcggagggagtgcaaagtactcaacaactgggccctgcgctctccctttgctcctcttctggaatccagtcaggttcttgtctttcctttgtgattctgctttgcacctgttgcagttcatcaagacacagtttatcttaccacaggtacatctcaatatcctttcaagaccttctagggtcattttcatgctttggggtggatttctcttctgcctgtgacgttgtcttccaagataggttgattcttactagtttcaaggggtggtgcattttgaccttaagccaaattctggtgctttcccagtcacaggcggtggtattccatgtgaaaacaactaagtttcaaatggcttggggctgatacacrtcacatcttgagtaggctcagtgtttgaatcagaatcaaaacacaagtcttctgaattttaatcaaacgctttttctctcccgcccaagtgagtttatgtttttcttttccacgatttcttttgtaggggttcagctgttgcaaaaataattggtaataaygtcaagaaacttcagaaatttgcctccacagtcaagatgtgggtctttgaagaaacagtgaatggcagaaaactgacagacatcataaataatgaccatgaaaatgtaaaatatcttcctggacacaagctgccagaaaatgtggtaagactttggggtgaaatgtacattggttcattctgcaagttgtgcttggctgagcagcacttgggttttggaactgggaaagctgcttcccttttccccagttcctttccactaccaattggttggttggttttggtcttcctgactctgaaaatgggtttcctattatgttgctaaggatgccttaacaaagtgccagactgggtaccttaaacaacagaaatttatcttttataattctagaggttttgagcatgagatcagggtgttgatagggttaatttcttctgaggcctctctccttggcttatagatagcatcttctgtattttcacatggtcttccctctaatcctgtctctgtcataatctcctcttataaagatagcagtcatattggataaagacccaccccaatgacttaagttaattacctcttttaagacactgtttccagatacagtcacattctgaggtacagcccataacaggtttcctccttggcattcaaagtgccagccacctctggaactaacaaacttgccttaggctgctcctgctccccaagtagctcctgctgtaccctaagtgcatgagatcagcttgctaggacagctaatacaatggtctgtaattaaagtcagggtcaaggcctaaattacagaaggagatagaagaaaatgggaaaatgtaagactgacagtttaaattcaagcttattaagtctgggagagaaaaatacaggttattgcctgacctccttctattgacttgcaggggaagaaagaaatgagcttggggagtgaaaagggtgtaccctgctgcttgtctgagtggaatttatgaacttcttctgttgtcagattcacccctttgtggctttctatcataatctctttgaaaaacagacagttgtggctgtctgattcctatggttaacccaagaagctcatctcctttgttaacgaaataccctttactgcatatattcactcaccaaaccttatgagcatgcactgtgcatgcaaagcaccgtgttgggtgctggggacagaaagaggaataagacagtgttgctttcctcaaggaactgagcgggggagaccgatctctaaatcaataaatgtggggaagttttagttacagtgttcgttagtgtcaagcactgtgctaagcaatacatttagtctcatttaatcctctcaataaccctcttaggctgatactactggttttcctattagggtgattattttgattatatagtggaggaaaccaagactcaaagaggctaatgaacttgtccagggtcacacagctgagggctacggttcagattgattcctggtggacgcatccctgagcatgcygaatctgttgccttctagacagtgatgactttctgctctggacttgggtgagccagcatttccctacagttattcttggtgtagttggtgggggaagaagaacctttagagttgtgagcttagaagttaagttgtccaaatatctgctggagagaataaaagaggtagctcttccccctgcaatggaaggcctgtggggtcatctctaatccattcttggggcagatcattcttttgagcttcacttttctcatttttatcagaattggttgccccttccctttggtaaactacatgcttcattgttacattcctcccaccctgcctggcgccagtcccttgtgtacctgtctgtctacctccacgtgccctcagtgtgtgaccttgctttctggttcttcattcacccacagtccctagcacagtgcttttcctacagtggatatttgaggaatgttgggggaagtgaatctgctgagtggttctgtgaagctggagcctgtgctgcgaacagggagagtgggagggaaggaatcgacatagaggagttgagagagcctgccccccacttgactgactccaccacccacccctggtcactgggtgtggacagaggcaggagaattcactcccagaaccctgttgttgtctgatagatctctcaaacctattcttcctgtttaagtgaaatttttgaccaatatgtccccagtccctcaccctccagcctcaggtagccacctaaaagtacagtttttaatcattgtttttctttccaattcaagcaggagaggtttgttgcrtttccgtcaacacaagctcactgtttatgctgtcatttgatgtgctgacttcagactgagccttttctgtgtgagaccctcaaactgctgccaacgtgacccttccccaggtccacactcatcatgtggcccctcccacataggagccttctgttacagtgacttcaccatgtcattgcctgctcactaaaagctgagcccgtctggatttgcgatttccctttagatccgaatgaaaagaatgctcattattttctgaaggccggttgcggtggctcacacctgtaatcccagcactttgggaccgagcgcagtggctcatgcctgtaatcccagcactttgggaggctgaggggggyggatcacttgaggtcaggagctcgagaccaccctggccaacatggcaaaacctcatctctactaaaaaaagaaaaattagccgggtgtagtggtgcacacctgtaatcccggctatactcgggaggctgaggcaggagaattgcctgaacccaggaggcggaagttgcagtgagacgagattgccccgctgcactccagcctgggcaacagagcaagactccatctaaaaaaaaaatagaatgctccgtttaaaaaaaaaaagaatgctcattattttctgtaattgcaaaatggttgatcctgttttctagctctatttccagagcctgtgtttggagctcatcaaggtagaggattcttttgcttccctgttccagcttcagccagtgacaccaggatttagattccagcacccccatgaaatatagttgccgttgcctctcatctcctgcctcctttttaaaaaactgcttcactgagatataatccacagaccatacaattcagtggcttttttcgtatatttacatagctgtgcagccatcactgccatcaattttaacacattttcatcaccttgaaaagaaacttgtaccctttcatagtcacctcctgttttccccagttgtcccacagccctaggtgactactaatctactttctatctctatagatttacctgttctccatatttcatgtaaattgcgtcttacaatatgcggtcttctgtgactggcttctttcactttgcataatgctgtgaagctccatccatgttgtagcatgtatcaatacttcgttcctttttatggctgaatacgatcctgttgtatggatgtcccacattttgtttacccattcattggttgatggtcatttgagctgtttccactctttgggtattatgaataatacctttatgtacaatgtgaacctttatatacaatgttttgtatgaacatatgttttcatttcttttgtgtgtatacctaggagtagagttaactttttgaggaactgccagactgttttacaaagtggctgtaccattttacattcctatcaacagtgtgtgaatgttccagtttcttcacattctcaccagtgcttgctgttatctgactttttaatcctagcgagtatctcattcatggttttgattttcatttgcctgatggctaaccatgttgagcatcttgtgcttattgtcacttgtatatctttggagaaatgtgtattcaaatcctttgtccatttaaaaaatggattgtctttttattattgagttatacaaattctttatatattctagatacaggtcccctttctccacaagtattttctcctgttctgtgggttttctttttacttgcttgatggtatcctttgaagcacaaaagtttttaattatgaagtccaatgtttacctttttactctgctgtgaactctttgagtatagtttcttgcataggtctttattcactaatgtctcctcagcacctggaatagtgcctggcattatttgtggtttgaataaatgccaaggatagtggaagtggtgaggaagaacaaaccaggatgaagagttttgtttcagtgctttttaggtggtatcacatgggaaataagtttagggcaagacttaaaaaaaaattaatcatttacatttggatactagggttggggtaatacctattaatttttgctgaaagccttctgaaaattaaaatatcagttcagtgcgaagcctcagtgttactcctttcctccctgggtttaactctttgatttcattagaggagtagttttccctggtgatcttcaaattttagtgttcatcagatcactgggagagcttcccagggatatgtgggcccactcctatagtttctgattcagtaggtttcaggtgcggtccctgaatgtgcatttctcacaagttcccaggtaatggggatgctgttggttcaggagccatgctttgggaaccatgggggtacataataaattgatattattggtgttgtactggggaatccaggcgatggatagctatttttccagaagtagccttacttaccagcagtggcatgtttacataagaatcatcagataaggtcctctgtctgagggtcatgtttctgcatgtagagccaagtatgtgaatttcacctgagatcttggctgcaagtgagatgaagagacagaggaaaattacgctatttttgagcctctactatgtcccaagtatgacactgctatgtgttttactcctggtattgtcttgaatctgagtacacacatcccccagataatgtaggtgagttgccatggtgtccggttagctgactggcattagagcccggccacgatgctccgtgcagccacggcagctggaccgttgttaaaccacaccattctcattaggaaccagaattgtttcagcatgtagattcatacagacttgaagtagacataactagtggccctaagagattagataaaaatgagaacagccttggtatcttttatttggcttatccttgttttatctgtcattactatgatgttgctacaaaaaggtttgtagtaagattcatggattttagggggaaaagtcttcatttgaataacaggaaaattcttataatactatattaaaaagatataaaatattactttaattctataaatacaattttagacattgctgtaggctcgaaaagaccttggaaggagtgtaccaaaatattgatagtgattatttctgggaacagcagggagaagctgttcttattttcctacttagagattttttcttcagatttgatccagcgagcctatttatagtcatgaatgaatggagaaagcattttagtcctaattggttttaaagaccataaaatagcatctttggagggtgaggagatcagtctgtgatgatgaaagtgaggtctttttcttgcccactctgatggctgcagataagatgttgctaacaggtaaaagctcattgagcacacactgtggacagtgatggtggatccaggaagtacgaaagaaccttcagacttgtccacacagacttcaccagctttgtttccaatggtttttatttattattaggtttttattaacttagactaagagcactgggctcctgaaagtctgggcattaagcaaaccagccctgatgccttcgttctgggttgtttgtcctacttgccattgaaaggcaagacctgttgttctgagttttgcttcccagcatatttcagaatctggaacgatggacaccttcagagttttggcaggaggctcacaaaatcagtcaccatttccaaagcagctcctgattattttcagagcagaaaatcgggtaggggcttagcaaaaggttttattctgaaagatgagattcacatgatctcattagctgataagaacttgttctgatacggtgtaagaggaataatgttctgtgaatggaccatgcacaccataaaaatacagctcacattgtacacgttgcttctgtgggttaaaccctaagtattccaccaaggagaataagccccaaccacattgtcctagagaccatcacattccctaccacctgcaggttcctctttgatttattaagaaggaaatgtaagagacagaagaaatcctggccagctagcagattccttgagaatggtttgtttgtttgcttgtgacagggcctcactctgtccccaaggctggagtacagtggtgcaatcacaactttttgcagcctcgacctcctgggctcaagtgatcctcccacctcaacttcccaagtagctgggaccacaggcactcgccaccacacctggttaattttttttattttttgtaaagatgaagtcgcactgtgttgcttaggctggtcttgagctcctgggctcaagcagtcctcccacctcagcctcccaaaagtgttgggattatggcatgagccactgagcctggctggggatgtattttagcaagagacatgggaataggccgatttcttaaaagttaaggatttgcaagacacgggtagatttttctgatgaatacgctttcatttgttaaggtctttgtagtttcaaaacattgycactcatattacttaattggaaagggttctgtgaggtagccagatcggaaaggtaatttttatctctattttacatatggagtgactgaggtcgatgaagctgagtagcttgccagaggtcacacagctggtcagttgcagatgtgcaacccagaccttcaaacctatattttttctctttggttctggtgttttttccacttcaccatgttgaaaatgcccyaaagggggaaagggaggaatgtgtatgtgttagaggtggatggggaagrggagaaacagtaggtccagaggaataggttttaattaaaagtcaggyggccaggctccatatgaaccagggagtagggtgcataaatgyccatctgagcaaggccagtgttgaaggggaaggagtgatcggagttcttgtgaaggccgtgggaagatgggtgggacacaggcaaacacatgagaacaaaacaatgagctttgccaataaacgacacacaggccaattgtgggttggcatcgagagggttgtttttttgtttgttttgttttgttttttttgagacagagtcttgctctgtcgcccaggctggagtgcagtggcacgatcttggctcactgcaacctccccatcccaggttcaagtgattctcatgcctcagcctcctaagtagctgggattacaggtgtgcaccaccacacctggctaatttttatatttttagtagagatggggttttgccatgttggccaggctggtttcaaactcttggcctcaagcgatccacccacctcagcctccccaagtgctgggattattacaggcatgagcatggcgcccagccttcatcgggagattaatgcaawagaatcagaaaatgctttgttggagggggtggagtctccaggtgggagaggaataatgtagcaggtggatttttttaataaatcttcaccacttgtggactacctagcctagattaccaatctggagaagccctttcaagaggaaaataggcaaataggccttccctgcctttggatctgccactaacggtggagaagtgctgagctttgggttttgatctgctctatggggagtgactctaggttgtcattcaaatcagcttaaagctaaatgttttggctcttgtaactaaagatccaggcagtgctggcttcaggtgtagcctgaaccagcaggttacatgatattaacagggccctgtttttccctctgttcccctgctttgccatccgcaaagttggcttcatccacatggtagccccgtggcgtaggttctcccctcacatttgtaaacatggttgcagtagttccagacttcacagcagcatcccacactgttcaaggaaagacattgttcaggctactcytgaagaataaggaagcatctgtttcccagaagacatctactggtttcttgttggctctgattgtttaatgtgcccattagcttgaacaagttaagaaccacccctgaaatggggtaggggccaattccacccaaatggcatggataaaatggggaagttgtagcttttgaaaggaagtttaaggaaacttctagaaagaaggggaatggaggctaggcaataaattatggaagtcctccacacctcctgaagggataagggaattaaacttcagatacattttctttggggaatcctttgtgtgagggagtaactcttagcacaggcattagtcaaggtaataggctaagatactgcaaaagacataataatgtgacaaagaacaagagacttgtcttcctctcacatagaaatactccagtggtttgctttacactattattcttggtcccatgttttttgtttttttttcccctgtaccatctcctaagccttgtaaccctcagtgtgatcaaggctaagttaccaaggttttcagctcacagaaagggggaagagaaagtgtagaggaggcaacccactgtcttgagggctctgggctgtcagtggaaaccacttctccctctcacatccaacaatgagaacttggtccatggccatgtgtagctgcaaggactgctgggaaacacagtccctggctagatgactagcgaccagcttacaggtctgtgattatagagaaaggggagaaggaattttggctgggagttggcaatctccatcacaacccccaaactaggtttcctcagaggctggcccattccgaatgatgttcctgtgacagacacgatttcctcagagaagaatcttcatccaaggcctttcattttgggaaccaggaatgcttaatggggactaagtcagttatagttaggtttaaatacatatgacagaaaacctaaaataacagtggtctaagcaaggtaaatgtttgtgcatttttctctaatgtaaagacatttgtggttggtgtagcatcatggtggcagagacttgtttgattccactgttctgccatctcggcatgtgctgtcctccttctgctctaagatgactgtctgaatttccgccatgccttcacattcccactggcaaaaggaaggagaaggaccttccaggacattttctagaagtcacaggcagcacttccattgatgctcccttgatcagaactcagtcacatggtacacgtagctgcaaggagcacagggaaacatagccttctttgctggcattcaggagcccagcttgaaactaggggttctaatgctgaggaataaggaagaacagatactaggtgcagcaagaagcctttgccagagaccatgtgccctggagtccgcacggcatgccttcacttctgccgtgttaaactaatcttcacccttaaggaaagaaatcgtcataatagctgacatgtgttgagtgtatatcaagtcccaggcagttttctatatcatttagtcctcacagtggcactctcaaaggagagtttagtgtgggatcatttacagaggggccatggggtcgagggaatcaacaggggttggtgaagtgctcggagattagcaacagcaggaagccattaccacccctaaaagggtcagggaaagaacatgtcaccagcctgaagagggcttagagacatggccttagaaaggggctgcctggcagcagggacagctgtggaatgaagccaagccagaaacactgtgagcctaggcagaagtggcccgaggaggctgataaatacccttgacctgtctctcctcccatcctttgatctcctgacaatgcctcccattggctgaagcccactggaagccagagaacaagggagcctggggaaatagtttagagaaagcagcctcctgagaacagaatggggcagagaagagcggaaaatggatgagggggctggtgaggtgggagagcaacagagagcaacccacatagtgttattagaggtgccttttgcagataaggcagttgaggggtggagaggataactcacctgcccagctggtgacagaggcaaaccctctgcttcagacccccataaggaataaggaaggcaaagcaaacacacttgccttccttgtctatctgtgcaatgctctgcacatagtaggcatctgataaatggtcagtgagtgaaaccttgtggacaggcaaggtttsatataagaggagaaacggtcttctctgccttttggttgcaggttgccatgtcaaatcttagcgaggctgtgcaggatgcagacctgctggtgtttgtcattccccaccagttcattcacagaatctgtgatgagatcactgggagagtgcccaagaaagcgctgggaatcaccctcatcaaggtaactcragtgcatgctgcccagggctagacattggttatcaggaaatttcatttcctcacactttcatctgcttgagatttggagctgaaggggaagttgtggcggtttttcgtttgtgttcttaaagatgctcaaaagtcataaaaaaaataagactagtttagctcagattgagagtgggctgctttccattgcagcagactagcagcagcagtgatgtgaagagctgtgccgccccttccagtccactctcggggctcagcctgccatctggaaagcaccagcagtttgaattagctgggaaattaataaccattagtgcccattcttggatatataccctaaagcatgtgtttttaaccagaactccatgaaccacctctgaaggtccacaggttgaatacaggaagttsatgcatttaaatgtggtggaaaaaaatccttgcattctaactcattttaacctctaagtgaaatgagcattctcttcatttatgaatgcagctcacagccaaagtttcagtaatagcagtattagcaggatctgagaccttgtcaataggagtcgcagggctttcatttcagtttacacctttttctgatatctcaaggtatcatttatactcatcactacttggaaattgtggtaattgttagacctgccatgatatctttttctaattgcattaataaaacagtgcatatattmctttatcataaatttgttttttaaacaaatttcaacataattggattcctgggttattttaggtgttttgttttatgcatatgaaattctgagaatgagtccataaacttcaccagactaccaggggtaaggcccatgtcgttggaaagattaagaactcccaagagaggctgtgccagagcatttacagatgaatgttcatgaaggcaaaccagagcaacccaaatgtcatcagcaagagagtagacaaatgaaatgtgaactattcattttggaatactgtgcagtaagtgaacagaaacgaaccagaagtttgatgcagccacatgagtgaatctctaaaacggtattgtagttcaagacagcacatcacaggtgaatggcacaactctctttatagacttgaaaccccagggataatgacgtataacattgtctagggaccatccgatgtggtaaaatagtcaagaaragcaagggagcaatgcatacagcattcaggacagtggttcaccctggggagcaggggtagaaggaggatgaacttgagaggagacacacaggggacttcagtggtgtcagtcacgttctatttcttaacacgagtgatgagtacatgtttattttcttcatttgattcttctttaagctgtacataggcagtatagatgcttttactcttgtaagtaggagacatttttcaagttgtgtagccatgggacatctactatcccatgcctctttgatttgrcggtttgttctctcctaacttcttggcatccttgtagggcatagacgagggccccgaggggctgaarctcatttctgayatcatccgtgagaagatgggtattgacatcagtgtgctgatgggagccaacattgccaatgaggtggctgcagagaagttctgtgagaccaccatcggtaagcactgcctgggagggaccccaggagtctggacatttgatgtttgaacatgtacatattccatttctgatattttctgtaatagactcttccctgtccctcttaacattccttagttgggcattcagtggggcgagggttttacttaaggaggctattttgtggaactgaagtgtttcaacaacctccagaatgaatataaatgaatatagccaagaagagcattctgacttgctgtgatccaataatgaattactgaggttaaacacaaaagtgcaaggttgcttgtaccaagaaacaggtggctacatccatggtaggggtcccctggcctcagaagcccaaattttcttttcttacaaatgttagtatctggatcctcattgattccagtgagatctaaaaattggttgaatgacccccattttcaggtgaatgataagactcagagaataaattacctgccccaagatcacacactaatgtagaagccaggaacaaatttgagtcttctgtttcckgaactagtaagccttttctactcttacacattatacattagatacattattctcacattgacgttatgaaaattttcatttcttttgaaaggggctttgagaattctcaagtgtccgtgtactatattaaacgatgctttgttggaagagtaatattattgtattttcagatgctttgcaaaagtttatctaccactgcagaacttactttcacccttatcaaacctgcaagcaatatgaatcatttccccttggcagctttgtaaaaggaagctctgagagatgtcaggctctcttgcatgagatgaatgcgcaggaaaatgtagctccagattcttatacctgcctatacgtaggactttttaggatttttttggaattttctaccttaatttttatttttaattatggaggtattttacatgattattatggaagatagagataatcaaaagaaagccattttaaatttttgataattttgttatatatccttttttwctatttgtatgaactattatgtttgtagtgaatcatatgctgtttaataattgctttattcgctgaatatgtaacaaaaacctttcagagtctgttaacatactgtacatcctcataactgcatagcattccatcagcaattccatatatttggatacaaaacttttttttgaaaaataatatttgttggagaggagaagtatcacaaataatacaaagaagaaaagaatagcctatgataccacctgcccaggttgtcatttacraaagtgatacagacacaggtttaaaaaaaaattcaagcaccatgagaaggtggaaaagtagaactaagattgtaatttcccacccatttccctcttcccagagggaatcactgttagcagtttcttttttgttttttataattgcaacttttattttagattcgggggtacatgtgcaggtttgttacatgggtgtattgcatgatgctgaggtctgggttatgactaatcctgtcacccaggtagtgagcatagtaccccacaggtagtttttcaatccttccctcctttctctcctctctagtagtccccagtatctgttgttgctatctttatgttcatgggtacccaatgtttarccctcacttgtaagtgagaacatgcagtatttggttttctgttcctatgttaactcacttaggataatggcttccagctgcatccatgctgcaaaggacatgattttctttttttttttttgagatggagtctcaccctgtcgccaggcttgagcgcagtggtgctatcttggctcactgcaacctccaattccctggttcaagcgattctcctgcctcagcctcccaagtagctggaattacaggcatgcgccaccacgcccagctaatttttgtatttttggtrgagacagggtttcaccatgttggccaggatggtcttgatctcctgacctcatgatccacctgcctcaacctcccaaagtgctgggattacagatgtgagccaccgcgcccggctgatttcattcttttttaatggcttttactattagcagtttctaaatattcttctggaaaaaatttatttatatttgtatgctagtatgtacatatatgaatatgtcttattcttttacagtaaattcttttatttatctgcagttttaatatagcctgtgaaattgttatgtaattacttatattttcccaaaaagattaactagtttgttccaactcaatcctatttgccaataatcctttccyagttcattctggaagactaaatcttaatctgcaatcccaatccctgatccaatcctggctaggactctagccctgtttgttgtaggaaagtttctagttgggtacattaggcttttttggttttaaaaaacagataaaagcacataagttgcatttctttccctctggcatttctttacccggtgcttctatgccttctctgtggggtggagtgtgataagcactgatgacctgaattaaattaagtaaagcatttctgggtggagtagctctcgtgaggctaaagccgaggatcttctgaggccaagagtttgaaatcaccctgggaaatgtagctgggagtttccaaaaaagaaaaaaaaawwttttttaattagcctggtatggtagtacatacctgtagtcccagctactcaggagactgctgtgggaggatcaccttgaggctaggagattgagcgaggctgtagtcactgcagtggctatgatcacgtcattgcactcctgcctgggtgacagcaataccctgtctctttaaaaaaaaaaaatttaagtaaaacattgaaagtaagatagaatatgaaagtgatgtttaaaaattgttttatataacctgaattaattaatttttaaaagtagagtcttgttcgaattcctggcctcatgggatcctcctgcctcagcctgctgatgtaccgggattacaggtgcgagccactgtgcccagcctataacctgaatttaatcatgagaaaatatcagacaagcccaaagtaagagatatgttataaaacaacaggccaatggtatctttgactcttcaaaaaagtcagtgtcatgaaagacaatgaaaggctaaaggagtgtcccagaataaaaaggactaaagatatattaccgagccaggcgtggtgactcacacttattatcttagcactttgggaggccaaggtgggagatcacttgggcctaggagtttgagaccagcctgggcaacataatgagatcccatctctacaaaaaatacaaaaattagccaggtgtggtggcgcacacctgtaatcccagcactttgggaggctgaggcgggcggatcacctgaagttaggagtttgagaccagccttgtcaacatgacaagcgaaacctcatctttactaaaaatacaaaaattagccaggtgtggtggtgcacgcctatggtcccaggtactcgagagcctgagatgagaggattgcttcagcgtgggaggtggaggctgcaatgagcagtgatcgcaccatggcactccagcctgggtgacagagcaagaccttgtctctaaaaatcaaaaaggagacatgagcactawgtgcagtgtggggtcctggattaggcagggagggttgctgtggaagacaatgcagaggtgattggtgaggtttgaatgtggattatatgttagataataatattatgtaaacattacattttctgtatttgatcattgcagtgtggttatccagacatcctttgttgatgcatagggactattttaaattgcggtaggttcaggaatcgtggcccacttgaatcttctgtggagggaaaagatagggcagcttcaggcctcaaaatcctgtcatggtgaactacagtgccctcttgtggtaaggtctcctttcgttcttggggcataccacagactctgaggcttttaatccagtcattccacaaatatttttcaaaccctcttatgtatcaggcatggtgccaaatgtctagaatacataagctccttatggaacttgtaagcacacaaacacatatggaatcacaaactaaaataagggttttgaaggagttttattacataggttaattgcctctaaaacttggtgtgacagagaaaggggattttcctgtctttggtttacattgagttttgggcaaccttcccacatggctgtccggcattagctgttctgtacagatgccctgagtccctgcttgccatgtcactgtttattactggggtttgttgttgttgttgttgttgtttttgagatggagtctcacgctgttgcccaggctggagtgcagtggcgtgatctcggctcacagcaacctccgccccctgggctcaaatgattctaatgcctcagcctcctgagtagctgggaacacacacacacacacacacacacacacacaccaccacgccaggctaatttttgaattttttgtagagatgggatttcgccatgctgaccaggctggtctcgaactcctgacctcaagtaatccacttacctgagcctcccaaagtgctgggattacaggcatgagccaccgcgctggcttatgactggtattatattaataataaaattcgcgggccgggtgcggtggctcatgcctttaatcccagcacttgggaaggccaaggcaggtggattgctggaggtcaggagttcgagaccagcctggccaacatggcgaaaccccatctttactaaaaatacaaaacttagccgagtatggtggcgcatgcctatagttgcagctactcaggaggctgaggcgggagaatcgcttgagcttgggaggtggaggttgcagtgagctgagatagtgccactgcactctagcctgggcaacacagcaactctgtctcataaataaataaataaagttactacctattatccatgatttaaggtaataaattttaaaaggtacctttgagaaaatatgagattgctrtaaatcaagcccacctcttggatgggcattgcgttatttgcagccacaaaggaacccatagaccctaccttgtatctatggcaagccaagagtgtgccttcccctgcccattcctcagtttgttcaccagcaacccaagtttccagctgcagatggctggattaaagtgacttgagggrggggctggtctgcaatgttcaggagcatgcttcatgttggaggcactgagcagtgggaggagacacgatgaggctgtaatatgatgtaggggccaggggctggtttacccaacccagatgatgcaacagtgttgcacagagtcacctagacagcctggtggactgtttaaaaaggaagakaacagtttgcacaaactgacatagttctaacatttggaaaaggggaactcagctaaatgaaagaacagtaatgctacagagtagactgtgtttctaagtattgggtgtagatattgtgttttattatgaaacttttcagaaaagtagagtagtatcacgaacctcacatgcccgtcacccatctttagaaatgattaactcctggccagtctcatttcatccactccccaccctctctcaaccctcagatggcctggattattttgacattgtgtcacttcttggtgtagttttacttgttgacaatcatgcttttttctttttttttttttttttttttgagacagagtctcgctctgttgcccaggatggagtgcagtggtgagatctcagctcactacagcctccacctcctgggttcaagcgatgctcctgcctcaacctcctgagkagctgggaccacaggtacgtgccaccacgcccagctaattttttgtatttttagtagagatggggtttcaccatgttagccaggatggcttcaatctcttgacctcgtgatctgcccgcctcagcctcccaaagtgctgggattacaggtgtgagtcatcgtgtctggccaaraaaaactttagattcacattcggtcagttaaaaatgtatgtcaaattgtaaatgatcacctckattggaaacgggatatttttactttatttctgctcctatgtgttttctaaatatcctatcatraacatgttacttttatagtaagtagaaacttattttaaagtgtattaggtgtgaaaattaagattagaggctgttattaatatccttgttgtctaacctttcaacaggcagcaaagtaatggagaacggccttytcttcaaagaacttctgcagactccaaattttcgaattaccgtggttgatgatgcagacactgttgaactctgtggtgcgcttaaggtaaagtcagcctcaggggaggagttcatcaagcaaggcaaatgttagcatcattgagtctaatcctcaagaatgggctctgtgttctgtgcacccacatcagcgaagaatagtgaattgagagtcttgtttataacttcctgttttgctgcagcctttcccgggtggttcagttcctctcttactcgtggcttgctttaacttgtaaatatgggggaattgtgatgttttggtctttgggaagttggcagcattgatatttggaaagcatgggagttccttgatgacagggtttcacccaggagcaaatgattctattcattcatgtttttctcccacacttcatcctgagcaggaaaaggaacttgtttcctctgaattatgctactctactagtttggctggttgttcttattaagggaaaaaataatctgctgctggtagaggtttttctaagaatagttttgtctttgccctcaagagagagaagatgtgattaaagaaatgcactccactggccagtggcttgctggatttttgtaagtggaactgtacagtatgcactcttttgtgtccggcttctttgattggaggtgtatttttgtttgttttaatgtaaattttaagaggtacttcatacagaaaagtacaaaaatcataagtatgtagtttatgttatctttttttcccctcttttgaggtaaagggaggtctccacacctgggctcctgacttgttggctgctgtcttttaaagccttaggcactgtccctctctctgccgtgacttgggggaacaaccaacagggaacagcagcagctacctgctcattccccctcactatctaagttgcctttatttcactatcatctacaaaaaagagtggggggaataggggaaataaaaagttctcaatgtgaatgccccttttgagccacttctgagtcatctcttttgcagcaaaaagccacccttcagaaatttgagcatctagggaagaggttaggcaatccaccagtcayctgtctttattggatgggagttgcaaaggtggaaagaatgccygtctatgctttctcataaattgtatatgtttttttctagtcagaagttaaaaccactctctagaattaacattgtgtatatatgtgtggtcatgatatayaatgagcatttaaaaaaattaaagccaattaaaggcctgggctcctagggagcacacatgcatatttctaagcgcctgtgtggggcattctttgcattagcattacattacatgcaggcccagttatacatgtaagacgctgactttggctgctttgtttatttttgttggttgagatttttatgtgtttttaatagtccttcattaaactaattaccactcaacagcagggggcatcgtgaatgcctaattgctcagtgctggcctgagctgctccaaagctgttttcaagtgactggatgtttttggtggtcatggagaagctgtgaaaccctgcccagagcaaagagtgctgggtgagaagaaggagtctagattgaggtgagggctttggaaaagcttctgctaaygggaacccatgctggtcttgtgtctgaacttagaatggctttcatttttgctggcaggaagactgtaagtggatgtgccagctaccttgatggaaagggattcatgggggatgcagggaggtgggggttgaaggcccttaatcatcctccctgcaacttcccacacaatcttttaaaacgagatcagttaccatcattcctgggggtttgcatcagagttaaaatttttgaaaactgagaaacaggcacttgtagcaattattaactccaaccattgtcttgcacagataaggaaatcgagatccaaagagcaaatgactttagggtagcaaacactggcacactcggagcgtgaacacgggttttaagactctcagcccagtttctttggttactgtgtaccacttgacttttctggttagtaatcaggcagcatgaatgaaacgaagccctctctcatcagagcctgccagagcaaggacacatggccgtatgttgctttcatcacataaataacagtgatgggtttttccccccgactataacacagtcatattccttgttttcacacaacagaaaggtgtaaagaaggaagtaaaaatcaaatcactgacaatcctacatcctgaaataacctcagttaatgtttgttgtatacccttccaatgtttttagtgtgtacmtatgtgtatgggtcctttttaaaacaaaaactagatattagtgttcaagtagtttgattttgtgtgtgtgtgttttgtttgtttttgagacaaggtctcgctgtgctgcccagactgagtgcagtggcacaatcatggctcattgcaacctcagcctcccaagctcaagctgtcctcccacctctgcctcctgagtagctgggactacaggcacatgctgccatgcccgactaattttgtttattttttgtagagatggggcctcgctgtgttgttcaggctggtcttgaacttgtgaactcaagcagtcttcccacctcrgactcccaaagtgctgggattacaggcatgwcccaccacatccagccattgatgtgttttacttttttacgttaacaatctttagtaatattctccatactagccaatttacaaaatgtacattatcttttttgtactcaaaaatgtggagcatttgacttactaggaaaaatgtgaaaacaactctctacaaggataaaatagaaaattcaaaggatttatgcataatcattttgtaccagtgcctcttactaccttcggaatgtccttcatgaactcttagctgtattcatctcttagtaaggatatatccttttttaaaaatcaactttaagtgtaattcatgtaattaggccaggcatggtggctcacacctgtaatcccagcacttgtggaggccaaggcgggtggatcacgtgagtatgggagtcttagaccagtctggccaatagggcgaaaccgcatctctactaaaaaatacaaaaattagctgggcgtggtggtgtgtgcctgtaatcccagctactcgggaggctgaggcacgagaatcacttgaatctgggaggcagaggctgcagtgagccaagatcgtgccactgcactccagcctgggcgacagagtgagactccgtctcaaaaaaaaaaaaaaatgtaattcatgtaatcaaactgcatctatttagagtttataataccatgggttttgagagttgtgtgcatgcacttgcgaaaaccactaccaaagtacacaacatttccattatccccaaacaactccacatgtccctttgaggttcctcatcaccccagcctccagttgggcagtcagctgatctgcttttatatgccatcgtttgcattttctaggatttttataagtggaactgtacagtatgcactcttttgtgtctggcttctttgattggaggtgtattttttgtttgttttaatataaattttaagaggtacttcatatagaaaagtacaaaaatcataagtatattgtttaatctatgttatcttttttttcccctctgagagaggtcttgtgttccttggctcaagctgttttcctgcctcagcctcccaagtagctgggattataggtatgcaccacagcgcctgatttatgttattgttttytgtgtttttaaatagtctagtggtcttttttttcttaacaacttttttttttttttgagacagagtcttgcccaggctggagtgcagtggtgtgatctcagcttaytgcaacctctgccttccaggttcaaggaattctcatgcctcagcctcccaagtagctgggattacaggtgcattccaccacacccagttaatttttgtatttttagtagagatagggttttgccatgttggccaggctgtagctggccaacagatgtattacatctgtaatgtacgttttgtaattggctactatggagaatattactaaagatsattaatgttaaaaaagtgaaactcatcaatggctggacgtcgtgggtcatccttgtaatcccagcastttgggaggccgaggtgggaagactgcttgagtccacgagttcaagaccagcctggacaacacagtgagaccccccgcatctctacaaaaaataaacaaaattagtcagacgtggtggcttgtgcctgtagtcccagctactcgaactcctggcctcaagtgatccgcctgcctcagcttcccaaagtgctggggttacatgcgtgagccatcacacccagcctatttttcacacctattatgcatgaattcatagagaataagtcccagcagctcaggctccttcccrctggttcccacaaagtgcgcttctctgggtggagcaggctggtacttcagtctaatccaggtacctttctctttggcttccttctttttctgatcattttccttcatgtgtttcaggaagctatctcagctcttagcttaatatgctccatacacccattaattcttggcaagaatcttgcccttaacttgtttaccacaatgccagcagcatgctgggtaacattgtagactcttccagtttagccatggtgacacttgtggggcattcctttttgaacagtgaccattcccctgatgtctacaatatcatctttttttaaaaaaaggttttttagcttatgtatttattttttattttttttgagacagggtctcactctgttgcccaggctggagtgcagtggcacaatctcagctcagtgcaacctctgcctcctgggctcaagtgatcctcccgcctcagccttctgagtaactgggactataggtgcttgccaccatgcctgctaatttttgtattttttgtggagacagagtttcaccatgttgcccagtctgatctcaaactcctggactcaagtgatccatcagccttggcctcccaacgtgctaggattatagacctgagccaccacaccctgccaatatcacctttctgatagattcacatatatgtggccaaaggagcaacttcatgctttctaaaaggcctggagaacatatgtcaggtacttctctcctctttcccttttgtattcatcattttggtaaattactggaagatggcgattctggccagaaggctatcatttttaatagattctttatcaggattgagtttcattaacagagacccaaaataatacaggttgagtatctcttatctaaaatacttgtgaccagaagtgttttggattttggattttttcttttttggaatatttgcattatacttaccagttcatcatccctatttgaaaatacaaaatgctccaatgactatttcctttgagcatgatgttggtgctccagaagtctcagattttggagcattttggattttggattttcagattaggaatgctcaaactgtactggctgaacaaggtagacgtttctttctttcttatgtaaaatccagaatgtatatgacaattctattctatagaattcgcagggatccaggcttcttccagctcacttggtgcttagcccattttgtgctgctataacagaacacttgagactgggtgatttataatgaacagaaatgtattggctcatacagttctggaggctggaaaatccagtatcgggcaccagcagttctggtgtctcatgagggcacggtctgttccaagtggcaccttgaatgctgccggaggggaggagcgctgaccctcatgcaacagaggaatggaagaggcaaacagagagccactcccggagtcttttttctaaggaaaagcctcagtccattcatgaaggcagaacacgcatgaccaaaacacttcctgttaggccccacctcccaacactgccacagtggccaccgaatttcaacatgggttttggagaggacaaacactgaatggcatagggtagcatagggtgtggcccttgtcttcatggtctgtgaaagtgaccagagcatcaatgtcacatctaccttccaagcagcgaggttaaaaaaagaagaaagaaagaaagaaaaaaaaaaaaagacagacaaagagcacgtggcagctatctttcaaggaaggttctggaaaatcaaccttgtcacttggcttcatctcagtgggtacactaggtgtgaccataactagctacaaggcaggctggaaaatcattttggggatcttttttctggatagccatatacttgcattaaaataagagattctattattgtagaaggaaagaatagattggggataaagcagcagcccgtggtacaggctggtggtgttcctttgtggggctgttctgcagttctaattgctgggcatgtaggtttgctccagggctttggctgtggtaaaccatgccgggatgcccagctttgggtctcatctgtagtcagggccactgctcgcccaaaagcacctttrtgtgagtgagagcaaggcctacataatctgacatgctagccactagacatatgtactatttatatttacattcaaattaattaaaattcttaaaaactaaaaattccatttcggagtcacagtaactacattttgaagactcagtggctgactaatggctactgtattcgatagagcaaatataaaacatttctatcatygcagaaacttctattggacaacgctcttccagctaaggcagcttcatattggtgcsaccgactaggtgggccaagtgtgggcctgcctcagccttccttgacatctcagccaggctgccttagacaggggccagcagcaaacaatatgtggcaccttgcctttagtaatcccaaaccctgcagacmgtctcctcttggcagctagcctcaggaggagtcggatggattgttggactgagagaaaacagtgagtactgacttgggttttggggaggcagttcttgctgggtggtgagaatgtttatgtaacctgcaggtagcatgggctggttctcctgttctttattctttttgtgggaaggtggaagtgggagaggaattgagccccatccaacccacccctattcagaactggaaagagtacactcaagagtggatgattgcctctgagtattccgtcactcaggagatggggaagagctacayacgtctgttttctgaaaattatggtatttttagctccaaaagagtttaaagcagatttaaatgcacagtggataatgataactttcacatctgagcgatctcggaggacatctgctcggatgctgttcaaacacgctctgactggctcagtatctttatttttcttttgacaatggtaagtggtggagggagagaatgaggatttcaagatctgtcataaggcgactaaactgggttgcagcccagggtcctcttagaagagaggagtttaccctgcactaggtctcctgatctcccctggtgggaaggttaaatgtctagtaaaagcttctagtagaagctttggggtggtctagactcccatgccctgcagtgaaggggccacagaggagctgtgagggagcacccaggcaccctcatgtggcttttctgagtacagcaacatagaarcactgctttggagctcagggcctgtccatacagtcctgcttggatggttctggttgcagagagctcctgctaaatctttcctgttgggtgaggtcagctcttcctgttagaaagttctcatctggactctgcggtggcctctctgtgcctttcactcactgaccctagagcagcacggtgtggcgtgatcttctcgggcaaggtccttactctgtgtgcttcagtttcctatcatgttcccatgataataggacctgccctgtgacaatgttgtgaggtttaaatgaggtaataatatatgaagctcttagaacagttcagtaaggtttgctgttgctattttttattaccttttcttctcctaagctacttttttttttttgagacaggctcactctgtcacccaggctggagtgcagtggcatgatctcggctcackgcaacctccgcctccccrgctcaagtgatccttccacctcagcctcccaagtaggtgggacgaaaggtgcatgccaccatgcccagctaattttttgtatttttggtagaaacagggtttcactatgttgcccaggctggtctcaaactcctgagctcaagcaatccacccaccccagcctcccaaagtgctaggattatgcccaacctaagctaccgtttttacctcccaagccttggtgtaggccagggaggcactctcctttgacaaccaattgcaaagggtcaggcaggtctttttgaccgaggttggaggaagggcagatttcccacactggagcagcaaggcacaggggacagagcgggctgcaaagccaggcaccaggggcacatccagactccatcttttaccagtgaggtgttctcagtgggccrctaaacctctctgagcctcagttgtgccagttgggaaataggaggataggtacatacttctgagtcatgggaatgatgatgaggcagtgtgtaactagcctgggctggctgaaggcacgtaataaataagtgcctcccctcctctgttgacaggagccccttgttgaacagaagtccatgttctctcccattcagcccatagacatttcctggggttggtttttcatataacagtttcagaatggttcatgttgtgatggagggggaaatagggacacagtccagggggcatcagagagcaatttcaggaatctgaccagttggccaacagcctaagcctcrccacattgcatggcaacttcaataaaaccacttggccagctcacccaagggctggcctctgggcttcggcagtcagacccgctgcatgtccccaggtgtcaatctgttgccccagtactggttgcagccccagtgcaggctacaattgcaccaactttcctgaaagaatgtcaatactagaagggccttgaaaagtcttgtccaagccctgaattttacatctgaggtgaagatggcctgagaggtggagtggttggcctaggtcacactgtgacaatgtagaggctctctggatgtcagtgccgtgtaccgcttccgtctccttgtagcctccttagtctggctgctatgctgggaagggcgtccagacctaggtgggcccagccccaggtgttcttatggtccctgctcttagcctctgcatagcactcatcctaaaaggtctggctgtcccatcctgactcggcaactcaccccttctagaagcagagctgcagaactagatcgcacccgaccccccagcatctctccaggctcctttcacacggcttctgccttgcctcttccatgatgctgcctgttgctgagagtgtgtaagccaggaattacacactgatgagaactgatgaaacctatagttcgcatagcctgtgtggtaggaagaggctgagaagctttcgcaggttcaggcaagttggtaccttacgaagacatatgcacttggtcaggctgtcagttcctaggaccaattcctcatcagctctgcctgcatcatttttagagaatttttccactttttcctttctatgttgactgcaatgagaggcataagcrgcaaccgcagtaagctctcacattattgctcaggaagagaagacactagggggccttcctatccccatcctttattctctagccctcttcattccacatcaccccgtgggagagggcaagagagggctctgttctgtgggtctgtggggagtagacrgaaacttcaggaggcccaattggatgttttttttcatgtgaagtatctttgcgcctcggtcttctggtaagcaatagctgtatctaaatgaccaagtctgtttgtcatggtgagcccggccacatcaatgatatgtttgatgtgttttatcaaaaactgcctgtgtactagagaagacatttttattccccagctcattctgtttttcatctcatccctcacattttataggcctgatgttttaagaaaagttattctttcactataaaacttggttttattaaaatacacttattttaactcatttcccaaactaagttcatgttttaaaatctcccacggctctctgtacagtcaccaggtattactggaattgctagtgtggttagacagttggatatttgctttttggggggcattgagtgttcttggtgaaggagctggaaaagtggaaggggccaggaacctaggggctcaactgaagttccaactgagttgccacctgtgcaactgtgcaggtgttacttgtcataggtggtaatctgacttttacttattatttgggcccagctcagatgccgcctcctccatgtggccttccctgctgtgaacggaagcttgtggctcctgccacttgtcagcacactctctcccctctgccttttttttttttgagacagagtctcgctctcgcccaggctggagtgcagtggtgcgatctcggcttactgcaagctccacctcccaggttcactccatcccctctgccttttgatgtgctttgttgtgtctcttttctcagccagattgtcagctccttgaggacaagctctatgtcttaactctcatctttgcagctctcccctgggggcatcttcagcccctgcattccccctgccacccgctagcccctgcaatcactgtgtccctccagggctgagtggggtgctccccacacagtacatgctcagtgcatacctgttgaaacggaatttcagattctcagtaccttttatggaatatcactttctgctgagcattaacagttatttgtacacgttttatttttcctgtaaggtcagggctggtaaacgttttccatcagggccagacagaagaggccttrtggaccatayggtctctgttgcaattactcaaatctgcaaccatagacgatgtgtaaatgaatgggtatggctgggttcccrtaaaacattatttacaaaacaggcagttggcctagattgccagcccccttagcagattttcagcttctgaaaaggcaggctctgtgtctcatttgccttgtgtctagcagaggccatgcagagagtgagtgctccataaatactcatttggggattattaaatgaagcaaaaggctggaatttgagctgcacacatacaggcctcatgacccagtgtttcaattcctaggtcatacccaacaggattgcctgcacgtagtcaccggagggcatgtgccagggtgtccatggcagcactgtttgtcatggccccaaactggaatctaccccagtgccagttgacaggagataattaaatcaattgcagcatattcacaaaatggaatactatgcagcaattaaaataaatgtgctctatgtaaaaatatggatgaatctcacaaacacgatgttgaattaagatgaagctacacataaaatattacatattgtatgactccattcacaaaaagttgaaaggcaggtaaaacacatctatgctgtgagaagtgaggagagtggttacctttggtggtggaggtgggctggaaggggttctcgggagcttcctgaagcactggctgtgcttttctccttgatcagtgtgctggctatgggggtatgctcagtttgtgaaaattcttcaatccgtgcacttaggatttgtgtacttttctgtatgaatgttatggttgcataaagcattccatttaaaacaaaacaaaaagtaaagtagtttgtccaaacattatttaaccaaagactactatcagccgttctgattttctgtccaatgctcttcaactgctgaccccaaatatgggctctttgtcctagaaaggggaatatggaagccctgtctctcctttcgtcatctctttcacccaggtgtacaagagcagarcccggcattgagtattttgaagatggagccaatgtccctggtctgcccctgcctcggcatcccccaccacctctggcatccatacccgyggtgggtgctgtaacggcatctgggctttgtcatctsctttgcagaacatcgtagctgtgggagctgggttctgcgacggcctccgctgtggagacaacaccaaagcggccgtcatccgcctgggactcatggaaatgattgcttttgccaggatcttctgcaaaggccaagtgtctacagccaccttcctagagagctgcggggtggccgacctgatcaccacctgttacggagggcgkaaccgcagggtggccgaggccttcgccagaactgggaaggtagcccctcacctgctctcccgcaccccctccttcctcacttgagactcctggcttggggtgaactgcagcccagtggagatttcatgccagcatctatttgctgggattgttccgtttgcctggctgctttttcacttgactcttctgttctttatctttgtgtctttatctttccttggcttccagcaggggactgaagctcttctctcactctgctcttgaaataattgatgctaggccgggcgtggtggctcatgcctgtaatcccaccactttgggaggccaaggtgggaggattgctttaggcyrcaagttcgaggccagcctgcacagcatagcaagacccattctctaaaaaaaaaaaaaaagaaaaaaaacacttaaaaattaaacaaataaatgattctttagtctttaccatagtttttttaaatatataatcctttgtttttaagaccattgaagagttggagaaggagatgctgaatgggcaaaagctccaaggaccgcagacttctgctgaagtgtaccgcatcctcaaacagaagggactactggacaagtaagtctctcagtcgcccatgagaccagataaatgtccatcattcctattctcaggacttccagccccacggagatgagctagactatttgacaagtgcccttagaacttatctggattagttcagtcctttgtgtgatgtgaacgtctgtgatgagaagcatctacctactcccaaaacatgtgtttacacaaaaccaggctcaacttcaatgaaaggagctcaattctataagtcatgttataaaatacaaaatttaagattctagtttgtctcgcagggtgtttggtaaaagctacatatcatacgttttaaaatttgtaaaaattacttttttgtttttattaaaaagtatggttatgttattaaaatgtcaagtcagaaaagaaggaaggacgagttagcccaacattataccattagaaggtagctctgttaagtttggtgcacagccttccagtctcttcatcgggtgggtagatggggcttaggatgggatgggatgggatggaatgggatgaagggatggatgatgggtgggtgggttggcaggtgggaagggatgggatgagatagatggatggatggatgatggatgggtgcatgggtagatgggtgagtggatgggtgggatgggtgaatggatggatgatgggtgggtgggatgggatgggatgagatggatggatggatggatggatggatggattatggatgggtgcatgggtggatgggtgagtggatgggtgggatgggtgaatggatggatgatgggtgggtgggtgggatgggatgagatagatggagggatggatgatggatgggcgcatgggtagatgggtgagtggatgggtgggatgggtgaatggatggatgatgggtgggtgggtgggatgggatgagatagacggagggatggataatggatgggtgcatggatagatgggtgagtggatgggtgggatgggtgaatggatggatagatgggtgggtgcatccatcctccttgaacctaccaggccagttgtgtgttaaaggtgggcttaagtcagtttatttgccacctgattgagagagtgagccctgtagcaccagaaaagcttcccagcctctcctgaggccactctccagccctacctgctccacagcactttctcttgccgatttactgagcatgattgtggaggaccataatcatgatgccaactacaccacygcataaatgcttatgcagcatattgcatgtatccttaactctcccgtaatactctctaggggaggggaggtcttgttgcctaggactgaagggagctgggcagctggaatgacatgctgattgtggctaattyagagcatgagcttctctccaagctgggaggagggtcgtggatgttgttgctattatctctggttgcagctcctttatcctggttctgtcagtttaggtgtctgctggtcccagtcatgcatctttacctccccctgcacccagcacccctcctccttttacccagaacaaattaatcagccatrgagttctgtactgaaagttaaaaatgagggtggatggagcatttgtcttaccttttwaatttgcactttatttttctgaaatggcttttaaaaccagccatgcagagatggaagttcacaaacaggctgccaaaggaggagaactacctttaaattgtggctaaaaggaaaatgcctctgacatgcatggttttccttacctacttagcagcagacagtgatatgtttgtgtgtggttggactactttaatgaccactgagcatttatcaagaaatttttttaagtctcaaaaaaaaataatacttggctgtttagtgagactctcccaaccagaattttcaagtggcatcttgaaacacaccccaagtgtgctaccatggggtgccttgataggattctctggatggacaggttggctgggcattagcctgttagctccagggggacatggactagaattgcgattctggggccagtagctccctgttttcaaaagcaggtgtaatcaagcaggtaaatctctgctctgagcagacatctctccttggtcatgtcccattttatttcttctgattagagattgaacaggctccacctgtgcttaataacatcgctgctggattggacgtggcagcacccttctcctgggctggagtgtagaatcccctgggactcctccccattccttgtaccacctgcctcccaaaggcagaggcctrttgtgctccctttgcaccacctcttactttgattcctttttcctttttcattctgaccaccactactccggtcttcctctgtttccttctccctcccttctcttctccattgctatagaaaaaatagcaggagggcagcattcaaggctgccctgtggcttattagccmtgtggccttgggcaagtcacgtatttagctgttctgtgccccggtgttcttatccacaaaattaagatggaagaccagatgaacaccatggtccctaccagcttgagcattcacattcagaggcctcctgctcttatagagtgaagcacatggtccttaggcagatgtggcccccctcaatctagcaccaatgtaacttcctgcagtacatcctcttactccctatggtaccgtcttttcttgaatggaacttttctttgcctctcattttaccttaattaccttttcaaaggccgtgtcacattctgagatactaggggttaggacctaagcatattaattgggaggagggcacaattcagcccgtacacaacatgttctctgaggtgcatgttgcaagctcctgggtctcactctgtcacccaggctggagtgcaatggtgcaatctcagcactgcaatctccgcctcccatgtttaagtaattctcttgcctcmgcctctccagtagctgggattacaggcgcgtgcccctatacccagctaatttttgcatttttagtagagactggtttttaccacgttgcccaggctggtctcgaactcctggcctcaagcaatctgcccaccttggcttcccaaagtgctggattacmggcatgagccaccacgcctggcctggctttatttataatactgcacatccctgcacttagtctgaagtctgaaacatcttaagccctcagtattgattagtgggatagctggctgactggtttgtcctttttttttttttttttttttttttgagacagagwcttgctctgtcrcccaggctggagtgcagtggcacgatcttggctcactgcaacctccrcctcccaggttcacaccattcttctgcctcagcctcctgagtagctgggactacaggcgcccgccaccamgcccagctaagtttttgtatttttagtagagacggggtttcactgtgttagccaagatggtctcgatctcctgacctcgtgatccacctgcctcaacctcccaaagtgctgagattacaggcgtgagccagcacacccaggcctctggtttgtcatttttttaaatgaaatgttgtctttttcttcctttcacctctaactttatttagagagtcttccaaactgatctaattgtccttttagcattttatrtaatagaaaataatatttagatgggcagtgtagcctaatggttgatcattggcttcagagtccaaaactgtggttcaatttactcatatatagaatggggacaatattttctacctcatggggtgattgtaaggattaaacaagttactcgtctgtagaaatttctcttccacacacttcatatctcttgttaacatcccttccacagaatgcactttggaaatgatagttttaaaagttgggagtgctttcagctgcaagascaacacacagttataacagggaatatggaggtgaacattattaaagtgttggcccagtggctctggctctggattagaatctcagtgatcctgttggctttcccttgaacctcaagatggctgcagcagctccaggcatcacattcacttttacactcaggaagggaacaagagtagtctggggtaacagatttttcctctagtgcctctcgagaaatcttcctcgagaaaccttcagcagatatattatgtcttgctgcctaggactgtgttacttgaccaattctaggtgaaaggctaggaaggtgagtagtstcttccaaccttggggaaagggagaagcaggttggaaatggctttggatggccagtcatctgctaccacactgctttggggacatatacattgttcttgttttaggaacagggaaacatagcatggaaggacaaagaaaggggctgaagtttctaggctttaaatccaatccacaggaatttattcaacgaattctcacggagcacctgccccttgccgtgcatggtgccaggcactgaggatacagtagtgaaaaaaacagacttggtcccagtcctcagggagctttctcggtccaggacacactatccatcttgtggctgctattataagctgttgttactgcacatccaccatttgccaagtgtgtactgtgtgcttcacacataagtcatttaatacttgcagcaaggctgtgtatccagtcccattttacagatgggcaaacagggtcagaaggattgtgaaacttgcccagagttagtaggctgtagagtcagagttgattaggtctacctgactccaaaaaaataaaacattccacaaaaaagtagcaaaacattccrtaccttaaaaaaactacaatgaagaaacaaccctacaacgatagactctcataaagacatgtgatctattagtactatttgttcttcttaaaaattatcattataaggttctgtccagctaattttcaggattgcctttcaagactctattgattctgccaagctcactttgagctatgtgtgtgtgtgtatttaaaagcctgggccrgcgcggtggctcacgcctgtaatcccagcactttgggaggccgaggtgggtggatcatgaggttaggagtttgagaccagcctgaccaacatggtaaaaccccgtctctactaaaaatacaaaaattagccaggcgtggtggcacacacctgtaatcccaactactctcaggagactgaggcagcagaatcgcttgaatccaggaggcagaggttgcagtgagacaagatcatgccaccgcactccagcctgggcgatagagtgagactttgtcgcaaaagaaaagaaaaaagaaaaaaagcctgatgaaattatttctttagtgatttttcacttatatctgtattcacatcttggaagaaaaggtaagataaatcaagcttctgacataagatgagtgctttgctaatcgtgggtcctcactcggattcttgcgggagcattccagcctacattatttgttaccttgggatgattctttttggagaagggagagcaatgcctccttgcaatttaaaaatttatttttacaacttttaaaataatgacagaatatagactcctccaagatttgaccaagagttggagccacagctcctatgtaaatgacaacagtttgccctggtaggatcaccgtgtgacttggttgtggacagtgtgctccaagcttaattaggcagaggatggtctaggttgccccaggatctgacagccacattccagaggctctctgcagaccaaataataaaggaatgtagaaagtgctcactgtgttttccatagtcacatactaacctgcaatctgttaggacagaaaacctaacttattctctgaggtaaatccagtggcctaactttgtcttttcacatttcctcccaactaggtttccattgtttactgcagtgtatcagatctgctacgaaagcagaccagttcaagagatgttgtcttgtcttcagagccatccagagcatacataaagtgaatcatgcaacgtkttgggggaagttctgcctttctgatcaatcttttgggttcacgtggaaaccaggacttggcaacatgatgtttgactgtaatctcatcacggatatgtatgaatttttacaggttcgtttttgaattgtgagaggcagttcattagcaaagatgtactgggcagtaactaaacacacatgcaaacrtgtgaatggtggtttattcctcattctgtggatgtttctatgagccaaaatttgatgtctttttttcaaaattgcttatgaaatttccacacaatcgtagcttataagattggaacgatctcagctaaattttttaggtgtaattcatatgtatttgagtggaggattttttttctcatttttctagtgttaaattttaaccagcattaacatggtagagtggaggagtgagtgtgttcaaagatcaacatatttaacttttaaacactatctcaaagccagcataattaactactttgattgtgggctgacctttgtttttttaacaatcaggcatttttaattagataatccactcatgtatttccccctcactgcagttgtctgcatttttagcctcttttctcttcgttagttgtcagaatatgccttcgtcaaggctcagaggtaacaagacagaaaattcatctgggattttcctgctgtggctggcacattcttctgattaacagacacttgtatgatgctttaggctagttagtgcattttttagcaaacatttatcttaaacatcacagatccactggggggtgcaaggggctactgttagtcctcttgttagatgcagtcactcctcctggtcacctagtgagcagggacagagccaggagtcaagtgcagtgccaaggtgcatgaccctctgagaagtcactgggctgatttgacctccgactcattggttgtgcaaatgccatgtgcagcctttcctgaggccataggagggcttcctgcagctgagatctatgcaggccatcctctcaacargtgccactccaagggcggtcctcggtgcagcagcakcagcttcacttgtgggggggtgggggaaggggcggtctcagaaatgcaggttcccaggtcccaccctggacttctgaaggggtgtggcatctgtgtttctgatgcttactacaatatgtgaaccactactttagaaaatctgctttaacttggyattcctctaattgtgttccctaggaaatgactgtcccaagagccagtgattattccaggtgttccctggaaaggtcaagtgagtctgggaaacactatgtctgtacacctcttgaaggtgtcgaatgtatgtttatacatcagtggaacccatttttctagcctagcaagtcccaaacacattacactgaagagattttggtgaggaaacttgctggagttttcagggaacactgttctaggcttaggtgacygtaggatcactcaagtagacccttcactccctgcgagaaattaggatgaataactacctgtggcattgttggttctgaacttttacagttcaggcctgctgtgaatctttgatgaagctttaaggtgacactgttgtacaagatgtcagctttgctgaaacgcacattacctggaataagtgctttaattgtagaattagaatgggatttactgtactgttttaaatgagattggcttcagaatccattacagttaccttacatagcacttgatacgtgttaaatgaacatatgaatgtaatttatatattcctagaatttaagttactttgtgagatttgggcctgtccctcaacgccagtttaggatttctttttttctataccttgaaatgattataaaatagattttcatgggaattttaaaaactctatccaaaacatttttggagcattttaaagccccatacacagaagtatacgaaagcacacaaaacactccaagtttcagcagttttagcgccaccattaacccactttgcttgtctcatgaaaaatctttgttaaagtttgtacacaggtaacaaaaagttactttaaaagatatataaagggctgtaagctaattgtggtgtctagtaagtagcataatgagatgtgaggagttggaactttgcgtgttttgcgtattttcatctgcattcagcttcttactctgggtttgtactcgagtgttatttctttacaaatgcccttgtaattaccactctgaagtctgctgactgtgtctcttgaacatacttaggatattctgcacattatggaaaaaggtaaattttagaagtttctgctctactaactgtagatatttatgacyctgcgagttatctatttttataaccacctgtggtccattgttcattttaattcacatttcttatgaagtatggtaacagggagggagacacctagattagcagctcaatttgtactacttcagccaatctgtgaatgtaaaaactacactgttgccttgctaggatccaccctcctrtaatatggaacaaatatctgaatgaaatccaccctaggagacggagtcaaactaaacttgtggtttttcatttaacttttgactacagcatggccccatggcatccacaccaagagggtgttgtgatgaggtgccggtgtgcaaagggaactttagtttttccactggttcttatctgctagccttttacatacatgtgtactatatttgtttatagactgtaggtggatatataatttaaaagcttgatttaataaacatttaaccccctaaacttgcaccgtggatcctgtttttctttttatcagcttaggtaatcattttatttgtcggctttttcttttttcctgaactgtgtttcattaccaatatcaaaaacagttttcaacagaagggcttcatctctaatcccaggccttaaatgcatctgtttttattgtttactgatatttttatacaattgcagtttaggatggagaccttctagtgaatttgaaatccccttctccccagtccatgtatacctttaaaagctgggaaaatataaccagtgctgatctcgtaaaaatgtaagggagctctccctctacctctacctctacctctctacctctctacctctctacctctctacctctacctctacctctccgtctccctctctttccacggtctccctctgatgctgagccgaagctggactgtactgctgccatctcggctcactgcaacctccctgcctgattctcctgcctcagcctgccgagtgcctgcgattgcaggcgcgcgccgccacgcctcactggttttcgtatttttttggtgtagacggggattcgctgtgttggctgggctggtctccagctcctaaccgcgagtgatccgccagcctcggcctcccgagatgccaggattgcagacggagtctggttcactcagtgctcaatggtgcccaggctggagtgcagtggcgtgatctcggctcgctacaacctccacctcccagccgcctgccttggccttccaaagtgccaagagtgcagcctctgcccggccgccaccccatctgggaagtgaggagcgtctctgcctggccgcccatcgtctgggacgtgaggagcccctctgcctggctgccccgtctggaaagtgaggagcatctctgcccggccgccatcccatctaggcagtgaggagcgcctcttcccggccgccatcccatctaggaagtgaggagcgtctctgcccggccgcccgtcgtctgagatgtggggagcgcctctgccccgccgccccatctgggaggtgaggagaccctccgcctggcaaccgccccgtctgagaagtgaggagcccctccgcccggcagccaccccgtctgggaagtgaggagcgtctccgcccggcagccaccccgtccgggaaggaggtgggggtcagcccttgccaggccagccgccccgtccgggaaggggggggggtcagcccccggcccggccagccaccccgtccgggagggaggtgggggggtcagccccccgcccggccagctgccccgtccgggaggtgaggggtgcctctgcctggccacccctactgggaagtgaggagcccctctgcccggccaccaccccgtctgggaggtgtacccaacagctcattgagaatgggccatgatgacaatggcggttttgtggaatggaaatgggggaaaggtggggaaaagattgagaaatcggatggttgccgtgtctgtgtagaaagaagtagacatgggagacttttcattttgttctctactaagaaaaattcttctgccttgggatcctgttgatctgtgaccttacccccaaccctgtgctctctgaaacatgtgctgtgtccactcagggttaaatggattaagggcggtgcaagatgtgctttgttgaacagatgcttgagggcagcatgctcgttaagagtcatcaccactccttaatctcaagtgcccagtgacacagacactgcggagggccgcagggtcctctgcctaggaaaaccagagacctttgttcacttgtttatctgctgaccttccctccactattgtcctgtgaccctgccaaatccccctctgcgagaaacacccaagaatgatcaatwaaaaaaaaaaaaaatgtaagggaaattcctagaatcctgaaacaaataggggactgattgccagagtcgaaagaattgagttgtgaagcttatgctacacgagagcccaccaaaggctatgttgtcagggaaaaaaatgaaataagaaaacccaggtagaggtacaaacaaagaagctgggctccatgtgagaaaaatgttttgttttgtttgctacagagtcttgctctgtcacccagtggtggcacacacctgtggtcccagctactcggggctgaggtgggaggatcacctgagcccaggacggttgaggctgcagtgagcagagatcatgccactgcactccagcctgggagatagagcagtgagacactgtcttgaaaagataaataaaatagttgaaaaataattcattatgagtgaaaaccaacagatttttaaaaacagagttagaaccgtaggatttcagataatttgagtaatacgatagatgcttttttaaaatcatttgaaatcctttatagagatgggggtcttactatgttgcccagactcgactgcagtggtgtgatcatagctcactgcagcctccaactcctgggcccaagcagtcctcctgcctcagcctccaagtagctaagactccaggggcatggtaccacacccagctttttttttaaagtaaagatagggtcttgctatgttgcccagtctggtctcaaactcctggcctcaagcaatcctcctgtcttggcctcccaaagccctggtactacaagcatgagcctggccagatgctttgaaagatatttttaaaaataaaggcataaaagaaggattaaaaaataaattgtatgggaggaaaaaaaaaaagaacccagccaggcagatttgaaaaggaacctattcaaacatttaggaatgaatataatcatttgaagtttaaaaataggcagatggaaagattaaagactagatttgacagagctgcagatggaattggcaaactggaaaatagatctgaggatattaaagtagcaaagaaaatatttgagaatttaaagattaagtggaagatagaataggacttgaacatacatctgataggagttacagaagagagaaaaaggaggcaatttttgaagaaaaggctgaaatttgtcccgatttaattatgtgcattcaattttatgttattctccataatgtatttccattaaaatttaatcacatggtctttatagctttttatgactgcatataaactaagttgatggtgaacgtttttgaggaaatacgctttatgaagaatctgtgtggataatctaatttactgaagctgtgattgattcaagttactgaagcaagtgatgttacctttggtaggatgggagacagcaggcctggtactgtgggaagacttgttctagctcctgcttaacatttaatatccatgttgtttagccaagtcagctaacttctctttgaggttcatttttctcattcgtaagtgggaataatatctgtgcagcctacctcataggattgctgttaaggtccgtaaagagcaggaaatcaacatattaaaggagaaaaattaaatgatcatggcgatatctgcttgtggcagaaacaatgccatgtgttcactaaattattttttcttttcttttttttttttttgtagatacacagttaaattacatttcccaacctccccagcagttaggtggcatcacatgattgagttctagtcaatggcatagggagagaaaagtgccactttcatgtgttctgtctggttctttattatttcttctgtgcgtgctggttgtatatcaatttccagtatgttctggaagccatacattgaagatgatggacccccttttcagccaggattctacaagacaatatggagaaagtaccccccaatcacattggtctgtgattgataggtacaaaaattattgtattatgccactgagacataggagttacttgttatagcagctagcataacttcacttcatacattgctaaaaagatgtttgaggagatccttttgtggttgataagtgtgatgattcagttttcatgctcatgtatgagatgtgcccccaatcaaacttgtcacaacatctgcttattatcagacatgaaaaaaaatagatgtttcaggaatttaaaaattgaacttgcagaaacatcaagagattagggaaattttaatcccttggtcactacagcatcacagtgtctgttttgccatcacttttttggacacaggaggctatatatgagtgtgggcgtgcctatgggtatgtctgtctgactcttccctacccaggataactctggctaaatccaaatttgtatatccaatagtccttctttctctctctcactctatttttttttttttttttttttgagacagagtcttactctgtcacccaggctggagtgcaatggcatagtctaggctcactgcaacctccgcctcccaggttcaagtgattctcctacctcagcctccagagtagctgggattacaggtgcatgccaccacacccggctaatttttgtatttttagtagagacggggtttcaccatgttggccaggctggtctcaaacccctgatctcgtgatccatccgcctcggcctcccaaagtgctgggattataggcatgagccaccatgctcagcctcatccttctttctctaggactaatgccagcaagttccaggacttataacatgtgcttaacatcagagaagtcttcaccaggtggtgatgtccttaagatgtcttcctcatttcaaaagctttaagttagaaatgtcactagatcttagataaggccatatgctacttgtaacctcctgaaacctgtctgtctgaaacctgaaggagtggttcttcagctccccctcaaagacttaggaattaaacttgtctgaattgtacacattgtgagtgaaatagtgccactggaaagtactttactgttgaactcaatgcaccctgttatttgtcaaattggtgttatttgactcgttacaaatggaaatgcttttatgctatgatggaagtgttatttgcatttttgttactagtcttatttttaaataatttttcaataggtaacacagtcatttggttcaaaaataaagcctgcttcccaagtagttattagtttttaacaatctcttctagaatttcatttcacacacataagcaaaatatatatattctcattcccttccccatttctctacataaaattgagcttacttgatgcattgttacacatcttgctttttttacttaacatgacatcttgacaatcttttatatcagttatttttaataactgcatgtttaactttttactttgaaataattacggattcatagtaaattgcaaaggtacccttcacccaattttccctaatatatcaacacctagtttttaaaattgtaagttaaaataacagtagcgaaacactttcagcactgctctttttctttctttttagtcagggtttccctctgttgcccaggctggagtgcagtggctcaatcctagcccactgcagcctccaactcctgggctgaagcattcctcctgcctcagcttcttccaatagctgggacttcaggcatgagccaccacacccagctaatttctgaatattttgtgaaaccagggtctcaccatgttaccaaggctgatcttgaactcctggcctcaagtgattctcctgccttggccccccaaagtgctgggattataggtataagccaccatgcctggcccacttttagcactgttctaagtgctttgcatagatgaacattaataaaaatgtatcacccccatatacagatggggaaactaaggcacaaagaggataaagaacgtgtccaaataacagagatagtaattaatgaggccacgttttggacctggggagtttggcttaaaagtctgtgttcttaactcttagataagactacattaactcctttgagtaatgggtgttcatagttaagcaaaagcaaacaatgatgtgaagggttgaaagtgtaatcattcaattcttttgcagactttcataaatgtactgt
